United States Patent Application Publication US 2024/0327476 A1 - sequence listing, part 79

SEQ ID NO: 149782 - DNA, 1248 bp, synthetic construct
  misc_feature 1..1248: note = Description of Artificial Sequence: Synthetic coding sequence
  source 1..1248: mol_type = other DNA
gtgaagcacaggagctctgtgatgaagcagttcctggagacagccatcaacctgcagctgttcaagcagttcattgatggccgcctggccaagctgaatgccggccggggcttcagtgatgtgtttgaggaggagatcaccagcggcggcttctgtggcggcaaccccaggagctaccagcagtgggtgcacacagtgaagaagggcggggccctcttcaacacagccatgaccaaggccaccccagctgtgaggacagcctacaagtttgccaagaaccacgccaagctgggcctgaaggaggtgaagagcaagctgaagcacaaggaaaatgaagaagattatggcacctgcagcagctctgtgcagtacacccctgtgtacaagctgcacaatgagaagggcggcaacagcgagaagaggaagctggcccaggcccggctgaagaggcccctgaagagcctggatggagccctgtatgatgatgaagatgatgatgacatcgagcgggccagcaagctgagcagtgaagatggagaggaggccagcgcctacctgtatgaaagtgatgacagcgtggagaccagggtgaagaccccctacagcggggagatggacctgctgggggagatcctggacaccctgagcacccacagcagtgaccagggcaagctggccgccgccaagagcctggacttcttccgctccatggatgacatcgactacaagcccaccaacaagagcaatgcccccagcgagaacaacctggccttcctgtgtggcggcagcggggaccaggccgagtggaacctgggccaggatgacagcgccctgcacggcaagcacctgccccccagccccaggaagagggtgagcagcagcggcctgacagacagcctcttcatcctgaaggaggagaacagcaacaagcacctgggcgctgacaacgtgtctgaccccaccagcggcctggacttccagctgaccagccctgaggtgtcccagacagacaagggcaagacagagaagcgggagaccctgagccagatcagtgatgacctgctgatccctggcctgggccgccacagcagcacctttgtgccctgggagaaggagggcaaggaggccaaggagaccagtgaagatattggcctgctgcacgaggtggtgtccctgtgccacatgaccagtgacttccagcagagcctgaacatcagtgacaagaacaccaatggaaaccagacctag

SEQ ID NO: 149783 - DNA, 2406 bp, synthetic construct
  misc_feature 1..2406: note = Description of Artificial Sequence: Synthetic coding sequence
  source 1..2406: mol_type = other DNA
atggagagcagagctgagggcggcagccctgctgtgtttgactggttctttgaagctgcctgcccagccagcctgcaggaggacccccccatcctgcggcagttccccccagacttccgggaccaggaggccatgcagatggtgcccaagttctgcttcccctttgatgtggagcgggagccccccagccctgctgtgcagcacttcacctttgccctgacagacctggccggcaacagacgcttcggcttctgccgcctgcgggccggcacccagagctgcctgtgcatcctgagccacctgccctggtttgaggtgttctacaagctgctgaacacagtgggggacctgctggcccaggaccaggtgacagaggccgaggagctgctgcagaacctcttccagcagagcctgagcggcccccaggcctctgtgggcctggagctgggcagcggcgtgacagtgagcagcggccagggcatccccccacccacccggggcaacagcaagcccctgagctgctttgtggccccagacagcggccgcctgcccagcatccctgagaacagaaacctgacagagctggtggtggccgtgacagatgagaacatcgtgggcctgtttgctgccctgctggccgagaggagagtgctgctgacagccagcaagctgagcaccctgaccagctgtgtgcacgccagctgtgccctgctgtaccccatgcgctgggagcacgtgctgatccccaccctgcccccccacctgctggactactgctgtgcccccatgccctacctgattggagtgcacgccagcctggccgagcgggtgcgggagaaggccctggaggatgtggtggtgctgaatgtggatgccaacaccctggagaccaccttcaatgatgtgcaggccctgcccccagatgtggtgtccctgctgcggctgcggctgaggaaggtggccctggcccctggagaaggagtgagccgcctcttcctgaaggcccaggccctgctgtttggaggctacagagatgccctggtgtgcagccctggccagcctgtgaccttcagcgaggaggtgttcctggcccagaagccaggggcccccctgcaggccttccaccggcgggctgtgcacctgcagctgttcaagcagttcatcgaggcccggctggagaagctgaacaagggggagggcttcagtgaccagtttgagcaggagatcaccggctgtggggccagcagcggggccctgcggagctaccagctgtgggccgacaacctgaagaagggcggcggggccctgctgcacagcgtgaaggccaagacccagcctgctgtgaagaacatgtaccgcagcgccaagagcggcctgaagggcgtgcagagcctgctgatgtacaaggatggagacagcgtgctgcagaggggcggcagcctgcgggccccagccctgcccagcagaagtgaccggctgcagcagaggctgcccatcacccagcactttgggaagaaccggcccctgcggcccagcagaagacggcagctggaggagggcaccagcgagcccccaggagctggcaccccacccctgagcccagaagatgagggctgcccctgggccgaggaggccctggacagcagcttcctgggcagcggggaggagctggacctgctgtctgagatcctggacagcctgtccatgggcgccaagtctgctggcagcctgcggcccagccagagcctggactgctgccacagaggagacctggacagctgcttcagcctgcccaacatcccccgctggcagccagatgacaagaagctgcctgagcctgagccccagcccctgagcctgcccagcctgcagaatgccagcagcctggatgccaccagcagcagcaaggacagccgcagccagctgatccccagcgagagtgaccaggaggtgaccagccccagccagagcagcacagccagcgctgaccccagcatctggggagaccccaagcccagccccctgacagagcccctcatcctgcacctgacccccagccacaaggctgctgaggacagcacagcccaggagaaccccaccccctggctgagcacagcccccacagagcccagccccccagagagcccccagatcctggcccccaccaagcccaactttgacatcgcctggaccagccagcccctggaccccagcagtgaccccagcagcctggaggacccccgggcccggccccccaaggccctgctggccgagcgggcccacctgcagccccgggaggagcccggggccctgaacagccctgccacccccaccagcaactgccagaagagccagcccagcagccggccccgggtggccgacctgaagaagtgctttgagggctag

SEQ ID NO: 149784 - DNA, 2274 bp, synthetic construct
  misc_feature 1..2274: note = Description of Artificial Sequence: Synthetic coding sequence
  source 1..2274: mol_type = other DNA
atgcagatggtgcccaagttctgcttcccctttgatgtggagcgggagccccccagccctgctgtgcagcacttcacctttgccctgacagacctggccggcaacagacgcttcggcttctgccgcctgcgggccggcacccagagctgcctgtgcatcctgagccacctgccctggtttgaggtgttctacaagctgctgaacacagtgggggacctgctggcccaggaccaggtgacagaggccgaggagctgctgcagaacctcttccagcagagcctgagcggcccccaggcctctgtgggcctggagctgggcagcggcgtgacagtgagcagcggccagggcatccccccacccacccggggcaacagcaagcccctgagctgctttgtggccccagacagcggccgcctgcccagcatccctgagaacagaaacctgacagagctggtggtggccgtgacagatgagaacatcgtgggcctgtttgctgccctgctggccgagaggagagtgctgctgacagccagcaagctgagcaccctgaccagctgtgtgcacgccagctgtgccctgctgtaccccatgcgctgggagcacgtgctgatccccaccctgcccccccacctgctggactactgctgtgcccccatgccctacctgattggagtgcacgccagcctggccgagcgggtgcgggagaaggccctggaggatgtggtggtgctgaatgtggatgccaacaccctggagaccaccttcaatgatgtgcaggccctgcccccagatgtggtgtccctgctgcggctgcggctgaggaaggtggccctggcccctggagaaggagtgagccgcctcttcctgaaggcccaggccctgctgtttggaggctacagagatgccctggtgtgcagccctggccagcctgtgaccttcagcgaggaggtgttcctggcccagaagccaggggcccccctgcaggccttccaccggcgggctgtgcacctgcagctgttcaagcagttcatcgaggcccggctggagaagctgaacaagggggagggcttcagtgaccagtttgagcaggagatcaccggctgtggggccagcagcggggccctgcggagctaccagctgtgggccgacaacctgaagaagggcggcggggccctgctgcacagcgtgaaggccaagacccagcctgctgtgaagaacatgtaccgcagcgccaagagcggcctgaagggcgtgcagagcctgctgatgtacaaggatggagacagcgtgctgcagaggggcggcagcctgcgggccccagccctgcccagcagaagtgaccggctgcagcagaggctgcccatcacccagcactttgggaagaaccggcccctgcggcccagcagaagacggcagctggaggagggcaccagcgagcccccaggagctggcaccccacccctgagcccagaagatgagggctgcccctgggccgaggaggccctggacagcagcttcctgggcagcggggaggagctggacctgctgtctgagatcctggacagcctgtccatgggcgccaagtctgctggcagcctgcggcccagccagagcctggactgctgccacagaggagacctggacagctgcttcagcctgcccaacatcccccgctggcagccagatgacaagaagctgcctgagcctgagccccagcccctgagcctgcccagcctgcagaatgccagcagcctggatgccaccagcagcagcaaggacagccgcagccagctgatccccagcgagagtgaccaggaggtgaccagccccagccagagcagcacagccagcgctgaccccagcatctggggagaccccaagcccagccccctgacagagcccctcatcctgcacctgacccccagccacaaggctgctgaggacagcacagcccaggagaaccccaccccctggctgagcacagcccccacagagcccagccccccagagagcccccagatcctggcccccaccaagcccaactttgacatcgcctggaccagccagcccctggaccccagcagtgaccccagcagcctggaggacccccgggcccggccccccaaggccctgctggccgagcgggcccacctgcagccccgggaggagcccggggccctgaacagccctgccacccccaccagcaactgccagaagagccagcccagcagccggccccgggtggccgacctgaagaagtgctttgagggctag

SEQ ID NO: 149785 - DNA, 2193 bp, synthetic construct
  misc_feature 1..2193: note = Description of Artificial Sequence: Synthetic coding sequence
  source 1..2193: mol_type = other DNA
atgctgttcaacagcgtgctgcggcagccccagctgggcgtgctgagaaatggctggagcagccagtaccccctgcagagcctgctgaccggctaccagtgcagcggaaatgatgagcacaccagctatggagagaccggggtgcctgtgcccccatttggctgcaccttcagcagcgcccccaacatggagcacgtgctggccgtggccaatgaggagggctttgtgcggctgtacaacacagagagccagagcttcaggaagaagtgcttcaaggagtggatggcccactggaatgctgtgtttgacctggcctgggtgcctggagagctgaagctggtgacagctgctggggaccagacagccaagttctgggatgtgaaggccggggagctgattggcacctgcaagggccaccagtgcagcctgaagtctgtggccttcagcaagtttgagaaggctgtgttctgcaccggcggcagagatggcaacatcatggtgtgggacacccgctgcaacaagaaggatggcttctaccggcaggtgaaccagatcagcggggcccacaacaccagtgacaagcagacccccagcaagcccaagaagaagcagaacagcaagggcctggcccccagcgtggacttccagcagagcgtgacagtggtgctcttccaggatgagaacaccctggtgtctgctggagctgtggatggcatcatcaaggtgtgggacctgaggaagaactacacagcctaccggcaggagcccatcgccagcaagagcttcctgtacccaggcagcagcaccaggaagctgggctacagcagcctcatcctggacagcacaggcagcaccctgtttgccaactgcacagatgacaacatctacatgttcaacatgacaggcctgaagaccagccctgtggccatcttcaacggccaccagaacagcaccttctacgtgaagagcagcctgagcccagatgaccagttcctggtgtctggcagcagtgatgaggccgcctacatctggaaggtgtccaccccctggcagccccccaccgtgctgctgggccacagccaggaggtgacctctgtgtgctggtgccccagcgacttcaccaagatcgccacctgcagtgatgacaacaccctgaagatctggaggctgaacagaggcctggaggagaagccaggaggagacaagctgagcacagtgggctgggccagccagaagaagaaggagagccggcccggcctggtgacagtgaccagcagccagagcaccccagccaaggccccccgggccaagtgcaaccccagcaacagcagccccagcagcgctgcctgtgcccccagctgtgccggggacctgcccctgcccagcaacacccccaccttcagcatcaagaccagccctgccaaggcccggagccccatcaacagaagaggctctgtgtcctctgtgagccccaagccacccagcagcttcaagatgagcatccggaactgggtgaccaggacccccagcagcagcccccccatcaccccaccagccagcgagaccaagatcatgagccccaggaaggccctgatccctgtgtcccagaagagcagccaggccgaggcctgcagcgagagcaggaacagagtgaagaggcggctggacagcagctgcctggagagcgtgaagcagaagtgtgtgaagagctgcaactgtgtgacagagctggatggccaggtggagaacctgcacctggacctgtgctgcctggccggcaaccaggaggacctgagcaaggacagcctgggccccaccaagagcagcaagattgaaggagctggcaccagcatcagcgagccccccagccccatcagcccctatgccagcgagagctgtggcaccctgcccctgcccctgcggccctgtggggagggcagcgagatggtgggcaaggagaacagcagccctgagaacaagaactggctgctggccatggccgccaagaggaaggccgagaaccccagccccaggagccccagcagccagacccccaacagccggcggcagagcggcaagaagctgcccagccctgtgaccatcacccccagctccatgaggaagatctgcacctacttccacaggaagagccaggaggacttctgtggccctgagcacagcacagagctgtag

SEQ ID NO: 149786 - DNA, 1230 bp, synthetic construct
  misc_feature 1..1230: note = Description of Artificial Sequence: Synthetic coding sequence
  source 1..1230: mol_type = other DNA
atgctgttcaacagcgtgctgcggcagccccagctgggcgtgctgagaaatggctggagcagccagtaccccctgcagagcctgctgaccggctaccagtgcagcggaaatgatgagcacaccagctatggagagaccggggtgcctgtgcccccatttggctgcaccttcagcagtgatgacaacaccctgaagatctggaggctgaacagaggcctggaggagaagccaggaggagacaagctgagcacagtgggctgggccagccagaagaagaaggagagcaggcctggcctggtgacagtgaccagcagccagagcaccccagccaaggccccccgggccaagtgcaaccccagcaacagcagccccagcagcgctgcctgtgcccccagctgtgccggggacctgcccctgcccagcaacacccccaccttcagcatcaagaccagccctgccaaggcccggagccccatcaacagaagaggctctgtgtcctctgtgagccccaagccacccagcagcttcaagatgagcatccggaactgggtgaccaggacccccagcagcagcccccccatcaccccaccagccagcgagaccaagatcatgagccccaggaaggccctgatccctgtgtcccagaagagcagccaggccgaggcctgcagcgagagcaggaacagagtgaagaggcggctggacagcagctgcctggagagcgtgaagcagaagtgtgtgaagagctgcaactgtgtgacagagctggatggccaggtggagaacctgcacctggacctgtgctgcctggccggcaaccaggaggacctgagcaaggacagcctgggccccaccaagagcagcaagattgagggcgccggcaccagcatcagcgagccccccagccccatcagcccctatgccagcgagagctgtggcaccctgcccctgcccctgcggccctgtggggagggcagcgagatggtgggcaaggagaacagcagccctgagaacaagaactggctgctggccatggccgccaagaggaaggccgagaaccccagccccaggagccccagcagccagacccccaacagccggcggcagagcggcaagaagctgcccagccctgtgaccatcacccccagctccatgaggaagatctgcacctacttccacaggaagagccaggaggacttctgtggccctgagcacagcacagagctgtag

SEQ ID NO: 149787 - DNA, 2067 bp, synthetic construct
  misc_feature 1..2067: note = Description of Artificial Sequence: Synthetic coding sequence
  source 1..2067: mol_type = other DNA
atgctgttcaacagcgtgctgcggcagccccagctgggcgtgctgagaaatgcccccaacatggagcacgtgctggccgtggccaatgaggagggctttgtgcggctgtacaacacagagagccagagcttcaggaagaagtgcttcaaggagtggatggcccactggaatgctgtgtttgacctggcctgggtgcctggagagctgaagctggtgacagctgctggggaccagacagccaagttctgggatgtgaaggccggggagctgattggcacctgcaagggccaccagtgcagcctgaagtctgtggccttcagcaagtttgagaaggctgtgttctgcaccggcggcagagatggcaacatcatggtgtgggacacccgctgcaacaagaaggatggcttctaccggcaggtgaaccagatcagcggggcccacaacaccagtgacaagcagacccccagcaagcccaagaagaagcagaacagcaagggcctggcccccagcgtggacttccagcagagcgtgacagtggtgctcttccaggatgagaacaccctggtgtctgctggagctgtggatggcatcatcaaggtgtgggacctgaggaagaactacacagcctaccggcaggagcccatcgccagcaagagcttcctgtacccaggcagcagcaccaggaagctgggctacagcagcctcatcctggacagcacaggcagcaccctgtttgccaactgcacagatgacaacatctacatgttcaacatgacaggcctgaagaccagccctgtggccatcttcaacggccaccagaacagcaccttctacgtgaagagcagcctgagcccagatgaccagttcctggtgtctggcagcagtgatgaggccgcctacatctggaaggtgtccaccccctggcagccccccaccgtgctgctgggccacagccaggaggtgacctctgtgtgctggtgccccagcgacttcaccaagatcgccacctgcagtgatgacaacaccctgaagatctggaggctgaacagaggcctggaggagaagccaggaggagacaagctgagcacagtgggctgggccagccagaagaagaaggagagccggcccggcctggtgacagtgaccagcagccagagcaccccagccaaggccccccgggccaagtgcaaccccagcaacagcagccccagcagcgctgcctgtgcccccagctgtgccggggacctgcccctgcccagcaacacccccaccttcagcatcaagaccagccctgccaaggcccggagccccatcaacagaagaggctctgtgtcctctgtgagccccaagccacccagcagcttcaagatgagcatccggaactgggtgaccaggacccccagcagcagcccccccatcaccccaccagccagcgagaccaagatcatgagccccaggaaggccctgatccctgtgtcccagaagagcagccaggccgaggcctgcagcgagagcaggaacagagtgaagaggcggctggacagcagctgcctggagagcgtgaagcagaagtgtgtgaagagctgcaactgtgtgacagagctggatggccaggtggagaacctgcacctggacctgtgctgcctggccggcaaccaggaggacctgagcaaggacagcctgggccccaccaagagcagcaagattgaaggagctggcaccagcatcagcgagccccccagccccatcagcccctatgccagcgagagctgtggcaccctgcccctgcccctgcggccctgtggggagggcagcgagatggtgggcaaggagaacagcagccctgagaacaagaactggctgctggccatggccgccaagaggaaggccgagaaccccagccccaggagccccagcagccagacccccaacagccggcggcagagcggcaagaagctgcccagccctgtgaccatcacccccagctccatgaggaagatctgcacctacttccacaggaagagccaggaggacttctgtggccctgagcacagcacagagctgtag

SEQ ID NO: 149788 - DNA, 1494 bp, synthetic construct
  misc_feature 1..1494: note = Description of Artificial Sequence: Synthetic coding sequence
  source 1..1494: mol_type = other DNA
atgaagatcagcatcctgctgatgttcctgtggggcctgagctgtgccctgcctgtgacccgctaccagaacaatgaaagtgaggacagcgaggagtggaagggccacctggcccaggcccccaccccacccctggccaatgaagaccccagcgacagcacccagagcgaggagggcctgggcagtgatgaccaccagtacatctaccgcctggccggcggcttcagccgcagcactggaaaaggaggagatgacaaggatgatgatgaagatgattctggagatgacacctttggagatgatgattctggccctggccccaaggaccggcaggagggcggcaacagccggctgggcagtgatgaggacagtgatgacaccatccaggccagcgaggagagcgccccccagggccaggacagcgcccaggacaccaccagcgagagccgggagctggacaatgaagatagagtggacagcaagccagagggcggggacagcacccaggagagcgagagcgaggagcactgggtgggcggcggcagtgatggagagagcagccatggagatggcagcgagctggatgatgagggcatgcagagtgatgatcctgagagcatccgctctgagcggggcaacagcaggatgaacagcgctggcatgaagagcaaggagagcggggagaacagcgagcaggccaacacccaggacagcggcggcagccagctgctggagcaccccagcaggaagatcttcaggaagagccgcatcagcgaggaggatgacagaagtgagctggatgacaacaacaccatggaggaggtgaagagtgacagcacagagaacagcaacagccgggacaccggcctgagccagccccggcgggacagcaagggggacagccaggaggacagcaaagaaaacctgagccaggaggagagccagaatgtggatggccccagcagcgagagcagccaggaggccaacctgagcagccaggagaacagcagcgagagccaggaggaggtggtgtctgagagcagaggagacaacccagaccccaccaccagctatgtggaggaccaggaggacagcgacagcagcgaggaggacagcagccacaccctgagccacagcaagtctgagagccgggaggagcaggccgacagcgagagcagcgagagcctgaacttcagcgaggagagccctgagagcccagaagatgagaacagcagcagccaggagggcctgcagagccacagcagcagcgctgagagccagagcgaggagagccacagtgaagaagatgacagcgacagccaggacagcagccgcagcaaggaggacagcaacagcacagagagcaagagcagcagtgaagaagatggccagctgaagaacatcgagattgagagcaggaagctgactgtggatgcctaccacaacaagcccatcggggaccaggatgacaatgactgccaggacggctactag

SEQ ID NO: 149789 - DNA, 1542 bp, synthetic construct
  misc_feature 1..1542: note = Description of Artificial Sequence: Synthetic coding sequence
  source 1..1542: mol_type = other DNA
atgaagatcagcatcctgctgatgttcctgtggggcctgagctgtgccctgcctgtgacccgctaccagaacaatgaaagtgaggacagcgaggagtggaagggccacctggcccaggcccccaccccacccctggagagcagcgagagcagcgagggcagcaaggtgagcagcgaggagcaggccaatgaagaccccagcgacagcacccagagcgaggagggcctgggcagtgatgaccaccagtacatctaccgcctggccggcggcttcagccgcagcactggaaaaggaggagatgacaaggatgatgatgaagatgattctggagatgacacctttggagatgatgattctggccctggccccaaggaccggcaggagggcggcaacagccggctgggcagtgatgaggacagtgatgacaccatccaggccagcgaggagagcgccccccagggccaggacagcgcccaggacaccaccagcgagagccgggagctggacaatgaagatagagtggacagcaagccagagggcggggacagcacccaggagagcgagagcgaggagcactgggtgggcggcggcagtgatggagagagcagccatggagatggcagcgagctggatgatgagggcatgcagagtgatgatcctgagagcatccgctctgagcggggcaacagcaggatgaacagcgctggcatgaagagcaaggagagcggggagaacagcgagcaggccaacacccaggacagcggcggcagccagctgctggagcaccccagcaggaagatcttcaggaagagccgcatcagcgaggaggatgacagaagtgagctggatgacaacaacaccatggaggaggtgaagagtgacagcacagagaacagcaacagccgggacaccggcctgagccagccccggcgggacagcaagggggacagccaggaggacagcaaagaaaacctgagccaggaggagagccagaatgtggatggccccagcagcgagagcagccaggaggccaacctgagcagccaggagaacagcagcgagagccaggaggaggtggtgtctgagagcagaggagacaacccagaccccaccaccagctatgtggaggaccaggaggacagcgacagcagcgaggaggacagcagccacaccctgagccacagcaagtctgagagccgggaggagcaggccgacagcgagagcagcgagagcctgaacttcagcgaggagagccctgagagcccagaagatgagaacagcagcagccaggagggcctgcagagccacagcagcagcgctgagagccagagcgaggagagccacagtgaagaagatgacagcgacagccaggacagcagccgcagcaaggaggacagcaacagcacagagagcaagagcagcagtgaagaagatggccagctgaagaacatcgagattgagagcaggaagctgactgtggatgcctaccacaacaagcccatcggggaccaggatgacaatgactgccaggacggctactag

SEQ ID NO: 149790 - DNA, 3906 bp, synthetic construct
  misc_feature 1..3906: note = Description of Artificial Sequence: Synthetic coding sequence
  source 1..3906: mol_type = other DNA
atgaagatcatcacctacttctgcatctgggccgtggcctgggccatccctgtgccccagagcaagcccctggagagacatgtggagaagtccatgaacctgcacctgctggcccggagcaatgtgtctgtgcaggatgagctgaatgccagcggcaccatcaaggagagcggcgtgctggtgcatgaaggagaccggggccggcaggagaacacccaggacggccacaagggggagggcaatggcagcaagtgggccgaggtgggcggcaagagcttcagcacctacagcaccctggccaatgaggagggcaacatcgagggctggaatggagacaccgggaaggccgagacctacggccatgatggcatccacggcaaggaggagaacatcacagccaacggcatccagggccaggtgtccatcatcgacaatgctggggccaccaacagaagcaacaccaatggaaacacagacaagaacacccagaatggagatgtgggagatgctggccacaatgaagatgtggccgtggtgcaggaggatggcccccaggtggccggcagcaacaacagcacagacaatgaagatgagatcatcgagaacagctgcagaaatgaaggcaacaccagcgagatcaccccccagatcaacagcaagagaaatggcaccaaggaggccgaggtgaccccaggcactggagaagatgctggcctggacaacagtgatggcagccccagcggaaatggagcagatgaagatgaagatgagggcagcggagatgatgaagatgaggaggccggaaatggcaaggacagcagcaacaacagcaagggccaggagggccaggaccacggcaaggaggatgaccatgacagcagcatcggccagaacagcgacagcaaggagtactatgaccctgagggcaaggaggacccccacaatgaggtggatggagacaagaccagcaagtcagaagaaaattctgctggcatccctgaggacaatggcagccagagaattgaggacacccagaagctgaaccaccgggagagcaagagggtggagaaccgcatcaccaaggagagcgagacccatgctgtgggcaagagccaggacaagggcatcgagatcaagggccccagcagcggcaacagaaacatcaccaaggaggtgggcaaaggaaatgaaggcaaggaggacaagggccagcacggcatgatcctgggcaaaggaaatgtgaagacccagggcgaggtggtgaacatcgagggccctggccagaagtctgagcccggcaacaaggtgggccacagcaacacaggcagtgacagcaacagtgatggctatgacagctatgactttgatgacaagtccatgcagggagatgaccccaacagcagtgatgagagcaatggaaatgatgatgccaacagcgagagtgacaacaacagcagcagcagaggagatgccagctacaacagtgatgagagcaaggacaatggaaatggaagtgacagcaaaggagcagaagatgatgacagcgacagcaccagtgacaccaacaacagcgacagcaatggaaatggaaataatggaaatgatgacaatgacaagagtgacagcggcaagggcaagagtgacagcagtgacagcgacagcagtgacagcagcaacagcagtgacagcagtgacagcagtgacagcgacagcagtgacagcaacagcagcagtgacagcgacagcagtgacagcgacagcagtgacagcagtgacagcgacagcagtgacagcagcaacagcagtgacagcagtgacagcagtgacagcagtgacagcagtgacagcagtgacagcagtgacagcaagagtgacagcagcaagtctgagagtgacagcagtgacagcgacagcaagagtgacagcagtgacagcaacagcagtgacagcagtgacaacagcgacagcagtgacagcagcaacagcagcaacagcagtgacagcagtgacagcagtgacagcagtgacagcagcagcagcagtgacagcagcaacagcagtgacagcagtgacagcagtgacagcagcaacagcagcgagagcagtgacagcagtgacagcagtgacagcgacagcagtgacagcagtgacagcagcaacagcaacagcagtgacagcgacagcagcaacagcagtgacagcagtgacagcagcaacagcagtgacagcagtgacagcagtgacagcagcaacagcagtgacagcagtgacagcagtgacagcagcaacagcagtgacagcagtgacagcagtgacagcagtgacagcagtgacagcagcaacagcagtgacagcaatgacagcagcaacagcagtgacagcagtgacagcagcaacagcagtgacagcagcaacagcagtgacagcagtgacagcagtgacagcagtgacagcgacagcagcaacagcagtgacagcagcaacagcagtgacagcagtgacagcagcaacagcagtgacagcagtgacagcagtgacagcagtgatggcagtgacagcgacagcagcaacagaagtgacagcagcaacagcagtgacagcagtgacagcagtgacagcagcaacagcagtgacagcagtgacagcagtgacagcaatgaaagcagcaacagcagtgacagcagtgacagcagcaacagcagtgacagcgacagcagtgacagcagcaacagcagtgacagcagtgacagcagcaacagcagtgacagcagcgagagcagcaacagcagtgacaacagcaacagcagtgacagcagcaacagcagtgacagcagtgacagcagtgacagcagcaacagcagtgacagcagcaacagcagtgacagcagcaacagcagtgacagcagtgacagcaacagcagtgacagcagtgacagcagcaacagcagtgacagcagtgacagcagtgacagcagtgacagcagtgacagcagtgacagcagcaacagcagtgacagcagtgacagcagtgacagcagtgacagcagcaacagcagtgacagcagcaacagcagtgacagcagcaacagcagtgacagcagtgacagcagtgacagcagtgacagcagtgacagcagtgacagcagtgacagcagtgacagcagcaacagcagtgacagcagtgacagcagtgacagcagtgacagcagtgacagcagtgacagcagtgacagcagtgacagcagcgagagcagtgacagcagtgacagcagcaacagcagtgacagcagtgacagcagtgacagcagtgacagcagtgacagcagtgacagcagtgacagcagtgacagcagtgacagcagcaacagcagtgacagcagtgacagcagtgacagcagtgacagcagtgacagcagcaacagcagtgacagcagtgacagcagcgagagcagtgacagcagtgacagcagtgacagcagtgacagcagtgacagcagtgacagcagtgacagcagtgacagcagtgacagcagcaacagcagtgacagcagtgacagcagtgacagcagtgacagcagtgacagcagtgacagcagtgacagcagtgacagcagtgacagcagtgacagcagtgacagcagtgacagcagtgacagcagtgacagcagtgacagcagtgacagcagtgacagcaatgaaagcagtgacagcagtgacagcagtgacagcagtgacagcagcaacagcagtgacagcagtgacagcagtgacagcagtgacagcaccagtgacagcaatgatgaaagtgacagccagagcaagtctggaaatggaaacaacaatggaagtgacagcgacagcgacagcgagggcagtgacagcaaccacagcaccagtgatgactag

SEQ ID NO: 149791 - DNA, 3906 bp, synthetic construct; identical to SEQ ID NO: 149790
  misc_feature 1..3906: note = Description of Artificial Sequence: Synthetic coding sequence
  source 1..3906: mol_type = other DNA

SEQ ID NO: 149792 - DNA, 783 bp, synthetic construct
  misc_feature 1..783: note = Description of Artificial Sequence: Synthetic coding sequence
  source 1..783: mol_type = other DNA
atggccaccccacccaagaggagctgccccagcttcagcgccagcagcgagggcacccgcatcaagaagatcagcattgagggcaacattgctgctgggaagagcacctttgtgaacatcctgaagcagctgtgtgaggactgggaggtggtgcctgagcctgtggcccgctggtgcaatgtgcagagcacccaggatgaatttgaggagctgaccatgagccagaagaatggaggaaatgtgctgcagatgatgtatgagaagccagagcgctggagcttcaccttccagacctacgcctgcctgagccgcatccgggcccagctggccagcctgaatggcaagctgaaggatgctgagaagcctgtgctcttctttgagaggtctgtgtacagcgaccgctacatctttgccagcaacctgtatgaaagtgagtgcatgaatgaaacagagtggaccatctaccaggactggcatgactggatgaacaaccagtttggccagagcctggagctggatggcatcatctacctgcaggccaccccagagacctgcctgcaccgcatctacctgcggggcagaaatgaggagcagggcatccccctggagtacctggagaagctgcactacaagcatgagagctggctgctgcacaggaccctgaagaccaactttgactacctgcaggaggtgcccatcctgaccctggatgtgaatgaagacttcaaggacaagtatgagagcctggtggagaaggtgaaggagttcctgagcaccctgtag

SEQ ID NO: 149793 - DNA, 48 bp, synthetic construct
  misc_feature 1..48: note = Description of Artificial Sequence: Synthetic coding sequence
  source 1..48: mol_type = other DNA
atggccaccccacccaagaggagctgccccagcttcagcgccagctag

SEQ ID NO: 149794 - DNA, 834 bp, synthetic construct
  misc_feature 1..834: note = Description of Artificial Sequence: Synthetic coding sequence
  source 1..834: mol_type = other DNA
atggctgctggccgcctcttcctgagccggctgcgggcccccttcagctccatggccaagagccccctggagggcgtgagcagcagccggggcctgcacgccggccggggcccccggcggctgagcattgagggcaacattgctgtgggcaagagcacctttgtgaagctgctgaccaagacctacccagagtggcacgtggccacagagcctgtggccacctggcagaacatccaggccgccggcacccagaaggcctgcacagcccagagcctgggcaacctgctggacatgatgtaccgggagcccgcccgctggagctacaccttccagaccttctccttcctgagccggctgaaggtgcagctggagcccttccctgagaagctgctgcaggccaggaagcctgtgcagatctttgagaggtctgtgtacagcgaccgctacatctttgccaagaacctgtttgaaaatggcagcctgagtgacatcgagtggcacatctaccaggactggcacagcttcctgctgtgggagtttgccagccgcatcaccctgcacggcttcatctacctgcaggccagcccccaggtgtgcctgaagaggctgtaccagagggcccgggaggaggagaagggcatcgagctggcctacctggagcagctgcacggccagcacgaggcctggctgatccacaagaccaccaagctgcactttgaggccctgatgaacatccctgtgctggtgctggatgtgaatgatgacttcagcgaggaggtgaccaagcaggaggacctgatgagggaggtgaacacctttgtgaagaacctgtag

SEQ ID NO: 149795 - DNA, 720 bp, synthetic construct
  misc_feature 1..720: note = Description of Artificial Sequence: Synthetic coding sequence
  source 1..720: mol_type = other DNA
atggctgctggccgcctcttcctgagccggctgcgggcccccttcagctccatggccaagagccccctggagggcgtgagcagcagccggggcctgcacgccggccggggcccccggcggctgagcattgagggcaacatcgcctgcacagcccagagcctgggcaacctgctggacatgatgtaccgggagcccgcccgctggagctacaccttccagaccttctccttcctgagccggctgaaggtgcagctggagcccttccctgagaagctgctgcaggccaggaagcctgtgcagatctttgagaggtctgtgtacagcgaccgctacatctttgccaagaacctgtttgaaaatggcagcctgagtgacatcgagtggcacatctaccaggactggcacagcttcctgctgtgggagtttgccagccgcatcaccctgcacggcttcatctacctgcaggccagcccccaggtgtgcctgaagaggctgtaccagagggcccgggaggaggagaagggcatcgagctggcctacctggagcagctgcacggccagcacgaggcctggctgatccacaagaccaccaagctgcactttgaggccctgatgaacatccctgtgctggtgctggatgtgaatgatgacttcagcgaggaggtgaccaagcaggaggacctgatgagggaggtgaacacctttgtgaagaacctgtag

SEQ ID NO: 149796 - DNA, 570 bp, synthetic construct
  misc_feature 1..570: note = Description of Artificial Sequence: Synthetic coding sequence
  source 1..570: mol_type = other DNA
atggctgctggccgcctcttcctgagccggctgcgggcccccttcagctccatggccaagagccccctggagggcgtgagcagcagccggggcctgcacgccggccggggcccccggcggctgagcattgagggcaacattgctgtgggcaagagcacctttgtgaagctgctgaccaagacctacccagagtggcacgtggccacagagcctgtggccacctggcagaacatccaggccgccggcacccagaaggcctgcacagcccagagcctgggcaacctgctggacatgatgtaccgggagcccgcccgctggagctacaccttccagaccttctccttcctgagccggctgaaggtgcagctggagcccttccctgagaagctgctgcaggccaggaagcctgtgcagatctttgagaggtctgtgtacagcgaccggctgcactttgaggccctgatgaacatccctgtgctggtgctggatgtgaatgatgacttcagcgaggaggtgaccaagcaggaggacctgatgagggaggtgaacacctttgtgaagaacctgtag

SEQ ID NO: 149797 - DNA, 768 bp, synthetic construct
  misc_feature 1..768: note = Description of Artificial Sequence: Synthetic coding sequence
  source 1..768: mol_type = other DNA
atggctgctggccgcctcttcctgagccggctgcgggcccccttcagctccatggccaagagccccctggagggcgtgagcagcagccggggcctgcacgccggccggggcccccggcggctgagcattgagggcaacatcggcaacatcctgaagcagatccgcatgagggcccccatccaggagacagcctgcacagcccagagcctgggcaacctgctggacatgatgtaccgggagcccgcccgctggagctacaccttccagaccttctccttcctgagccggctgaaggtgcagctggagcccttccctgagaagctgctgcaggccaggaagcctgtgcagatctttgagaggtctgtgtacagcgaccgctacatctttgccaagaacctgtttgaaaatggcagcctgagtgacatcgagtggcacatctaccaggactggcacagcttcctgctgtgggagtttgccagccgcatcaccctgcacggcttcatctacctgcaggccagcccccaggtgtgcctgaagaggctgtaccagagggcccgggaggaggagaagggcatcgagctggcctacctggagcagctgcacggccagcacgaggcctggctgatccacaagaccaccaagctgcactttgaggccctgatgaacatccctgtgctggtgctggatgtgaatgatgacttcagcgaggaggtgaccaagcaggaggacctgatgagggaggtgaacacctttgtgaagaacctgtag

SEQ ID NO: 149798 - DNA, 1416 bp, synthetic construct
  misc_feature 1..1416: note = Description of Artificial Sequence: Synthetic coding sequence
  source 1..1416: mol_type = other DNA
atggccaagaaggtggccgtcatcggggccggcgtgtctggcctcatcagcctgaagtgctgcgtggatgagggcctggagcccacctgctttgagaggacagaagatattggaggagtgtggaggttcaaggaaaatgtggaggatggccgggccagcatctaccagagcgtggtgaccaacaccagcaaggagatgagctgcttcagtgacttccccatgcctgaggacttccccaacttcctgcacaacagcaagctgctggagtacttccgcatctttgccaagaagtttgacctgctgaagtacatccagttccagaccaccgtgctgtctgtgaggaaatgtcctgacttcagcagcagcggccagtggaaggtggtgacccagagcaatggcaaggagcagagcgctgtgtttgatgctgtgatggtgtgcagcggccaccacatcctgccccacatccccctgaagagcttccctggcatggagcgcttcaagggccagtacttccacagccggcagtacaagcacccagatggctttgagggcaagaggatcctggtgattggcatgggcaacagcggcagtgacattgctgtggagctgagcaagaatgctgcccaggtgttcatcagcaccaggcatggcacctgggtgatgagccgcatcagtgaagatggctacccctgggacagcgtcttccacacccgcttccgctccatgctgagaaatgtgctgcccaggacagctgtgaagtggatgattgagcagcagatgaaccgctggttcaaccatgaaaattatggcctggagccccagaacaagtacatcatgaaggagcctgtgctgaatgatgatgtgcccagccggctgctgtgtggggccatcaaggtgaagagcacagtgaaggagctgacagagaccagcgccatctttgaagatggcaccgtggaggagaacattgatgtgatcatctttgccaccggctacagcttctccttccccttcctggaggacagcctggtgaaggtggagaacaacatggtgtccctgtacaagtacatcttccctgcccacctggacaagagcaccctggcctgcatcggcctcatccagcccctgggcagcatcttccccacagctgagctgcaggcccgctgggtgaccagggtcttcaagggcctgtgcagcctgcccagcgagaggaccatgatgatggacatcatcaagagaaatgagaagagaattgacctgtttggagagagccagagccagaccctgcagaccaactacgtggactacctggatgagctggccctggagattggagccaagccagacttctgcagcctgctcttcaaggaccccaagctggccgtgcggctgtacttcggcccctgcaacagctactag

SEQ ID NO: 149799 - DNA, 969 bp, synthetic construct
  misc_feature 1..969: note = Description of Artificial Sequence: Synthetic coding sequence
  source 1..969: mol_type = other DNA
atggagggcagcctggagcgggaggccccagctggggccctggccgctgtgctgaagcacagcagcaccctgcccccagagagcacccaggtgcggggctatgacttcaacagaggagtgaactaccgggccctgctggaggccttcggcaccaccggcttccaggccaccaactttggccgggctgtgcagcaggtgaatgccatgattgagaagaagctggagcccctgagccaggatgaggaccagcacgccgacctgacccagagcagaagacccctgaccagctgcaccatcttcctgggctacaccagcaacctgatcagcagcggcatccgggagaccatccgctacctggtgcagcacaacatggtggatgtgctggtgaccacagctgggggcgtggaggaggacctgatcaagtgcctggcccccacctacctgggggagttcagcctgcggggcaaggagctgcgggagaatggcatcaaccgcatcggcaacctgctggtgcccaatgaaaactactgcaagtttgaggactggctgatgcccatcctggaccagatggtgatggagcagaacacagagggcgtgaagtggacccccagcaagatgattgcccggctgggcaaggagatcaacaaccctgagagcgtgtactactgggcccagaagaaccacatccctgtgttcagccctgccctgacagatggcagcctgggggacatgatcttcttccacagctacaagaaccctggcctggtgctggacatcgtggaggcccaggagtttgatggcagtgacagcggggcccggccagatgaagctgtgtcctggggcaagatccgggtggatgcccagcctgtgaaggtgtatgcagatgccagcctggtgttccccctgctggtggccgagacctttgcccagaagatggatgccttcatgcatgagaagaatgaagattag

SEQ ID NO: 149800 - DNA, 984 bp, synthetic construct
  misc_feature 1..984: note = Description of Artificial Sequence: Synthetic coding sequence
  source 1..984: mol_type = other DNA
atgcccatcatcccagccttctgggaggccgaggccggcggcagccgggaggaggagtttgagaccagcctggccaacatgattgagaagaagctggagcccctgagccaggatgaggaccagcacgccgacctgacccagagcagaagacccctgaccagctgcaccatcttcctgggctacaccagcaacctgatcagcagcggcatccgggagaccatccgctacctggtgcagcacaacatggtggatgtgctggtgaccacagctgggggcgtggaggaggacctgatcaagtgcctggcccccacctacctgggggagttcagcctgcggggcaaggagctgcgggagaatggcatcaaccgcatcggcaacctgctggtgcccaatgaaaactactgcaagtttgaggactggctgatgcccatcctggaccagatggtgatggagcagaacacagagggcgtgaagtggacccccagcaagatgattgcccggctgggcaaggagatcaacaaccctgagagcgtgtactactgggcccagaagaaccacatccctgtgttcagccctgccctgacagatggcagcctgggggacatgatcttcttccacagctacaagaaccctggcctggtgctggacatcgtggaggacctgcggctcatcaacacccaggccatctttgccaagtgcaccggcatgatcatcctgggcggcggcgtggtgaagcaccacatcgccaatgccaacctgatgagaaatggagctgactatgctgtgtacatcaacacagcccaggagtttgatggcagtgacagcggggcccggccagatgaggccgtgtcctggggcaagatccgggtggatgcccagcctgtgaaggtgtatgcagatgccagcctggtgttccccctgctggtggccgagacctttgcccagaagatggatgccttcatgcatgagaagaatgaagattag

SEQ ID NO: 149801 - DNA, 462 bp, synthetic construct
  misc_feature 1..462: note = Description of Artificial Sequence: Synthetic coding sequence
  source 1..462: mol_type = other DNA
atgccccagctgtgcacccgggccagcagcagcgagatccctggccgcctgctgaccaccctgcagagcgcccagggccagaagttcctgcactttgccaagagtgacagcttcctggatgacatctttgctgcctggatggcccagaggctgaagacccacctgctgacagagacctggcagaggaagaggcaggagctgcccagcaactgcagcctgccctaccacgtgtacaacatcaaggccatcaagctgagccgccacagctacttcagcagctaccaggaccacgccaagtggtgcatcagccagaagggcaccaagaaccgctggacctgcatcggggacctgaacagaagcccccaccaggccttccgcagcggcggcttcatctgcacccagaactggcagatctaccaggccttccagggcctggtgctgtactatgagagctgcaagtag

SEQ ID NO: 149802 - DNA, 1086 bp, synthetic construct
  misc_feature 1..1086: note = Description of Artificial Sequence: Synthetic coding sequence
  source 1..1086: mol_type = other DNA
atgaagcagaagatgatggcccggctgctgcggaccagctttgccctgctcttcctgggcctgtttggagtgctgggcgccgccaccatcagctgcagaaatgaggagggcaaggctgtggactggttcaccttctacaagctgcccaagaggcagaacaaggagagcggggagaccggcctggagtacctgtacctggacagcaccaccaggtcctggaggaagtctgagcagctgatgaatgacaccaagtctgtgctgggccgcaccctgcagcagctgtatgaggcctatgccagcaagagcaacaacacagcctacctgatctacaatgatggagtgcccaagcctgtgaactacagcaggaaatatggccacaccaagggcctgctgctgtggaacagagtgcagggcttctggctgatccacagcatcccccagtttcctcccatccctgaggagggctatgactacccacccactggaagaagaaatggccagagcggcatctgcatcaccttcaagtacaaccagtatgaggccatcgacagccagctgctggtgtgcaaccccaacgtgtacagctgcagcatcccagccaccttccaccaggagctgatccacatgccccagctgtgcacccgggccagcagcagcgagatccctggccgcctgctgaccaccctgcagagcgcccagggccagaagttcctgcactttgccaagagtgacagcttcctggatgacatctttgctgcctggatggcccagaggctgaagacccacctgctgacagagacctggcagaggaagaggcaggagctgcccagcaactgcagcctgccctaccacgtgtacaacatcaaggccatcaagctgagccgccacagctacttcagcagctaccaggaccacgccaagtggtgcatcagccagaagggcaccaagaaccgctggacctgcatcggggacctgaacagaagcccccaccaggccttccgcagcggcggcttcatctgcacccagaactggcagatctaccaggccttccagggcctggtgctgtactatgagagctgcaagtag

SEQ ID NO: 149803 - DNA, 1317 bp, synthetic construct
  misc_feature 1..1317: note = Description of Artificial Sequence: Synthetic coding sequence
  source 1..1317: mol_type = other DNA
atggccctgcggggcgtgtctgtgcggctgctgagccggggccctggcctgcacgtgctgcggacctgggtgagcagcgctgcccagacagagaagggcggccgcacccagagccagctggccaagagcagcaggcctgagtttgactggcaggaccccctggtgctggaggagcagctgaccacagatgagatcctgatccgggacaccttccgcacctactgccaggagcggctgatgccccgcatcctgctggccaacagaaatgaggtgttccaccgggagatcatcagcgagatgggagagctgggcgtgctgggccccaccatcaagggctacggctgtgccggcgtgtcctctgtggcctacggcctgctggcccgggagctggagcgggtggacagcggctacagaagtgccatgtctgtgcagagcagcctggtgatgcaccccatctatgcctacggcagcgaggagcagaggcagaagtacctgccccagctggccaagggggagctgctgggctgcttcggcctgacagagcccaacagcggcagtgaccccagctccatggagacccgggcccactacaacagcagcaacaagagctacaccctgaatggcaccaagacctggatcaccaacagccccatggctgacctgtttgtggtgtgggcccgctgtgaagatggctgcatccggggcttcctgctggagaagggcatgaggggcctgagcgccccccgcatccagggcaagttcagcctgcgggccagcgccaccggcatgatcatcatggatggagtggaggtgcctgaggagaatgtgctgcccggggccagcagcctgggcggccccttcggctgcctgaacaatgcccgctatggaattgcctggggcgtgctgggcgccagcgagttctgcctgcacacagcccggcagtatgccctggacaggatgcagtttggagtgcccctggccaggaaccagctgatccagaagaagctggccgacatgctgacagagatcaccctgggcctgcacgcctgcctgcagctgggccgcctgaaggaccaggacaaggccgcccctgagatggtgtccctgctgaagaggaacaactgtgggaaggccctggacatcgcccggcaggcccgggacatgctgggcggcaatggcatcagtgatgagtaccacgtgatcagacatgccatgaacctggaggccgtgaacacctatgagggcacccatgacatccacgccctgatcctgggccgggccatcaccggcatccaggccttcaccgccagcaagtag

SEQ ID NO: 149804 - DNA, 918 bp, synthetic construct
  misc_feature 1..918: note = Description of Artificial Sequence: Synthetic coding sequence
  source 1..918: mol_type = other DNA
atgatccccctgctgctggccgccctgctgtgtgtgcctgctggggccctgacctgctacggggacagcggccagcctgtggactggtttgtggtgtacaagctgcctgccctgcggggcagcggggaggccgcccagaggggcctgcagtacaagtacctggatgagagcagcggcggctggagagatggccgggccctgatcaacagccctgagggcgctgtgggccgcagcctgcagcccctgtaccgcagcaacaccagccagctggccttcctgctgtacaatgaccagcccccccagcccagcaaggcccaggacagctccatgaggggccacaccaagggcaagcagctgacctacacctacccctgggtgtacaactaccagctggagggcatctttgcccaggagttcccagacctggagaatgtggtgaagggccaccacgtgtcccaggagccctggaacagcagcatcaccctgaccagccaggccggggctgtgttccagagctttgccaagttcagcaagtttggagatgacctgtacagcggctggctggccgccgccctgggcaccaacctgcaggtgcagttctggcacaagacagtgggcatcctgcccagcaactgcagcgacatctggcaggtgctgaatgtgaaccagatcgccttccctggccctgctggccccagcttcaacagcacagaggaccacagcaagtggtgtgtgagccccaagggcccctggacctgtgtgggggacatgaacagaaaccagggcgaggagcagagaggaggcggcaccctgtgtgcccagctgcctgccctgtggaaggccttccagcccctggtgaagaactaccagccctgcaatggcatggccaggaagcccagccgggcctacaagatctag

SEQ ID NO: 149805 - DNA, 909 bp, synthetic construct
  misc_feature 1..909: note = Description of Artificial Sequence: Synthetic coding sequence
  source 1..909: mol_type = other DNA
atgcactaccccacagccctgctcttcctgatcctggccaacggggcccaggccttccgcatctgtgccttcaatgcccagaggctgaccctggccaaggtggcccgggagcaggtgatggacaccctggtgcgcatcctggcccgctgtgacatcatggtgctgcaggaggtggtggacagcagcggcagcgccatccccctgctgctgcgggagctgaacagatttgatggcagcggcccctacagcaccctgagcagcccccagctgggccgcagcacctacatggagacctacgtgtacttctaccgcagccacaagacccaggtgctgagcagctatgtgtacaatgatgaagatgatgtgtttgcccgggagccctttgtggcccagttcagcctgcccagcaatgtgctgcccagcctggtgctggtgcccctgcacaccacccccaaggctgtggagaaggagctgaatgccctgtatgatgtgttcctggaggtgtcccagcactggcagagcaaggatgtgatcctgctgggggacttcaatgctgactgtgccagcctgaccaagaagaggctggacaagctggagctgaggacagagcccggcttccactgggtgattgctgatggagaggacaccaccgtgcgggccagcacccactgcacctatgacagagtggtgctgcacggggagcgctgccgcagcctgctgcacacagctgctgcctttgacttccccaccagcttccagctgacagaggaggaggccctgaacatcagtgaccactaccctgtggaggtggagctgaagctgagccaggcccacagcgtgcagcccctgagcctgactgtgctgctgctgctgagcctgctgagcccccagctgtgcccagctgcctag

SEQ ID NO: 149806 - DNA, 909 bp, synthetic construct; identical to SEQ ID NO: 149805
  misc_feature 1..909: note = Description of Artificial Sequence: Synthetic coding sequence
  source 1..909: mol_type = other DNA

SEQ ID NO: 149807 - DNA, 909 bp, synthetic construct; identical to SEQ ID NO: 149805
  misc_feature 1..909: note = Description of Artificial Sequence: Synthetic coding sequence
  source 1..909: mol_type = other DNA

SEQ ID NO: 149808 - DNA, 909 bp, synthetic construct; identical to SEQ ID NO: 149805
  misc_feature 1..909: note = Description of Artificial Sequence: Synthetic coding sequence
  source 1..909: mol_type = other DNA

SEQ ID NO: 149809 - DNA, 909 bp, synthetic construct; identical to SEQ ID NO: 149805
  misc_feature 1..909: note = Description of Artificial Sequence: Synthetic coding sequence
  source 1..909: mol_type = other DNA

SEQ ID NO: 149810 - DNA, 909 bp, synthetic construct; identical to SEQ ID NO: 149805
  misc_feature 1..909: note = Description of Artificial Sequence: Synthetic coding sequence
  source 1..909: mol_type = other DNA

SEQ ID NO: 149811 - DNA, 315 bp, synthetic construct
  misc_feature 1..315: note = Description of Artificial Sequence: Synthetic coding sequence
  source 1..315: mol_type = other DNA
atgcactaccccacagccctgctcttcctgatcctggccaacggggcccaggccttccgcatctgtgccttcaatgcccagaggctgaccctggccaaggtggcccgggagcaggtgatggacaccctggtgcgcatcctggcccgctgtgacatcatggtgctgcaggaggtggtggacagcagcggcagcgccatccccctgctgctgcgggagctgaacagatttgatggcagcggcccctacagcaccctgagcagcccccagctgggccgcagcacctacatggagacctacgtgtacttctacagatag

SEQ ID NO: 149812 - DNA, 81 bp, synthetic construct
  misc_feature 1..81: note = Description of Artificial Sequence: Synthetic coding sequence
  source 1..81: mol_type = other DNA
atgcactaccccacagccctgctcttcctgatcctggccaacggggcccaggccttccgcatctgtgccttcaatgcctag

SEQ ID NO: 149813 - DNA, 627 bp, synthetic construct
  misc_feature 1..627: note = Description of Artificial Sequence: Synthetic coding sequence
  source 1..627: mol_type = other DNA
atgcactaccccacagccctgctcttcctgatcctggccaacggggcccaggccttccgcatctgtgccttcaatgcccagaggctgaccctggccaaggtggcccgggagcaggtgatggacaccctggtgcgcatcctggcccgctgtgacatcatggtgctgcaggaggtggtggacagcagcggcagcgccatccccctgctgctgcgggagctgaacagatttgatggcagcggcccctacagcaccctgagcagcccccagctgggccgcagcacctacatggagacctacgtgtacttctaccgcagccacaagacccaggtgctgagcagctatgtgtacaatgatgaagatgatgtgtttgcccgggagccctttgtggcccagttcagcctgcccagcaatgtgctgcccagcctggtgctggtgcccctgcacaccacccccaaggctgtggagaaggagctgaatgccctgtatgatgtgttcctggaggtgtcccagcactggcagagcaaggatgtgatcctgctgggggacttcaatgctgactgtgccagcctgaccaagaagaggctggacaagctggagctgaggacagagcccggcttccactggtag

SEQ ID NO: 149814 - DNA, 918 bp, synthetic construct
  misc_feature 1..918: note = Description of Artificial Sequence: Synthetic coding sequence
  source 1..918: mol_type = other DNA
atgagccgggagctggcccccctgctgctgctgctgctgagcatccacagcgccctggccatgaggatctgcagcttcaacgtgcgcagctttggagagagcaagcaggaggacaagaatgccatggatgtgattgtgaaggtgatcaagagatgtgacatcatcctggtgatggagatcaaggacagcaacaaccgcatctgccccatcctgatggagaagctgaacagaaacagccggcggggcatcacctacaactacgtgatcagcagccggctgggcaggaacacctacaaggagcagtatgccttcctgtacaaggagaagctggtgtctgtgaagaggagctaccactaccatgactaccaggatggagatgctgatgtgttcagccgggagccctttgtggtgtggttccagagcccccacacagctgtgaaggactttgtgatcatccccctgcacaccaccccagagacctctgtgaaggagattgatgagctggtggaggtgtacacagatgtgaagcaccgctggaaggccgagaacttcatcttcatgggagacttcaatgccggctgcagctatgtgcccaagaaggcctggaagaacatccggctgaggacagaccccaggtttgtgtggctgattggagaccaggaggacaccaccgtgaagaagagcaccaactgtgcctatgaccgcatcgtgctgcggggccaggagatcgtgtcctctgtggtgcccaagagcaacagcgtgtttgacttccagaaggcctacaagctgacagaggaggaggccctggatgtgtctgaccacttccctgtggagttcaagctgcagagcagccgggccttcaccaacagcaagaagtctgtgaccctgaggaagaagaccaagagcaagaggagctag

SEQ ID NO: 149815 - DNA, 918 bp, synthetic construct; identical to SEQ ID NO: 149814
  misc_feature 1..918: note = Description of Artificial Sequence: Synthetic coding sequence
  source 1..918: mol_type = other DNA

SEQ ID NO: 149816 - DNA, 867 bp, synthetic construct
  misc_feature 1..867: note = Description of Artificial Sequence: Synthetic coding sequence
  source 1..867: mol_type = other DNA
atgagccgggagctggcccccctgctgctgctgctgctgagcatccacagcgccctggccatgaggatctgcagcttcaacgtgcgcagctttggagagagcaagcaggaggacaagaatgccatggatgtgattgtgaaggtgatcaagagatgtgacatcatcctggtgatggagatcaaggacagcaacaaccgcatctgccccatcctgatggagaagctgaacagaaacagccggcggggcatcacctacaactacgtgatcagcagccggctgggcaggaacacctacaaggagcagtatgccttcctgtacaaggagaagctggtgtctgtgaagaggagctaccactaccatgactaccaggatggagatgctgatgtgttcagccgggagccctttgtggtgtggttccagagcccccacacagctgtgaaggactttgtgatcatccccctgcacaccaccccagagacctctgtgaaggagattgatgagctggtggaggtgtacacagatgtgaagcaccgctggaaggccgagaacttcatcttcatgggagacttcaatgccggctgcagctatgtgcccaagaaggcctggaagaacatccggctgaggacagaccccaggtttgtgtggctgattggagaccaggaggacaccaccgtgaagaagagcaccaactgtgcctatgaccgcatcgtgctgcggggccaggagatcgtgtcctctgtggtgcccaagagcaacagcgtgtttgacttccagaaggcctacaagctgacagaggaggaggtgcggctgcccagctgcctgtccatgcccctgtcctggaaggatgagctggcctgggccacctag

SEQ ID NO: 149817 - DNA, 303 bp, synthetic construct
  misc_feature 1..303: note = Description of Artificial Sequence: Synthetic coding sequence
  source 1..303: mol_type = other DNA
atgagccgggagctggcccccctgctgctgctgctgctgagcatccacagcgccctggccatgaggatctgcagcttcaacgtgcgcagctttggagagagcaagcaggaggacaagaatgccatggatgtgattgtgaaggtgatcaagagatgtgacatcatcctggtgatggagatcaaggacagcaacaaccgcatctgccccatcctgatggagaagctgaacagaaacagccggcggggcatcacctacaactacgtgatcagcagccggctgggcaggaacacctacaaggagtag

SEQ ID NO: 149818 - DNA, 828 bp, synthetic construct
  misc_feature 1..828: note = Description of Artificial Sequence: Synthetic coding sequence
  source 1..828: mol_type = other DNA
atgagccgggagctggcccccctgctgctgctgctgctgagcatccacagcgccctggccatgaggatctgcagcttcaacgtgcgcagctttggagagagcaagcaggaggacaagaatgccatggatgtgattgtgaaggtgatcaagagatgtgacatcatcctggtgatggagatcaaggacagcaacaaccgcatctgccccatcctgatggagaagctgaaccgggagaagctggtgtctgtgaagaggagctaccactaccatgactaccaggatggagatgctgatgtgttcagccgggagccctttgtggtgtggttccagagcccccacacagctgtgaaggactttgtgatcatccccctgcacaccaccccagagacctctgtgaaggagattgatgagctggtggaggtgtacacagatgtgaagcaccgctggaaggccgagaacttcatcttcatgggagacttcaatgccggctgcagctatgtgcccaagaaggcctggaagaacatccggctgaggacagaccccaggtttgtgtggctgattggagaccaggaggacaccaccgtgaagaagagcaccaactgtgcctatgaccgcatcgtgctgcggggccaggagatcgtgtcctctgtggtgcccaagagcaacagcgtgtttgacttccagaaggcctacaagctgacagaggaggaggccctggatgtgtctgaccacttccctgtggagttcaagctgcagagcagccgggccttcaccaacagcaagaagtctgtgaccctgaggaagaagaccaagagcaagaggagctag

SEQ ID NO: 149819 - DNA, 753 bp, synthetic construct
  misc_feature 1..753: note = Description of Artificial Sequence: Synthetic coding sequence
  source 1..753: mol_type = other DNA
atgacccccctgtgccccaggcctgccctgtgctaccacttcctgaccagcctgctgcggagcgccatgcagaatgccaggacagctgagggccgcagccggggcaccctgcgggcccggcctgcccccaggcctgctgcccagcacggcatcccccggcccctgagcagcgctggccgcctgagccagggctgccgcggggccagcacagtgggcgccgccggctggaagggggagctgcccaaggccggcggcagccctgcccctggccctgagaccccagccatcagccccagcaagagggcccggcctgctgaggtgggcggcatgcagctgcgctttgcccggctgtctgagcacgccacagcccccacccggggcagcgcccgggccgccggctatgacctgtacagcgcctatgactacaccatcccccccatggagaaggctgtggtgaagacagacatccagatcgccctgcccagcggctgctacggccgggtggcccccaggagcggcctggccgccaagcacttcattgatgtgggcgctggggtgattgatgaggactacagaggaaatgtgggcgtggtgctcttcaactttgggaaggagaagtttgaggtgaagaagggggacagaattgcccagctgatctgtgagcgcatcttctacccagaaattgaggaggtgcaggccctggatgacacagagcggggcagcggcggcttcggcagcacaggcaagaactag

SEQ ID NO: 149820 - DNA, 759 bp, synthetic construct
  misc_feature 1..759: note = Description of Artificial Sequence: Synthetic coding sequence
  source 1..759: mol_type = other DNA
atgacccccctgtgccccaggcctgccctgtgctaccacttcctgaccagcctgctgcggagcgccatgcagaatgcccggggggcccggcagagagctgaggccgctgtgctgagcggccctggcccccccctgggccgggccgcccagcacggcatcccccggcccctgagcagcgctggccgcctgagccagggctgccgcggggccagcacagtgggcgccgccggctggaagggggagctgcccaaggccggcggcagccctgcccctggccctgagaccccagccatcagccccagcaagagggcccggcctgctgaggtgggcggcatgcagctgcgctttgcccggctgtctgagcacgccacagcccccacccggggcagcgcccgggccgccggctatgacctgtacagcgcctatgactacaccatcccccccatggagaaggctgtggtgaagacagacatccagatcgccctgcccagcggctgctacggccgggtggcccccaggagcggcctggccgccaagcacttcattgatgtgggcgctggggtgattgatgaggactacagaggaaatgtgggcgtggtgctcttcaactttgggaaggagaagtttgaggtgaagaagggggacagaattgcccagctgatctgtgagcgcatcttctacccagaaattgaggaggtgcaggccctggatgacacagagcggggcagcggcggcttcggcagcacaggcaagaactag

SEQ ID NO: 149821 - DNA, 495 bp, synthetic construct
  misc_feature 1..495: note = Description of Artificial Sequence: Synthetic coding sequence
  source 1..495: mol_type = other DNA
atgccctgcagcgaggagaccccagccatcagccccagcaagagggcccggcctgctgaggtgggcggcatgcagctgcgctttgcccggctgtctgagcacgccacagcccccacccggggcagcgcccgggccgccggctatgacctgtacagcgcctatgactacaccatcccccccatggagaaggctgtggtgaagacagacatccagatcgccctgcccagcggctgctacggccgggtggcccccaggagcggcctggccgccaagcacttcattgatgtgggcgctggggtgattgatgaggactacagaggaaatgtgggcgtggtgctcttcaactttgggaaggagaagtttgaggtgaagaagggggacagaattgcccagctgatctgtgagcgcatcttctacccagaaattgaggaggtgcaggccctggatgacacagagcggggcagcggcggcttcggcagcacaggcaagaactag

SEQ ID NO: 149822 - DNA, 426 bp, synthetic construct
  misc_feature 1..426: note = Description of Artificial Sequence: Synthetic coding sequence
  source 1..426: mol_type = other DNA
atgcagctgcgctttgcccggctgtctgaacatgccacagcccccacccggggcagcgcccgggctgctggctatgacctgtacagcgcctatgactacaccatcccccccatggagaaggctgtggtgaagacagacatccagatcgccctgcccagcggctgctacggccgggtggcccccaggagcggcctggccgccaagcacttcattgatgtgggcgctggggtgattgatgaggactacagaggaaatgtgggcgtggtgctcttcaactttgggaaggagaagtttgaggtgaagaagggggaccgcatcgcccagctgatctgtgagcgcatcttctacccagaaattgaggaggtgcaggccctggatgacacagagcggggcagcggcggcttcggcagcacaggcaagaactag

SEQ ID NO: 149823 - DNA, 1056 bp, synthetic construct
  misc_feature 1..1056: note = Description of Artificial Sequence: Synthetic coding sequence
  source 1..1056: mol_type = other DNA
atgcccctgaggaagcaccggcagcacttcaagaagtatggcaactgcttcaccgctggggaggccgtggactggctgtatgacctgctgaggaacaacagcaactttggacctgaggtgacccggcagcagaccatccagctgctgaggaagttcctgaagaaccacgtgattgaggacatcaagggccgctggggctctgaaaatgtggatgacaacaaccagctgttccgcttccctgccaccagccccctgaagaccctgcccaggaggacccccaagagacatggcctgcacctgagccaggagaatggagagaagatcaagcatgagatcatcaatgaagaccaggagaatgccatcgacaaccgggagctgagccaggaggatgtggaggaggtgtggaggtatgtgatcctgatctacctgcagaccatcctgggcgtgcccagcctggaggaggtgatcaaccccaagcaggtgatcccccagtacatcatgtacaacatggccaacaccagcaagaggggcgtggtgatcctgcagaacaagagtgatgacctgccccactgggtgctgagcgccatgaagtgcctggccaactggcccaggagcaatgacatgaacaaccccacctacgtgggctttgaaagagatgtgttccgcaccatcgctgactacttcctggacctgcctgagcccctgctgacctttgagtactatgagctgtttgtgaacatcctgggcaacttcaaggacttccgcagcagcatccctgtggtgtgtggctacatcaccgtgtctgacaggagcagcggcatccacaagatccaggatgacccccagagcagcaagttcctgcacctgaacaacctgaacagcttcaagagcacagaatgtctgctgctgagcctgctgcaccgggagaagaacaaggaggagagtgacagcacagagcggctgcagatcagcaaccctggcttccaggagcgctgtgccaagaagatgcagctggtgaacctgaggaacagaagagcctgctgcaacctgatctag

SEQ ID NO: 149824 - DNA, 1584 bp, synthetic construct
  misc_feature 1..1584: note = Description of Artificial Sequence: Synthetic coding sequence
  source 1..1584: mol_type = other DNA
atggagagccagggcgtgcccccaggcccctaccgggccaccaagctgtggaatgaggtgaccaccagcttccgggccggcatgcccctgaggaagcaccggcagcacttcaagaagtatggcaactgcttcaccgctggggaggccgtggactggctgtatgacctgctgaggaacaacagcaactttggacctgaggtgacccggcagcagaccatccagctgctgaggaagttcctgaagaaccacgtgattgaggacatcaagggccgctggggctctgaaaatgtggatgacaacaaccagctgttccgcttccctgccaccagccccctgaagaccctgccccggcgctacccagagctgaggaagaacaacatcgagaacttcagcaaggacaaggacagcatcttcaagctgaggaacctgagcaggaggacccccaagagacatggcctgcacctgagccaggagaatggagagaagatcaagcatgagatcatcaatgaagaccaggagaatgccatcgacaaccgggagctgagccaggaggatgtggaggaggtgtggaggtatgtgatcctgatctacctgcagaccatcctgggcgtgcccagcctggaggaggtgatcaaccccaagcaggtgatcccccagtacatcatgtacaacatggccaacaccagcaagaggggcgtggtgatcctgcagaacaagagtgatgacctgccccactgggtgctgagcgccatgaagtgcctggccaactggcccaggagcaatgacatgaacaaccccacctacgtgggctttgaaagagatgtgttccgcaccatcgctgactacttcctggacctgcctgagcccctgctgacctttgagtactatgagctgtttgtgaacatcctgggcctgctgcagccccacctggagcgggtggccattgatgccctgcagctgtgctgcctgctgctgcccccacccaacagaaggaagctgcagctgctgatgaggatgatcagcaggatgagccagaatgtggacatgcccaagctgcatgatgccatgggcaccaggagcctgatgatccacaccttcagccgctgtgtgctgtgctgtgccgaggaggtggacctggatgagctgctggccggccgcctggtgtccttcctgatggaccaccaccaggagatcctgcaggtgcccagctacctgcagacagctgtggagaagcacctggactacctgaagaagggccacatcgagaaccctggagatggcctgtttgcccccctgcccacctacagctactgcaagcagatcagcgcccaggagtttgatgagcagaaggtgtccaccagccaggccgccatcgccgagctgctggagaacatcatcaagaacagaagcctgcccctgaaggagaagaggaagaagctgaagcagttccagaaggagtaccccctcatctaccagaagcgcttccccaccacagagagcgaggccgccctgtttggagacaagcccaccatcaagcagcccatgctgatcctgaggaagcccaagttccgcagcctgaggtag

SEQ ID NO: 149825 - DNA, 2436 bp, synthetic construct
  misc_feature 1..2436: note = Description of Artificial Sequence: Synthetic coding sequence
  source 1..2436: mol_type = other DNA
atggagagccagggcgtgcccccaggcccctaccgggccaccaagctgtggaatgaggtgaccaccagcttccgggccggcatgcccctgaggaagcaccggcagcacttcaagaagtatggcaactgcttcaccgctggggaggccgtggactggctgtatgacctgctgaggaacaacagcaactttggacctgaggtgacccggcagcagaccatccagctgctgaggaagttcctgaagaaccacgtgattgaggacatcaagggccgctggggctctgaaaatgtggatgacaacaaccagctgttccgcttccctgccaccagccccctgaagaccctgccccggcgctacccagagctgaggaagaacaacatcgagaacttcagcaaggacaaggacagcatcttcaagctgaggaacctgagcaggaggacccccaagagacatggcctgcacctgagccaggagaatggagagaagatcaagcatgagatcatcaatgaagaccaggagaatgccatcgacaaccgggagctgagccaggaggatgtggaggaggtgtggaggtatgtgatcctgatctacctgcagaccatcctgggcgtgcccagcctggaggaggtgatcaaccccaagcaggtgatcccccagtacatcatgtacaacatggccaacaccagcaagaggggcgtggtgatcctgcagaacaagagtgatgacctgccccactgggtgctgagcgccatgaagtgcctggccaactggcccaggagcaatgacatgaacaaccccacctacgtgggctttgaaagagatgtgttccgcaccatcgctgactacttcctggacctgcctgagcccctgctgacctttgagtactatgagctgtttgtgaacatcctggtggtgtgtggctacatcaccgtgtctgacaggagcagcggcatccacaagatccaggatgacccccagagcagcaagttcctgcacctgaacaacctgaacagcttcaagagcacagaatgtctgctgctgagcctgctgcaccgggagaagaacaaggaggagagtgacagcacagagcggctgcagatcagcaaccctggcttccaggagcgctgtgccaagaagatgcagctggtgaacctgaggaacagaagagtgtctgccaatgacatcatgggcggcagctgccacaacctgattggcctgagcaacatgcatgacctgagcagcaacagcaagccccgctgctgcagcctggagggcatcgtggatgtgcccggcaacagcagcaaggaggccagctctgtgttccaccagagcttccccaacatcgagggccagaacaacaagctgttcctggagagcaagcccaagcaggagttcctgctgaacctgcacagcgaggagaacatccagaagcccttctctgctggcttcaagaggaccagcaccctgactgtgcaggaccaggaggagctgtgcaatggcaagtgcaagagcaagcagctgtgccgcagccagagcctgctgctgcggagcagcaccaggagaaattcctacatcaacacccctgtggccgagatcatcatgaagcccaacgtgggccagggcagcacctctgtgcagacagccatggagagcgagctgggggagagcagcgccaccatcaacaagaggctgtgcaagagcaccatcgagctgtctgagaacagcctgctgcctgccagctccatgctgaccggcacccagagcctgctgcagccccacctggagcgggtggccattgatgccctgcagctgtgctgcctgctgctgcccccacccaacagaaggaagctgcagctgctgatgaggatgatcagcaggatgagccagaatgtggacatgcccaagctgcatgatgccatgggcaccaggagcctgatgatccacaccttcagccgctgtgtgctgtgctgtgccgaggaggtggacctggatgagctgctggccggccgcctggtgtccttcctgatggaccaccaccaggagatcctgcaggtgcccagctacctgcagacagctgtggagaagcacctggactacctgaagaagggccacatcgagaaccctggagatggcctgtttgcccccctgcccacctacagctactgcaagcagatcagcgcccaggagtttgatgagcagaaggtgtccaccagccaggccgccatcgccgagctgctggagaacatcatcaagaacagaagcctgcccctgaaggagaagaggaagaagctgaagcagttccagaaggagtaccccctcatctaccagaagcgcttccccaccacagagagcgaggccgccctgtttggagacaagcccaccatcaagcagcccatgctgatcctgaggaagcccaagttccgcagcctgaggtag

SEQ ID NO: 149826 - DNA, 1590 bp, synthetic construct
  misc_feature 1..1590: note = Description of Artificial Sequence: Synthetic coding sequence
  source 1..1590: mol_type = other DNA
atggagcacagaattgtgggccctggcccctaccgggccacccggctgtggaatgagaccgtggagctgttccgggccaagatgcccctgaggaagcaccgctgccgcttcaagagctatgagcactgcttcaccgctgctgaggccgtggactggctgcacgagctgctgcgctgcagccagaactttggacctgaggtgaccaggaagcagacagtgcagctgctgaagaagttcctgaagaaccacgtgattgaggacatcaagggcaagtggggcgaggaggactttgaggacaacagacacctgtaccgcttcccccccagcagccccctgaagccctaccccaagaagccacccaaccagaaggatgtgatcaagtttcctgagtggaatgacctgcccccaggcaccagccaggagaacatccctgtgcggcctgtggtgatgaacagcgagatgtggtacaagaggcacagcatcgccatcggggaggtgcctgcctgccgcctggtgcaccggcggcagctgacagaggccaacgtggaggagatctggaagtccatgaccctgagctacctgcagaagatcctgggcctggacagcctggaggaggtgctggatgtgaagctggtgaacagcaagttcatcatccacaacgtgtacagcgtgtccaagcagggcgtggtgatcctggatgacaagagcaaggagctgccccactgggtgctgagcgccatgaagtgcctggccaactggcccaactgcagcgacctgaagcagcccatgtacctgggctttgagaaggatgtgttcaagaccatcgctgactactacggccacctgaaggagcccctgctgaccttccacctgtttgatgcctttgtgtctgtgctgggcctgctgcagaaggagaaggtggccgtggaggccttccagatctgctgcctgctgctgcccccagagaacagaaggaagctgcagctgctgatgaggatgatggcccgcatctgcctgaacaaggagatgccacccctgtgtgatggcttcggcaccaggaccctgatggtgcagaccttcagccgctgcatcctgtgcagcaaggatgaggtggacctggatgagctgctggccgcccggctggtgaccttcctgatggacaactaccaggagatcctgaaggtgcccctggccctgcagaccagcattgaggagcgggtggcccacctgcggcgggtgcagatcaagtacccaggagctgacatggacatcaccctgagcgcccccagcttctgccggcagatcagccctgaggagtttgagtaccagaggagctatggcagccaggagcccctggccgccctgctggaggaggtgatcacagatgccaagctgagcaacaaggagaagaagaagaagctgaagcagttccagaagagctacccagaggtgtaccaggagcgcttccccaccccagagagcgctgccctgctcttccctgagaagcccaagcccaagccccagctgctgatgtgggccctgaagaagcccttccagcccttccagaggaccaggagcttcaggatgtag

SEQ ID NO: 149827 - DNA, 1404 bp, synthetic construct
  misc_feature 1..1404: note = Description of Artificial Sequence: Synthetic coding sequence
  source 1..1404: mol_type = other DNA
atggagcacagaattgtgggccctggcccctaccgggccacccggctgtggaatgagaccgtggagctgttccgggccaagatgcccctgaggaagcaccgctgccgcttcaagagctatgagcactgcttcaccgctgctgaggccgtggactggctgcacgagctgctgcgctgcagccagaactttggacctgaggtgaccaggaagcagacagtgcagctgctgaagaagttcctgaagaaccacgtgattgaggacatcaagggcaagtggggcgaggaggactttgaggacaacagacacctgtaccgcttcccccccagcagccccctgaagccctaccccaagaagccacccaaccagaaggatgtgatcaagtttcctgagtggaatgacctgcccccaggcaccagccaggagaacatccctgtgcggcctgtggtgatgaacagcgagatgtggtacaagaggcacagcatcgccatcggggaggtgcctgcctgccgcctggtgcaccggcggcagctgacagaggccaacgtggaggagatctggaagtccatgaccctgagctacctgcagaagatcctgggcctggacagcctggaggaggtgctggatgtgaagctggtgaacagcaagttcatcatccacaacgtgtacagcgtgtccaagcagggcgtggtgatcctggatgacaagagcaaggagctgccccactgggtgctgagcgccatgaagtgcctggccaactggcccaactgcagcgacctgaagcagcccatgtacctgggctttgagaaggatgtgttcaagaccatcgctgactactacggccacctgaaggagcccctgctgaccttccacctgtttgatgcctttgtgtctgtgctgggcctgctgcagaaggagaaggtggccgtggaggccttccagatctgctgcctgctgctgcccccagagaacagaaggaagctgcagctgctgatgaggatgatggcccgcatctgcctgaacaaggagatgccacccctgtgtgatggcttcggcaccaggaccctgatggtgcagaccttcagccgctgcatcctgtgcagcaaggatgaggtggacctggatgagctgctggccgcccggctggtgaccttcctgatggacaactaccaggagatcctgaaggtgcccctggccctgcagaccagcattgaggagcgggtggcccacctgcggcgggtgcagttccagaagagctacccagaggtgtaccaggagcgcttccccaccccagagagcgctgccctgctcttccctgagaagcccaagcccaagccccagctgctgatgtgggccctgaagaagcccttccagcccttccagaggaccaggagcttcaggatgtag

SEQ ID NO: 149828 - DNA, 1323 bp, synthetic construct
  misc_feature 1..1323: note = Description of Artificial Sequence: Synthetic coding sequence
  source 1..1323: mol_type = other DNA
atgcccctgaggaagcaccgctgccgcttcaagagctatgagcactgcttcaccgctgctgaggccgtggactggctgcacgagctgctgcgctgcagccagaactttggacctgaggtgaccaggaagcagacagtgcagctgctgaagaagttcctgaagaaccacgtgattgaggacatcaagggcaagtggggcgaggaggactttgaggacaacagacacctgtaccgcttcccccccagcagccccctgaagccctaccccaagaagccacccaaccagaaggatgtgatcaagtttcctgagtggaatgacctgcccccaggcaccagccaggagaacatccctgtgcggcctgtggtgatgaacagcgagatgtggtacaagaggcacagcatcgccatcggggaggtgcctgcctgccgcctggtgcaccggcggcagctgacagaggccaacgtggaggagatctggaagtccatgaccctgagctacctgcagaagatcctgggcctggacagcctggaggaggtgctggatgtgaagctggtgaacagcaagttcatcatccacaacgtgtacagcgtgtccaagcagggcgtggtgatcctggatgacaagagcaaggagctgccccactgggtgctgagcgccatgaagtgcctggccaactggcccaactgcagcgacctgaagcagcccatgtacctgggctttgagaaggatgtgttcaagaccatcgctgactactacggccacctgaaggagcccctgctgaccttccacctgtttgatgcctttgtgtctgtgctgggcctgctgcagaaggagaaggtggccgtggaggccttccagatctgctgcctgctgctgcccccagaaaatagaaggaagctgcagctgctgatgaggatgatggcccgcatctgcctgaacaaggagatgccacccctgtgtgatggcttcggcaccaggaccctgatggtgcagaccttcagccgctgcatcctgtgcagcaaggatgaggtggacctggatgagctgctggccgcccggctggtgaccttcctgatggacaactaccaggagatcctgaaggtgcccctggccctgcagaccagcattgaggagcgggtggcccacctgcggcgggtgcagttccagaagagctacccagaggtgtaccaggagcgcttccccaccccagagagcgctgccctgctcttccctgagaagcccaagcccaagccccagctgctgatgtgggccctgaagaagcccttccagcccttccagaggaccaggagcttcaggatgtag

SEQ ID NO: 149829 - DNA, 4746 bp, synthetic construct
  misc_feature 1..4746: note = Description of Artificial Sequence: Synthetic coding sequence
  source 1..4746: mol_type = other DNA
atgaggaccaccaaggtgtacaagctggtgatccacaagaagggctttggaggcagtgatgatgagctggtggtgaaccccaaggtgttcccccacatcaagctgggggacatcgtggagatcgcccaccccaatgatgagtacagccccctgctgctgcaggtgaagagcctgaaggaggacctgcagaaggagaccatctctgtggaccagacagtgacccaggtgttccggctgcggccctaccaggatgtgtatgtgaatgtggtggaccccaaggatgtgaccctggacctggtggagctgaccttcaaggaccagtacatcggccgcggggacatgtggaggctgaagaagagcctggtgtccacctgtgcctacatcacccagaaggtggagtttgctggcatccgggcccaggccggggagctgtgggtgaagaatgagaaggtgatgtgtggctacatcagcgaggacaccagggtggtgttccgcagcaccagcgccatggtgtacatcttcatccagatgagctgtgagatgtgggactttgacatctatggagacctgtactttgagaaggctgtgaatggcttcctggccgacctcttcaccaagtggaaggagaagaactgcagccatgaggtgacagtggtgctcttcagcaggaccttctatgatgccaagtctgtggatgagttccctgagatcaacagagccagcatccggcaggaccacaagggccgcttctatgaggacttctacaaggtggtggtgcagaatgaaagaagagaggagtggaccagcctgctggtgaccatcaagaagctgttcatccagtaccctgtgctggtgcggctggagcaggccgagggcttcccccagggcgacaacagcaccagcgcccagggcaactacctggaggccatcaacctgtccttcaacgtgtttgacaagcactacatcaacagaaactttgacagaacaggccagatgtctgtggtgatcaccccaggagtgggcgtgtttgaggtggaccggctgctgatgatcctgaccaagcagaggatgattgacaatggcatcggcgtggacctggtgtgcatgggagagcagcccctgcatgctgtgcccctcttcaagctgcacaacagaagtgccccccgggacagccggctgggagatgactacaacatcccccactggatcaaccacagcttctacaccagcaagagccagctgttctgcaacagcttcaccccccgcatcaagctggccggcaagaagccagccagcgagaaggccaagaatggccgggacaccagcctgggcagccccaaggagagtgaaaatgccctgcccatccaggtggactatgatgcctatgatgcccaggtgttccggctgcccggccccagccgggcccagtgcctgaccacctgccgctctgtgcgggagcgggagagccacagcaggaagagcgccagcagctgtgatgtgagcagcagccccagcctgcccagcaggaccctgcccacagaggaggtgcgcagccaggccagtgatgacagcagcctgggcaagagcgccaacatcctgatgatcccccacccccacctgcaccagtatgaggtgagcagcagcctgggctacaccagcaccagagatgtgctggagaacatgatggagcccccccagagggacagcagcgcccctggccgcttccacgtgggcagcgctgagagcatgctgcacgtgcggcctgggggctacaccccccagagggccctgatcaacccctttgcccccagcaggatgcccatgaagctgaccagcaacagaagacgctggatgcacaccttccctgtgggccccagcggggaggccatccagatccaccaccagacccggcagaacatggccgagctgcagggcagcggccagagggaccccacccacagcagcgctgagctgctggagctggcctaccacgaggccgccggccgccacagcaacagccggcagcctggagatggcatgtccttcctgaacttcagcggcacagaggagctgtctgtgggcctgctgagcaacagcggggccggcatgaaccccaggacccagaacaaggacagcctggaggacagcgtgtccaccagcccagaccccatcctgaccctgagcgcccctcctgtggtgcccggcttctgctgcaccgtgggcgtggactggaagagcctgaccaccccagcctgcctgcccctgaccacagactacttcccagaccggcagggcctgcagaatgactacacagagggctgctatgacctgctgcctgaggccgacatcgacagaagagatgaagatggagtgcagatgacagcccagcaggtgtttgaggagttcatctgccagaggctgatgcagggctaccagatcatcgtgcagcccaagacccagaagcccaacccagctgtgcccccacccctgagcagcagccccctgtacagccggggcctggtgtccaggaacagacctgaggaggaggaccagtactggctgtccatgggccgcaccttccacaaggtgaccctgaaggacaagatgatcaccgtgacccgctacctgcccaagtacccctatgaaagtgcccagatccactacacctacagcctgtgccccagccacagcgacagcgagtttgtgtcctgctgggtggagttcagccatgagcggctggaggagtacaagtggaactacctggaccagtacatctgcagcgctggcagcgaggacttcagcctcatcgagagcctgaagttctggaggacccgcttcctgctgctgcctgcctgtgtgacagccaccaagaggatcacagaaggagaggcccactgtgacatctatggagaccggcccagggcagatgaagatgagtggcagctgctggatggctttgtgcgctttgtggagggcctgaaccgcatcagaagaagacacagaagtgacaggatgatgaggaagggcacagccatgaagggcctgcagatgacaggccccatcagcacccacagcctggagagcacagcccctcctgtgggcaagaagggcaccagcgccctgagcgccctgctggagatggaggccagccagaagtgcctgggggagcagcaggccgctgtgcacggcggcaagagcagcgcccagagcgctgagagcagctctgtggccatgacccccacctacatggacagccccaggaaggtgtctgtggaccagacagccacccccatgctggatggcaccagcctgggcatctgcaccggccagagcatggaccggggcaacagccagaccttcggcaacagccagaacatcggggagcagggctacagcagcaccaacagcagtgacagcagcagccagcagctggtggccagcagcctgaccagcagcagcaccctgacagagatcctggaggccatgaagcaccccagcactggagtgcagctgctgtctgagcagaagggcctgagcccctactgcttcatctctgctgaggtggtgcactggctggtgaaccacgtggagggcatccagacccaggccatggccatcgacatcatgcagaagatgctggaggagcagctgatcacccacgccagcggggaggcctggaggaccttcatctacggcttctacttctacaagatcgtgacagacaaggagccagacagagtggccatgcagcagcctgccaccacctggcacacagctggggtggatgactttgccagcttccagaggaagtggtttgaggtggcctttgtggccgaggagctggtgcacagcgagatcccagccttcctgctgccctggctgcccagcaggcctgccagctatgccagccgccacagcagcttcagccgcagctttggaggccgcagccaggccgccgccctgctggccgccaccgtgcctgagcagaggacagtgaccctggatgtggatgtgaacaacagaacagaccggctggagtggtgcagctgctactaccacggcaacttcagcctgaatgctgcctttgagatcaagctgcactggatggctgtgacagctgctgtgctgtttgagatggtgcagggctggcacaggaaggccaccagctgtggcttcctgctggtgcctgtgctggagggcccctttgccctgcccagctacctgtatggagaccccctgcgggcccagctgttcatccccctgaacatcagctgcctgctgaaggagggcagcgagcacctgtttgacagctttgagcctgagacctactgggacaggatgcacctgttccaggaggccatcgcccaccgcttcggctttgtgcaggacaagtacagcgccagcgccttcaacttccctgctgagaacaagccccagtacatccacgtgacaggcaccgtcttcctgcagctgccctacagcaagaggaagttcagcggccagcagaggagaagaagaaacagcaccagcagcaccaaccagaacatgttctgtgaggagcgggtgggctacaactgggcctacaacaccatgctgaccaagacctggaggagcagcgccactggagatgagaagtttgctgaccggctgctgaaggacttcacagacttctgcatcaacagagacaaccggctggtgaccttctggaccagctgcctggagaagatgcacgccagcgccccctag

SEQ ID NO: 149830 - DNA, 3690 bp, synthetic construct
  misc_feature 1..3690: note = Description of Artificial Sequence: Synthetic coding sequence
  source 1..3690: mol_type = other DNA
atgaggaccaccaaggtgtacaagctggtgatccacaagaagggctttggaggcagtgatgatgagctggtggtgaaccccaaggtgttcccccacatcaagctgggggacatcgtggagatcgcccaccccaatgatgagtacagccccctgctgctgcaggtgaagagcctgaaggaggacctgcagaaggagaccatctctgtggaccagacagtgacccaggtgttccggctgcggccctaccaggatgtgtatgtgaatgtggtggaccccaaggatgtgaccctggacctggtggagctgaccttcaaggaccagtacatcggccgcggggacatgtggaggctgaagaagagcctggtgtccacctgtgcctacatcacccagaaggtggagtttgctggcatccgggcccaggccggggagctgtgggtgaagaatgagaaggtgatgtgtggctacatcagcgaggacaccagggtggtgttccgcagcaccagcgccatggtgtacatcttcatccagatgagctgtgagatgtgggactttgacatctatggagacctgtactttgagaaggctgtgaatggcttcctggccgacctcttcaccaagtggaaggagaagaactgcagccatgaggtgacagtggtgctcttcagcaggaccttctatgatgccaagtctgtggatgagttccctgagatcaacagagccagcatccggcaggaccacaagggccgcttctatgaggacttctacaaggtggtggtgcagaatgaaagaagagaggagtggaccagcctgctggtgaccatcaagaagctgttcatccagtaccctgtgctggtgcggctggagcaggccgagggcttcccccagggcgacaacagcaccagcgcccagggcaactacctggaggccatcaacctgtccttcaacgtgtttgacaagcactacatcaacagaaactttgacagaacaggccagatgtctgtggtgatcaccccaggagtgggcgtgtttgaggtggaccggctgctgatgatcctgaccaagcagaggatgattgacaatggcatcggcgtggacctggtgtgcatgggagagcagcccctgcatgctgtgcccctcttcaagctgcacaacagaagtgccccccgggacagccggctgggagatgactacaacatcccccactggatcaaccacagcttctacaccagcaagagccagctgttctgcaacagcttcaccccccgcatcaagctggccggcaagaagccagccagcgagaaggccaagaatggccgggacaccagcctgggcagccccaaggagagtgaaaatgccctgcccatccaggtggactatgatgcctatgatgcccaggtgttccggctgcccggccccagccgggcccagtgcctgaccacctgccgctctgtgcgggagcgggagagccacagcaggaagagcgccagcagctgtgatgtgagcagcagccccagcctgcccagcaggaccctgcccacagaggaggtgcgcagccaggccagtgatgacagcagcctgggcaagagcgccaacatcctgatgatcccccacccccacctgcaccagtatgaggtgagcagcagcctgggctacaccagcaccagagatgtgctggagaacatgatggagcccccccagagggacagcagcgcccctggccgcttccacgtgggcagcgctgagagcatgctgcacgtgcggcctgggggctacaccccccagagggccctgatcaacccctttgcccccagcaggatgcccatgaagctgaccagcaacagaagacgctggatgcacaccttccctgtgggcatgaaccccaggacccagaacaaggacagcctggaggacagcgtgtccaccagcccagaccccatcctgaccctgagcgcccctcctgtggtgcccggcttctgctgcaccgtgggcgtggactggaagagcctgaccaccccagcctgcctgcccctgaccacagactacttcccagaccggcagggcctgcagaatgactacacagagggctgctatgacctgctgcctgaggccgacatcgacagaagagatgaagatggagtgcagatgacagcccagcaggtgtttgaggagttcatctgccagaggctgatgcagggctaccagatcatcgtgcagcccaagacccagaagcccaacccagctgtgcccccacccctgagcagcagccccctgtacagccggggcctggtgtccaggaacagacctgaggaggaggaccagtactggctgtccatgggccgcaccttccacaaggtgaccctgaaggacaagatgatcaccgtgacccgctacctgcccaagtacccctatgaaagtgcccagatccactacacctacagcctgtgccccagccacagcgacagcgagtttgtgtcctgctgggtggagttcagccatgagcggctggaggagtacaagtggaactacctggaccagtacatctgcagcgctggcagcgaggacttcagcctcatcgagagcctgaagttctggaggacccgcttcctgctgctgcctgcctgtgtgacagccaccaagaggatcacagaaggagaggcccactgtgacatctatggagaccggcccagggcagatgaagatgagtggcagctgctggatggctttgtgcgctttgtggagggcctgaaccgcatcagaagaagacacagaagtgacaggatgatgaggaagggcacagccatgaagggcctgcagatgacaggccccatcagcacccacagcctggagagcacagcccctcctgtgggcaagaagggcaccagcgccctgagcgccctgctggagatggaggccagccagaagtgcctgggggagcagcaggccgctgtgcacggcggcaagagcagcgcccagagcgctgagagcagctctgtggccatgacccccacctacatggacagccccaggaaggatggagccttcttcatggagtttgtgcgcagccccaggacagccagcagcgccttctacccccaggtgtctgtggaccagacagccacccccatgctggatggcaccagcctgggcatctgcaccggccagagcatggaccggggcaacagccagaccttcggcaacagccagaacatcggggagcagggctacagcagcaccaacagcagtgacagcagcagccagcagctggtggccagcagcctgaccagcagcagcaccctgacagagatcctggaggccatgaagcaccccagcactggagtgcagctgctgtctgagcagaagggcctgagcccctactgcttcatctctgctgaggtggtgcactggctggtgaaccacgtggagggcatccagacccaggccatggccatcgacatcatgcagtggccctgcagcagccccccacctcctggcacccagcaggagtggaccaccagccctgccagcagcgccagcggcctgcgctggcccctgtggcagaagagcagctgcaccctgcgcttcctgcccttcagctgccccggctgcctggccggccagccccccatgcaggtgggcacagcccccctggccgaggtgctggaggatggagcccggcggcagcacttctag

SEQ ID NO: 149831 - DNA, 4512 bp, synthetic construct
  misc_feature 1..4512: note = Description of Artificial Sequence: Synthetic coding sequence
  source 1..4512: mol_type = other DNA
atgaggaccaccaaggtgtacaagctggtgatccacaagaagggctttggaggcagtgatgatgagctggtggtgaaccccaaggtgttcccccacatcaagctgggggacatcgtggagatcgcccaccccaatgatgagtacagccccctgctgctgcaggtgaagagcctgaaggaggacctgcagaaggagaccatctctgtggaccagacagtgacccaggtgttccggctgcggccctaccaggatgtgtatgtgaatgtggtggaccccaaggatgtgaccctggacctggtggagctgaccttcaaggaccagtacatcggccgcggggacatgtggaggctgaagaagagcctggtgtccacctgtgcctacatcacccagaaggtggagtttgctggcatccgggcccaggccggggagctgtgggtgaagaatgagaaggtgatgtgtggctacatcagcgaggacaccagggtggtgttccgcagcaccagcgccatggtgtacatcttcatccagatgagctgtgagatgtgggactttgacatctatggagacctgtactttgagaaggctgtgaatggcttcctggccgacctcttcaccaagtggaaggagaagaactgcagccatgaggtgacagtggtgctcttcagcaggaccttctatgatgccaagtctgtggatgagttccctgagatcaacagagccagcatccggcaggaccacaagggccgcttctatgaggacttctacaaggtggtggtgcagaatgaaagaagagaggagtggaccagcctgctggtgaccatcaagaagctgttcatccagtaccctgtgctggtgcggctggagcaggccgagggcttcccccagggcgacaacagcaccagcgcccagggcaactacctggaggccatcaacctgtccttcaacgtgtttgacaagcactacatcaacagaaactttgacagaacaggccagatgtctgtggtgatcaccccaggagtgggcgtgtttgaggtggaccggctgctgatgatcctgaccaagcagaggatgattgacaatggcatcggcgtggacctggtgtgcatgggagagcagcccctgcatgctgtgcccctcttcaagctgcacaacagaagtgccccccgggacagccggctgggagatgactacaacatcccccactggatcaaccacagcttctacaccagcaagagccagctgttctgcaacagcttcaccccccgcatcaagctggccggcaagaagccagccagcgagaaggccaagaatggccgggacaccagcctgggcagccccaaggagagtgaaaatgccctgcccatccaggtggactatgatgcctatgatgcccaggtgttccggctgcccggccccagccgggcccagtgcctgaccacctgccgctctgtgcgggagcgggagagccacagcaggaagagcgccagcagctgtgatgtgagcagcagccccagcctgcccagcaggaccctgcccacagaggaggtgcgcagccaggccagtgatgacagcagcctgggcaagagcgccaacatcctgatgatcccccacccccacctgcaccagtatgaggtgagcagcagcctgggctacaccagcaccagagatgtgctggagaacatgatggagcccccccagagggacagcagcgcccctggccgcttccacgtgggcagcgctgagagcatgctgcacgtgcggcctgggggctacaccccccagagggccctgatcaacccctttgcccccagcaggatgcccatgaagctgaccagcaacagaagacgctggatgcacaccttccctgtggagaccagctgcttctacctgagcatcggcatgaaccccaggacccagaacaaggacagcctggaggacagcgtgtccaccagcccagaccccatgcctggcttctgctgcaccgtgggcgtggactggaagagcctgaccaccccagcctgcctgcccctgaccacagactacttcccagaccggcagggcctgcagaatgactacacagagggctgctatgacctgctgcctgaggccgacatcgacagaagagatgaagatggagtgcagatgacagcccagcaggtgtttgaggagttcatctgccagaggctgatgcagggctaccagatcatcgtgcagcccaagacccagaagcccaacccagctgtgcccccacccctgagcagcagccccctgtacagccggggcctggtgtccaggaacagacctgaggaggaggaccagtactggctgtccatgggccgcaccttccacaaggtgaccctgaaggacaagatgatcaccgtgacccgctacctgcccaagtacccctatgaaagtgcccagatccactacacctacagcctgtgccccagccacagcgacagcgagtttgtgtcctgctgggtggagttcagccatgagcggctggaggagtacaagtggaactacctggaccagtacatctgcagcgctggcagcgaggacttcagcctcatcgagagcctgaagttctggaggacccgcttcctgctgctgcctgcctgtgtgacagccaccaagaggatcacagaaggagaggcccactgtgacatctatggagaccggcccagggcagatgaagatgagtggcagctgctggatggctttgtgcgctttgtggagggcctgaaccgcatcagaagaagacacagaagtgacaggatgatgaggaagggcacagccatgaagggcctgcagatgacaggccccatcagcacccacagcctggagagcacagcccctcctgtgggcaagaagggcaccagcgccctgagcgccctgctggagatggaggccagccagaagtgcctgggggagcagcaggccgctgtgcacggcggcaagagcagcgcccagagcgctgagagcagctctgtggccatgacccccacctacatggacagccccaggaaggtgtctgtggaccagacagccacccccatgctggatggcaccagcctgggcatctgcaccggccagagcatggaccggggcaacagccagaccttcggcaacagccagaacatcggggagcagggctacagcagcaccaacagcagtgacagcagcagccagcagctggtggccagcagcctgaccagcagcagcaccctgacagagatcctggaggccatgaagcaccccagcactggagtgcagctgctgtctgagcagaagggcctgagcccctactgcttcatctctgctgaggtggtgcactggctggtgaaccacgtggagggcatccagacccaggccatggccatcgacatcatgcagaagatgctggaggagcagctgatcacccacgccagcggggaggcctggaggaccttcatctacggcttctacttctacaagatcgtgacagacaaggagccagacagagtggccatgcagcagcctgccaccacctggcacacagctggggtggatgactttgccagcttccagaggaagtggtttgaggtggcctttgtggccgaggagctggtgcacagcgagatcccagccttcctgctgccctggctgcccagcaggcctgccagctatgccagccgccacagcagcttcagccgcagctttggaggccgcagccaggccgccgccctgctggccgccaccgtgcctgagcagaggacagtgaccctggatgtggatgtgaacaacagaacagaccggctggagtggtgcagctgctactaccacggcaacttcagcctgaatgctgcctttgagatcaagctgcactggatggctgtgacagctgctgtgctgtttgagatggtgcagggctggcacaggaaggccaccagctgtggcttcctgctggtgcctgtgctggagggcccctttgccctgcccagctacctgtatggagaccccctgcgggcccagctgttcatccccctgaacatcagctgcctgctgaaggagggcagcgagcacctgtttgacagctttgagcctgagacctactgggacaggatgcacctgttccaggaggccatcgcccaccgcttcggctttgtgcaggacaagtacagcgccagcgccttcaacttccctgctgagaacaagccccagtacatccacgtgacaggcaccgtcttcctgcagctgccctacagcaagaggaagttcagcggccagcagaggagaagaagaaacagcaccagcagcaccaaccagaacatgttctgtgaggagcgggtgggctacaactgggcctacaacaccatgctgaccaagacctggaggagcagcgccactggagatgagaagtttgctgaccggctgctgaaggacttcacagacttctgcatcaacagagacaaccggctggtgaccttctggaccagctgcctggagaagatgcacgccagcgccccctag

SEQ ID NO: 149832 - DNA, 1680 bp, synthetic construct
  misc_feature 1..1680: note = Description of Artificial Sequence: Synthetic coding sequence
  source 1..1680: mol_type = other DNA
atgaggaccaccaaggtgtacaagctggtgatccacaagaagggctttggaggcagtgatgatgagctggtggtgaaccccaaggtgttcccccacatcaagctgggggacatcgtggagatcgcccaccccaatgatgagtacagccccctgctgctgcaggtgaagagcctgaaggaggacctgcagaaggagaccatctctgtggaccagacagtgacccaggtgttccggctgcggccctaccaggatgtgtatgtgaatgtggtggaccccaaggatgtgaccctggacctggtggagctgaccttcaaggaccagtacatcggccgcggggacatgtggaggctgaagaagagcctggtgtccacctgtgcctacatcacccagaaggtggagtttgctggcatccgggcccaggccggggagctgtgggtgaagaatgagaaggtgatgtgtggctacatcagcgaggacaccagggtggtgttccgcagcaccagcgccatggtgtacatcttcatccagatgagctgtgagatgtgggactttgacatctatggagacctgtactttgagaaggctgtgaatggcttcctggccgacctcttcaccaagtggaaggagaagaactgcagccatgaggtgacagtggtgctcttcagcaggaccttctatgatgccaagtctgtggatgagttccctgagatcaacagagccagcatccggcaggaccacaagggccgcttctatgaggacttctacaaggtggtggtgcagaatgaaagaagagaggagtggaccagcctgctggtgaccatcaagaagctgttcatccagtaccctgtgctggtgcggctggagcaggccgagggcttcccccagggcgacaacagcaccagcgcccagggcaactacctggaggccatcaacctgtccttcaacgtgtttgacaagcactacatcaacagaaactttgacagaacaggccagatgtctgtggtgatcaccccaggagtgggcgtgtttgaggtggaccggctgctgatgatcctgaccaagcagaggatgattgacaatggcatcggcgtggacctggtgtgcatgggagagcagcccctgcatgctgtgcccctcttcaagctgcacaacagaagtgccccccgggacagccggctgggagatgactacaacatcccccactggatcaaccacagcttctacaccagcaagagccagctgttctgcaacagcttcaccccccgcatcaagctggccggcaagaagccagccagcgagaaggccaagaatggccgggacaccagcctgggcagccccaaggagagtgaaaatgccctgcccatccaggtggactatgatgcctatgatgcccaggtgttccggctgcccggccccagccgggcccagtgcctgaccacctgccgctctgtgcgggagcgggagagccacagcaggaagagcgccagcagctgtgatgtgagcagcagccccagcctgcccagcaggaccctgcccacagaggaggtgcgcagccaggccagtgatgacagcagcctgggcaagagcgccaacatcctgatgatcccccacccccacctgcaccagtatgaggtgagcagcagcctgggctacaccagcacccgggagcacctgggctag

SEQ ID NO: 149833 - DNA, 4659 bp, synthetic construct
  misc_feature 1..4659: note = Description of Artificial Sequence: Synthetic coding sequence
  source 1..4659: mol_type = other DNA
atgaggaccaccaaggtgtacaagctggtgatccacaagaagggctttggaggcagtgatgatgagctggtggtgaaccccaaggtgttcccccacatcaagctgggggacatcgtggagatcgcccaccccaatgatgagtacagccccctgctgctgcaggtgaagagcctgaaggaggacctgcagaaggagaccatctctgtggaccagacagtgacccaggtgttccggctgcggccctaccaggatgtgtatgtgaatgtggtggaccccaaggatgtgaccctggacctggtggagctgaccttcaaggaccagtacatcggccgcggggacatgtggaggctgaagaagagcctggtgtccacctgtgcctacatcacccagaaggtggagtttgctggcatccgggcccaggccggggagctgtgggtgaagaatgagaaggtgatgtgtggctacatcagcgaggacaccagggtggtgttccgcagcaccagcgccatggtgtacatcttcatccagatgagctgtgagatgtgggactttgacatctatggagacctgtactttgagaaggctgtgaatggcttcctggccgacctcttcaccaagtggaaggagaagaactgcagccatgaggtgacagtggtgctcttcagcaggaccttctatgatgccaagtctgtggatgagttccctgagatcaacagagccagcatccggcaggaccacaagggccgcttctatgaggacttctacaaggtggtggtgcagaatgaaagaagagaggagtggaccagcctgctggtgaccatcaagaagctgttcatccagtaccctgtgctggtgcggctggagcaggccgagggcttcccccagggcgacaacagcaccagcgcccagggcaactacctggaggccatcaacctgtccttcaacgtgtttgacaagcactacatcaacagaaactttgacagaacaggccagatgtctgtggtgatcaccccaggagtgggcgtgtttgaggtggaccggctgctgatgatcctgaccaagcagaggatgattgacaatggcatcggcgtggacctggtgtgcatgggagagcagcccctgcatgctgtgcccctcttcaagctgcacaacagaagtgccccccgggacagccggctgggagatgactacaacatcccccactggatcaaccacagcttctacaccagcaagagccagctgttctgcaacagcttcaccccccgcatcaagctggccggcaagaagccagccagcgagaaggccaagaatggccgggacaccagcctgggcagccccaaggagagtgaaaatgccctgcccatccaggtggactatgatgcctatgatgcccaggtgttccggctgcccggccccagccgggcccagtgcctgaccacctgccgctctgtgcgggagcgggagagccacagcaggaagagcgccagcagctgtgatgtgagcagcagccccagcctgcccagcaggaccctgcccacagaggaggtgcgcagccaggccagtgatgacagcagcctgggcaagagcgccaacatcctgatgatcccccacccccacctgcaccagtatgaggtgagcagcagcctgggctacaccagcaccagagatgtgctggagaacatgatggagcccccccagagggacagcagcgcccctggccgcttccacgtgggcagcgctgagagcatgctgcacgtgcggcctgggggctacaccccccagagggccctgatcaacccctttgcccccagcaggatgcccatgaagctgaccagcaacagaagacgctggatgcacaccttccctgtgggccccagcggggaggccatccagatccaccaccagacccggcagaacatggccgagctgcagggcagcggccagagggaccccacccacagcagcgctgagctgctggagctggcctaccacgaggccgccggccgccacagcaacagccggcagcctggagatggcatgtccttcctgaacttcagcggcacagaggagctgtctgtgggcctgctgagcaacagcggggccggcatgaaccccaggacccagaacaaggacagcctggaggacagcgtgtccaccagcccagaccccatcctgaccctgagcgcccctcctgtggtgcccggcttctgctgcaccgtgggcgtggactggaagagcctgaccaccccagcctgcctgcccctgaccacagactacttcccagaccggcagggcctgcagaatgactacacagagggctgctatgacctgctgcctgaggccgacatcgacagaagagatgaagatggagtgcagatgacagcccagcaggtgtttgaggagttcatctgccagaggctgatgcagggctaccagatcatcgtgcagcccaagacccagaagcccaacccagctgtgcccccacccctgagcagcagccccctgtacagccggggcctggtgtccaggaacagacctgaggaggaggaccagtactggctgtccatgggccgcaccttccacaaggtgaccctgaaggacaagatgatcaccgtgacccgctacctgcccaagtacccctatgaaagtgcccagatccactacacctacagcctgtgccccagccacagcgacagcgagtttgtgtcctgctgggtggagttcagccatgagcggctggaggagtacaagtggaactacctggaccagtacatctgcagcgctggcagcgaggacttcagcctcatcgagagcctgaagttctggaggacccgcttcctgctgctgcctgcctgtgtgacagccaccaagaggatcacagaaggagaggcccactgtgacatctatggagaccggcccagggcagatgaagatgagtggcagctgctggatggctttgtgcgctttgtggagggcctgaaccgcatcagaagaagacacagaagtgacaggatgatgaggaagggcacagccatgaagggcctgcagatgacaggccccatcagcacccacagcctggagagcacagcccctcctgtgggcaagaagggcaccagcgccctgagcgccctgctggagatggaggccagccagaagtgcctgggggagcagcaggccgctgtgcacggcggcaagagcagcgcccagagcgctgagagcagctctgtggccatgacccccacctacatggacagccccaggaaggatggagccttcttcatggagtttgtgcgcagccccaggacagccagcagcgccttctacccccaggtgtctgtggaccagacagccacccccatgctggatggcaccagcctgggcatctgcaccggccagagcatggaccggggcaacagccagaccttcggcaacagccagaacatcggggagcagggctacagcagcaccaacagcagtgacagcagcagccagcagctggtggccagcagcctgaccagcagcagcaccctgacagagatcctggaggccatgaagcaccccagcactggagtgcagctgctgtctgagcagaagggcctgagcccctactgcttcatctctgctgaggtggtgcactggctggtgaaccacgtggagggcatccagacccaggccatggccatcgacatcatgcagaagatgctggaggagcagctgatcacccacgccagcggggaggcctggaggaccttcatctacggcttctacttctacaagatcgtgacagacaaggagccagacagagtggccatgcagcagcctgccaccacctggcacacagctggggtggatgactttgccagcttccagaggaagtggtttgaggtggcctttgtggccgaggagctggtgcacagcgagatcccagccttcctgctgccctggctgcccagcaggcctgccagctatgccagccgccacagcagcttcagccgcagctttggaggccgcagccaggccgccgccctgctggccgccaccgtgcctgagcagaggacagtgaccctggatgtggatgtgaacaacagaacagaccggctggagtggtgcagctgctactaccacggcaacttcagcctgaatgctgcctttgagatcaagctgcactggatggctgtgacagctgctgtgctgtttgagatggtgcagggctggcacaggaaggccaccagctgtggcttcctgctggtgcctgtgctggagggcccctttgccctgcccagctacctgtatggagaccccctgcgggcccagctgttcatccccctgaacatcagctgcctgctgaaggagggcagcgagcacctgtttgacagcctgggcctgtacaagatcaacatcctgcccctgctgctgaccagcctgctgcggaccagcctgagcatcagcaccctgcaggagcagtgcttctgcagctgccccaccccatctgccagcagccagggcagcagcggcggcggcggcaccccaccagccccacccaccaggacctgcagcgcccggagcggcagcgccaccaccggccccaccaccccctgcagccccaagcatggagccccagccccccagggcatgaagagcctgctgattggctgctag

SEQ ID NO: 149834 - DNA, 4719 bp, synthetic construct
  misc_feature 1..4719: note = Description of Artificial Sequence: Synthetic coding sequence
  source 1..4719: mol_type = other DNA
atgaggaccaccaaggtgtacaagctggtgatccacaagaagggctttggaggcagtgatgatgagctggtggtgaaccccaaggtgttcccccacatcaagctgggggacatcgtggagatcgcccaccccaatgatgagtacagccccctgctgctgcaggtgaagagcctgaaggaggacctgcagaaggagaccatctctgtggaccagacagtgacccaggtgttccggctgcggccctaccaggatgtgtatgtgaatgtggtggaccccaaggatgtgaccctggacctggtggagctgaccttcaaggaccagtacatcggccgcggggacatgtggaggctgaagaagagcctggtgtccacctgtgcctacatcacccagaaggtggagtttgctggcatccgggcccaggccggggagctgtgggtgaagaatgagaaggtgatgtgtggctacatcagcgaggacaccagggtggtgttccgcagcaccagcgccatggtgtacatcttcatccagatgagctgtgagatgtgggactttgacatctatggagacctgtactttgagaaggctgtgaatggcttcctggccgacctcttcaccaagtggaaggagaagaactgcagccatgaggtgacagtggtgctcttcagcaggaccttctatgatgccaagtctgtggatgagttccctgagatcaacagagccagcatccggcaggaccacaagggccgcttctatgaggacttctacaaggtggtggtgcagaatgaaagaagagaggagtggaccagcctgctggtgaccatcaagaagctgttcatccagtaccctgtgctggtgcggctggagcaggccgagggcttcccccagggcgacaacagcaccagcgcccagggcaactacctggaggccatcaacctgtccttcaacgtgtttgacaagcactacatcaacagaaactttgacagaacaggccagatgtctgtggtgatcaccccaggagtgggcgtgtttgaggtggaccggctgctgatgatcctgaccaagcagaggatgattgacaatggcatcggcgtggacctggtgtgcatgggagagcagcccctgcatgctgtgcccctcttcaagctgcacaacagaagtgccccccgggacagccggctgggagatgactacaacatcccccactggatcaaccacagcttctacaccagcaagagccagctgttctgcaacagcttcaccccccgcatcaagctggccggcaagaagccagccagcgagaaggccaagaatggccgggacaccagcctgggcagccccaaggagagtgaaaatgccctgcccatccaggtggactatgatgcctatgatgcccaggtgttccggctgcccggccccagccgggcccagtgcctgaccacctgccgctctgtgcgggagcgggagagccacagcaggaagagcgccagcagctgtgatgtgagcagcagccccagcctgcccagcaggaccctgcccacagaggaggtgcgcagccaggccagtgatgacagcagcctgggcaagagcgccaacatcctgatgatcccccacccccacctgcaccagtatgaggtgagcagcagcctgggctacaccagcaccagagatgtgctggagaacatgatggagcccccccagagggacagcagcgcccctggccgcttccacgtgggcagcgctgagagcatgctgcacgtgcggcctgggggctacaccccccagagggccctgatcaacccctttgcccccagcaggatgcccatgaagctgaccagcaacagaagacgctggatgcacaccttccctgtgggccccagcggggaggccatccagatccaccaccagacccggcagaacatggccgagctgcagggcagcggccagagggaccccacccacagcagcgctgagctgctggagctggcctaccacgaggccgccggccgccacagcaacagccggcagcctggagatggcatgtccttcctgaacttcagcggcacagaggagctgtctgtgggcctgctgagcaacagcggggccggcatgaaccccaggacccagaacaaggacagcctggaggacagcgtgtccaccagcccagaccccatgcctggcttctgctgcaccgtgggcgtggactggaagagcctgaccaccccagcctgcctgcccctgaccacagactacttcccagaccggcagggcctgcagaatgactacacagagggctgctatgacctgctgcctgaggccgacatcgacagaagagatgaagatggagtgcagatgacagcccagcaggtgtttgaggagttcatctgccagaggctgatgcagggctaccagatcatcgtgcagcccaagacccagaagcccaacccagctgtgcccccacccctgagcagcagccccctgtacagccggggcctggtgtccaggaacagacctgaggaggaggaccagtactggctgtccatgggccgcaccttccacaaggtgaccctgaaggacaagatgatcaccgtgacccgctacctgcccaagtacccctatgagagcgcccagatccactacacctacagcctgtgccccagccacagcgacagcgagtttgtgtcctgctgggtggagttcagccatgagcggctggaggagtacaagtggaactacctggaccagtacatctgcagcgctggcagcgaggacttcagcctgattgagagcctgaagttctggaggacccgcttcctgctgctgcctgcctgtgtgacagccaccaagaggatcacagaaggagaggcccactgtgacatctacggggaccggcccagggcagatgaagatgagtggcagctgctggatggctttgtgcgctttgtggagggcctgaaccgcatcagaagaagacacagaagtgacaggatgatgaggaaaggaacagccatgaagggcctgcagatgacaggccccatcagcacccacagcctggagagcacagcccctcctgtgggcaagaagggcaccagcgccctgagcgccctgctggagatggaggccagccagaagtgcctgggggagcagcaggccgctgtgcatggaggcaagagcagcgcccagagcgctgagagcagctctgtggccatgacccccacctacatggacagccccaggaaggtgtctgtggaccagacagccacccccatgctggatggcaccagcctgggcatctgcaccggccagagcatggaccggggcaacagccagacctttggaaacagccagaacattggagagcagggctacagcagcaccaacagcagtgacagcagcagccagcagctggtggccagcagcctgaccagcagcagcaccctgacagagatcctggaggccatgaagcaccccagcactggagtgcagctgctgtctgagcagaagggcctgagcccctactgcttcatctctgctgaggtggtgcactggctggtgaaccacgtggagggcatccagacccaggccatggccatcgacatcatgcagaagatgctggaggagcagctgatcacccacgccagcggggaggcctggaggaccttcatctacggcttctacttctacaagatcgtgacagacaaggagccagacagagtggccatgcagcagcctgccaccacctggcacacagctggggtggatgactttgccagcttccagaggaagtggtttgaggtggcctttgtggccgaggagctggtgcacagcgagatcccagccttcctgctgccctggctgcccagcaggcctgccagctatgccagccgccacagcagcttcagccgcagctttggaggccgcagccaggccgccgccctgctggccgccaccgtgcctgagcagaggacagtgaccctggatgtggatgtgaacaacagaacagaccggctggagtggtgcagctgctactaccacggcaacttcagcctgaatgctgcctttgagatcaagctgcactggatggctgtgacagctgctgtgctgtttgagatggtgcagggctggcacaggaaggccaccagctgtggcttcctgctggtgcctgtgctggagggcccctttgccctgcccagctacctgtatggagaccccctgcgggcccagctgttcatccccctgaacatcagctgcctgctgaaggagggcagcgagcacctgtttgacagctttgagcctgagacctactgggacaggatgcacctgttccaggaggccatcgcccacagatttggatttgtgcaggacaagtacagcgccagcgccttcaacttccctgctgagaacaagccccagtacatccacgtgactggaacagtgttcctgcagctgccctacagcaagaggaagttcagcggccagcagaggagaagaagaaacagcaccagcagcaccaaccagaacatgttctgtgaggagcgggtgggctacaactgggcctacaacaccatgctgaccaagacctggaggagcagcgccactggagatgagaagtttgctgaccggctgctgaaggacttcacagacttctgcatcaacagagacaaccggctggtgaccttctggaccagctgcctggagaagatgcacgccagcgccccctag

SEQ ID NO: 149835 - DNA, 4719 bp, synthetic construct; identical to SEQ ID NO: 149834
  misc_feature 1..4719: note = Description of Artificial Sequence: Synthetic coding sequence
  source 1..4719: mol_type = other DNA

SEQ ID NO: 149836 - DNA, 138 bp, synthetic construct
  misc_feature 1..138: note = Description of Artificial Sequence: Synthetic coding sequence
  source 1..138: mol_type = other DNA
atgaggaccaccaaggtgtacaagctggtgatccacaagaagggctttggaggcagtgatgatgagctggtggtgaaccccaaggtgttcccccacatcaagctgggggacatcgtggagatcgcccaccccaactag

SEQ ID NO: 149837 - DNA, 4512 bp, synthetic construct
  misc_feature 1..4512: note = Description of Artificial Sequence: Synthetic coding sequence
  source 1..4512: mol_type = other DNA
atgaggaccaccaaggtgtacaagctggtgatccacaagaagggctttggaggcagtgatgatgagctggtggtgaaccccaaggtgttcccccacatcaagctgggggacatcgtggagatcgcccaccccaatgatgagtacagccccctgctgctgcaggtgaagagcctgaaggaggacctgcagaaggagaccatctctgtggaccagacagtgacccaggtgttccggctgcggccctaccaggatgtgtatgtgaatgtggtggaccccaaggatgtgaccctggacctggtggagctgaccttcaaggaccagtacatcggccgcggggacatgtggaggctgaagaagagcctggtgtccacctgtgcctacatcacccagaaggtggagtttgctggcatccgggcccaggccggggagctgtgggtgaagaatgagaaggtgatgtgtggctacatcagcgaggacaccagggtggtgttccgcagcaccagcgccatggtgtacatcttcatccagatgagctgtgagatgtgggactttgacatctatggagacctgtactttgagaaggctgtgaatggcttcctggccgacctcttcaccaagtggaaggagaagaactgcagccatgaggtgacagtggtgctcttcagcaggaccttctatgatgccaagtctgtggatgagttccctgagatcaacagagccagcatccggcaggaccacaagggccgcttctatgaggacttctacaaggtggtggtgcagaatgaaagaagagaggagtggaccagcctgctggtgaccatcaagaagctgttcatccagtaccctgtgctggtgcggctggagcaggccgagggcttcccccagggcgacaacagcaccagcgcccagggcaactacctggaggccatcaacctgtccttcaacgtgtttgacaagcactacatcaacagaaactttgacagaacaggccagatgtctgtggtgatcaccccaggagtgggcgtgtttgaggtggaccggctgctgatgatcctgaccaagcagaggatgattgacaatggcatcggcgtggacctggtgtgcatgggagagcagcccctgcatgctgtgcccctcttcaagctgcacaacagaagtgccccccgggacagccggctgggagatgactacaacatcccccactggatcaaccacagcttctacaccagcaagagccagctgttctgcaacagcttcaccccccgcatcaagctggccggcaagaagccagccagcgagaaggccaagaatggccgggacaccagcctgggcagccccaaggagagtgaaaatgccctgcccatccaggtggactatgatgcctatgatgcccaggtgttccggctgcccggccccagccgggcccagtgcctgaccacctgccgctctgtgcgggagcgggagagccacagcaggaagagcgccagcagctgtgatgtgagcagcagccccagcctgcccagcaggaccctgcccacagaggaggtgcgcagccaggccagtgatgacagcagcctgggcaagagcgccaacatcctgatgatcccccacccccacctgcaccagtatgaggtgagcagcagcctgggctacaccagcaccagagatgtgctggagaacatgatggagcccccccagagggacagcagcgcccctggccgcttccacgtgggcagcgctgagagcatgctgcacgtgcggcctgggggctacaccccccagagggccctgatcaacccctttgcccccagcaggatgcccatgaagctgaccagcaacagaagacgctggatgcacaccttccctgtgggcatgaaccccaggacccagaacaaggacagcctggaggacagcgtgtccaccagcccagaccccatcctgaccctgagcgcccctcctgtggtgcccggcttctgctgcaccgtgggcgtggactggaagagcctgaccaccccagcctgcctgcccctgaccacagactacttcccagaccggcagggcctgcagaatgactacacagagggctgctatgacctgctgcctgaggccgacatcgacagaagagatgaagatggagtgcagatgacagcccagcaggtgtttgaggagttcatctgccagaggctgatgcagggctaccagatcatcgtgcagcccaagacccagaagcccaacccagctgtgcccccacccctgagcagcagccccctgtacagccggggcctggtgtccaggaacagacctgaggaggaggaccagtactggctgtccatgggccgcaccttccacaaggtgaccctgaaggacaagatgatcaccgtgacccgctacctgcccaagtacccctatgaaagtgcccagatccactacacctacagcctgtgccccagccacagcgacagcgagtttgtgtcctgctgggtggagttcagccatgagcggctggaggagtacaagtggaactacctggaccagtacatctgcagcgctggcagcgaggacttcagcctcatcgagagcctgaagttctggaggacccgcttcctgctgctgcctgcctgtgtgacagccaccaagaggatcacagaaggagaggcccactgtgacatctatggagaccggcccagggcagatgaagatgagtggcagctgctggatggctttgtgcgctttgtggagggcctgaaccgcatcagaagaagacacagaagtgacaggatgatgaggaagggcacagccatgaagggcctgcagatgacaggccccatcagcacccacagcctggagagcacagcccctcctgtgggcaagaagggcaccagcgccctgagcgccctgctggagatggaggccagccagaagtgcctgggggagcagcaggccgctgtgcacggcggcaagagcagcgcccagagcgctgagagcagctctgtggccatgacccccacctacatggacagccccaggaaggtgtctgtggaccagacagccacccccatgctggatggcaccagcctgggcatctgcaccggccagagcatggaccggggcaacagccagaccttcggcaacagccagaacatcggggagcagggctacagcagcaccaacagcagtgacagcagcagccagcagctggtggccagcagcctgaccagcagcagcaccctgacagagatcctggaggccatgaagcaccccagcactggagtgcagctgctgtctgagcagaagggcctgagcccctactgcttcatctctgctgaggtggtgcactggctggtgaaccacgtggagggcatccagacccaggccatggccatcgacatcatgcagaagatgctggaggagcagctgatcacccacgccagcggggaggcctggaggaccttcatctacggcttctacttctacaagatcgtgacagacaaggagccagacagagtggccatgcagcagcctgccaccacctggcacacagctggggtggatgactttgccagcttccagaggaagtggtttgaggtggcctttgtggccgaggagctggtgcacagcgagatcccagccttcctgctgccctggctgcccagcaggcctgccagctatgccagccgccacagcagcttcagccgcagctttggaggccgcagccaggccgccgccctgctggccgccaccgtgcctgagcagaggacagtgaccctggatgtggatgtgaacaacagaacagaccggctggagtggtgcagctgctactaccacggcaacttcagcctgaatgctgcctttgagatcaagctgcactggatggctgtgacagctgctgtgctgtttgagatggtgcagggctggcacaggaaggccaccagctgtggcttcctgctggtgcctgtgctggagggcccctttgccctgcccagctacctgtatggagaccccctgcgggcccagctgttcatccccctgaacatcagctgcctgctgaaggagggcagcgagcacctgtttgacagctttgagcctgagacctactgggacaggatgcacctgttccaggaggccatcgcccaccgcttcggctttgtgcaggacaagtacagcgccagcgccttcaacttccctgctgagaacaagccccagtacatccacgtgacaggcaccgtcttcctgcagctgccctacagcaagaggaagttcagcggccagcagaggagaagaagaaacagcaccagcagcaccaaccagaacatgttctgtgaggagcgggtgggctacaactgggcctacaacaccatgctgaccaagacctggaggagcagcgccactggagatgagaagtttgctgaccggctgctgaaggacttcacagacttctgcatcaacagagacaaccggctggtgaccttctggaccagctgcctggagaagatgcacgccagcgccccctag

SEQ ID NO: 149838 - DNA, 1995 bp, synthetic construct
  misc_feature 1..1995: note = Description of Artificial Sequence: Synthetic coding sequence
  source 1..1995: mol_type = other DNA
atgaggaccaccaaggtgtacaagctggtgatccacaagaagggctttggaggcagtgatgatgagctggtggtgaaccccaaggtgttcccccacatcaagctgggggacatcgtggagatcgcccaccccaatgatgagtacagccccctgctgctgcaggtgaagagcctgaaggaggacctgcagaaggagaccatctctgtggaccagacagtgacccaggtgttccggctgcggccctaccaggatgtgtatgtgaatgtggtggaccccaaggtgtccacctgtgcctacatcacccagaaggtggagtttgctggcatccgggcccaggccggggagctgtgggtgaagaatgagaaggtgatgtgtggctacatcagcgaggacaccagggtggtgttccgcagcaccagcgccatggtgtacatcttcatccagatgagctgtgagatgtgggactttgacatctatggagacctgtactttgagaaggctgtgaatggcttcctggccgacctcttcaccaagtggaaggagaagaactgcagccatgaggtgacagtggtgctcttcagcaggaccttctatgatgccaagtctgtggatgagttccctgagatcaacagagccagcatccggcaggaccacaagggccgcttctatgaggacttctacaaggtggtggtgcagaatgaaagaagagaggagtggaccagcctgctggtgaccatcaagaagctgttcatccagtaccctgtgctggtgcggctggagcaggccgagggcttcccccagggcgacaacagcaccagcgcccagggcaactacctggaggccatcaacctgtccttcaacgtgtttgacaagcactacatcaacagaaactttgacagaacaggccagatgtctgtggtgatcaccccaggagtgggcgtgtttgaggtggaccggctgctgatgatcctgaccaagcagaggatgattgacaatggcatcggcgtggacctggtgtgcatgggagagcagcccctgcatgctgtgcccctcttcaagctgcacaacagaagtgccccccgggacagccggctgggagatgactacaacatcccccactggatcaaccacagcttctacaccagcaagagccagctgttctgcaacagcttcaccccccgcatcaagctggccggcaagaagccagccagcgagaaggccaagaatggccgggacaccagcctgggcagccccaaggagagtgaaaatgccctgcccatccaggtggactatgatgcctatgatgcccaggtgttccggctgcccggccccagccgggcccagtgcctgaccacctgccgctctgtgcgggagcgggagagccacagcaggaagagcgccagcagctgtgatgtgagcagcagccccagcctgcccagcaggaccctgcccacagaggaggtgcgcagccaggccagtgatgacagcagcctgggcaagagcgccaacatcctgatgatcccccacccccacctgcaccagtatgaggtgagcagcagcctgggctacaccagcaccagagatgtgctggagaacatgatggagcccccccagagggacagcagcgcccctggccgcttccacgtgggcagcgctgagagcatgctgcacgtgcggcctgggggctacaccccccagagggccctgatcaacccctttgcccccagcaggatgcccatgaagctgaccagcaacagaagacgctggatgcacaccttccctgtgggcatgaaccccaggacccagaacaaggacagcctggaggacagcgtgtccaccagcccagaccccagcaagaggggccagctgaccggggagcggggccggcagggcgtgtggggcggccagagcatgaggaagcaggaggaggccctgtgggaggtgtctggccctgaggtgcacatccccctgggctacggcaaggccatgtggtag

SEQ ID NO: 149839 - DNA, 1263 bp, synthetic construct
  misc_feature 1..1263: note = Description of Artificial Sequence: Synthetic coding sequence
  source 1..1263: mol_type = other DNA
atgaagcaccccagcactggagtgcagctgctgtctgagcagaagggcctgagcccctactgcttcatctctgctgaggtggtgcactggctggtgaaccacgtggagggcatccagacccaggccatggccatcgacatcatgcagaagatgctggaggagcagctgatcacccacgccagcggggaggcctggaggaccttcatctacggcttctacttctacaagatcgtgacagacaaggagccagacagagtggccatgcagcagcctgccaccacctggcacacagctggggtggatgactttgccagcttccagaggaagtggtttgaggtggcctttgtggccgaggagctggtgcacagcgagatcccagccttcctgctgccctggctgcccagcaggcctgccagctatgccagccgccacagcagcttcagccgcagctttggaggccgcagccaggccgccgccctgctggccgccaccgtgcctgagcagaggacagtgaccctggatgtggatgtgaacaacagaacagaccggctggagtggtgcagctgctactaccacggcaacttcagcctgaatgctgcctttgagatcaagctgcactggatggctgtgacagctgctgtgctgtttgagatggtgcagggctggcacaggaaggccaccagctgtggcttcctgctggtgcctgtgctggagggcccctttgccctgcccagctacctgtatggagaccccctgcgggcccagctgttcatccccctgaacatcagctgcctgctgaaggagggcagcgagcacctgtttgacagctttgagcctgagacctactgggacaggatgcacctgttccaggaggccatcgcccacagatttggatttgtgcaggacaagtacagcgccagcgccttcaacttccctgctgagaacaagccccagtacatccacgtgactggaacagtgttcctgcagctgccctacagcaagaggaagttcagcggccagcagaggagaagaagaaacagcaccagcagcaccaaccagaacatgttctgtgaggagcgggtgggctacaactgggcctacaacaccatgctgaccaagacctggaggagcagcgccactggagatgagaagtttgctgaccggctgctgaaggacttcacagacttctgcatcaacagagacaaccggctggtgaccttctggaccagctgcctggagaagatgcacgccagcgccccctag

SEQ ID NO: 149840 - DNA, 4785 bp, synthetic construct
  misc_feature 1..4785: note = Description of Artificial Sequence: Synthetic coding sequence
  source 1..4785: mol_type = other DNA
atgaggaccaccaaggtgtacaagctggtgatccacaagaagggctttggaggcagtgatgatgagctggtggtgaaccccaaggtgttcccccacatcaagctgggggacatcgtggagatcgcccaccccaatgatgagtacagccccctgctgctgcaggtgaagagcctgaaggaggacctgcagaaggagaccatctctgtggaccagacagtgacccaggtgttccggctgcggccctaccaggatgtgtatgtgaatgtggtggaccccaaggatgtgaccctggacctggtggagctgaccttcaaggaccagtacatcggccgcggggacatgtggaggctgaagaagagcctggtgtccacctgtgcctacatcacccagaaggtggagtttgctggcatccgggcccaggccggggagctgtgggtgaagaatgagaaggtgatgtgtggctacatcagcgaggacaccagggtggtgttccgcagcaccagcgccatggtgtacatcttcatccagatgagctgtgagatgtgggactttgacatctatggagacctgtactttgagaaggctgtgaatggcttcctggccgacctcttcaccaagtggaaggagaagaactgcagccatgaggtgacagtggtgctcttcagcaggaccttctatgatgccaagtctgtggatgagttccctgagatcaacagagccagcatccggcaggaccacaagggccgcttctatgaggacttctacaaggtggtggtgcagaatgaaagaagagaggagtggaccagcctgctggtgaccatcaagaagctgttcatccagtaccctgtgctggtgcggctggagcaggccgagggcttcccccagggcgacaacagcaccagcgcccagggcaactacctggaggccatcaacctgtccttcaacgtgtttgacaagcactacatcaacagaaactttgacagaacaggccagatgtctgtggtgatcaccccaggagtgggcgtgtttgaggtggaccggctgctgatgatcctgaccaagcagaggatgattgacaatggcatcggcgtggacctggtgtgcatgggagagcagcccctgcatgctgtgcccctcttcaagctgcacaacagaagtgccccccgggacagccggctgggagatgactacaacatcccccactggatcaaccacagcttctacaccagcaagagccagctgttctgcaacagcttcaccccccgcatcaagctggccggcaagaagccagccagcgagaaggccaagaatggccgggacaccagcctgggcagccccaaggagagtgaaaatgccctgcccatccaggtggactatgatgcctatgatgcccaggtgttccggctgcccggccccagccgggcccagtgcctgaccacctgccgctctgtgcgggagcgggagagccacagcaggaagagcgccagcagctgtgatgtgagcagcagccccagcctgcccagcaggaccctgcccacagaggaggtgcgcagccaggccagtgatgacagcagcctgggcaagagcgccaacatcctgatgatcccccacccccacctgcaccagtatgaggtgagcagcagcctgggctacaccagcaccagagatgtgctggagaacatgatggagcccccccagagggacagcagcgcccctggccgcttccacgtgggcagcgctgagagcatgctgcacgtgcggcctgggggctacaccccccagagggccctgatcaacccctttgcccccagcaggatgcccatgaagctgaccagcaacagaagacgctggatgcacaccttccctgtgggccccagcggggaggccatccagatccaccaccagacccggcagaacatggccgagctgcagggcagcggccagagggaccccacccacagcagcgctgagctgctggagctggcctaccacgaggccgccggccgccacagcaacagccggcagcctggagatggcatgtccttcctgaacttcagcggcacagaggagctgtctgtgggcctgctgagcaacagcggggccggcatgaaccccaggacccagaacaaggacagcctggaggacagcgtgtccaccagcccagaccccatgcctggcttctgctgcaccgtgggcgtggactggaagagcctgaccaccccagcctgcctgcccctgaccacagactacttcccagaccggcagggcctgcagaatgactacacagagggctgctatgacctgctgcctgaggccgacatcgacagaagagatgaagatggagtgcagatgacagcccagcaggtgtttgaggagttcatctgccagaggctgatgcagggctaccagatcatcgtgcagcccaagacccagaagcccaacccagctgtgcccccacccctgagcagcagccccctgtacagccggggcctggtgtccaggaacagacctgaggaggaggaccagtactggctgtccatgggccgcaccttccacaaggtgaccctgaaggacaagatgatcaccgtgacccgctacctgcccaagtacccctatgagagcgcccagatccactacacctacagcctgtgccccagccacagcgacagcgagtttgtgtcctgctgggtggagttcagccatgagcggctggaggagtacaagtggaactacctggaccagtacatctgcagcgctggcagcgaggacttcagcctgattgagagcctgaagttctggaggacccgcttcctgctgctgcctgcctgtgtgacagccaccaagaggatcacagaaggagaggcccactgtgacatctacggggaccggcccagggcagatgaagatgagtggcagctgctggatggctttgtgcgctttgtggagggcctgaaccgcatcagaagaagacacagaagtgacaggatgatgaggaaaggaacagccatgaagggcctgcagatgacaggccccatcagcacccacagcctggagagcacagcccctcctgtgggcaagaagggcaccagcgccctgagcgccctgctggagatggaggccagccagaagtgcctgggggagcagcaggccgctgtgcatggaggcaagagcagcgcccagagcgctgagagcagctctgtggccatgacccccacctacatggacagccccaggaaggatggagccttcttcatggagtttgtgcgcagccccaggacagccagcagcgccttctacccccaggtgtctgtggaccagacagccacccccatgctggatggcaccagcctgggcatctgcaccggccagagcatggaccggggcaacagccagacctttggaaacagccagaacattggagagcagggctacagcagcaccaacagcagtgacagcagcagccagcagctggtggccagcagcctgaccagcagcagcaccctgacagagatcctggaggccatgaagcaccccagcactggagtgcagctgctgtctgagcagaagggcctgagcccctactgcttcatctctgctgaggtggtgcactggctggtgaaccacgtggagggcatccagacccaggccatggccatcgacatcatgcagaagatgctggaggagcagctgatcacccacgccagcggggaggcctggaggaccttcatctacggcttctacttctacaagatcgtgacagacaaggagccagacagagtggccatgcagcagcctgccaccacctggcacacagctggggtggatgactttgccagcttccagaggaagtggtttgaggtggcctttgtggccgaggagctggtgcacagcgagatcccagccttcctgctgccctggctgcccagcaggcctgccagctatgccagccgccacagcagcttcagccgcagctttggaggccgcagccaggccgccgccctgctggccgccaccgtgcctgagcagaggacagtgaccctggatgtggatgtgaacaacagaacagaccggctggagtggtgcagctgctactaccacggcaacttcagcctgaatgctgcctttgagatcaagctgcactggatggctgtgacagctgctgtgctgtttgagatggtgcagggctggcacaggaaggccaccagctgtggcttcctgctggtgcctgtgctggagggcccctttgccctgcccagctacctgtatggagaccccctgcgggcccagctgttcatccccctgaacatcagctgcctgctgaaggagggcagcgagcacctgtttgacagctttgagcctgagacctactgggacaggatgcacctgttccaggaggccatcgcccacagatttggatttgtgcaggacaagtacagcgccagcgccttcaacttccctgctgagaacaagccccagtacatccacgtgactggaacagtgttcctgcagctgccctacagcaagaggaagttcagcggccagcagaggagaagaagaaacagcaccagcagcaccaaccagaacatgttctgtgaggagcgggtgggctacaactgggcctacaacaccatgctgaccaagacctggaggagcagcgccactggagatgagaagtttgctgaccggctgctgaaggacttcacagacttctgcatcaacagagacaaccggctggtgaccttctggaccagctgcctggagaagatgcacgccagcgccccctag

SEQ ID NO: 149841 - DNA, 1536 bp, synthetic construct
  misc_feature 1..1536: note = Description of Artificial Sequence: Synthetic coding sequence
  source 1..1536: mol_type = other DNA
atggccaccgtgcaggagaaggctgctgccctgaacctgagcgccctgcacagccctgcccacaggcctcctggcttctctgtggcccagaagccctttggagccacctacgtgtggagcagcatcatcaacaccctgcagacccaggtggaggtgaagaagagaagacaccggctgaagaggcacaatgactgctttgtgggcagcgaggccgtggatgtgatcttcagccacctgatccagaacaagtactttggagatgtggacatcccccgggccaaggtggtgcgggtgtgccaggccctgatggactacaaggtgtttgaggccgtgcccaccaaggtgtttgggaaggacaagaagcccacctttgaggacagcagctgcagcctgtaccgcttcaccaccatccccaaccaggacagccagctgggcaaggagaacaagctgtacagccctgcccgctatgcagatgccctcttcaagagcagtgacatccgcagcgccagcctggaggacctgtgggagaacctgagcctgaagccagccaacagcccccacgtgaacatcagcgccaccctgagcccccaggtgatcaatgaggtgtggcaggaggagaccatcggccgcctgctgcagctggtggacctgcccctgctggacagcctgctgaagcagcaggaggccgtgcccaagatcccccagcccaagaggcagagcaccatggtgaacagcagcaactacctggaccggggcatcctgaaggcctacagcgacagccaggaggatgagtggctgtctgctgccatcgactgcctggagtacctgcctgaccagatggtggtggagatcagccgctccttccctgagcagcctgacagaacagacctggtgaaggagctgctgtttgatgccatcggccgctactacagcagccgggagcccctgctgaaccacctgagtgatgtgcacaatggaattgctgagctgctggtgaatggcaagacagagatcgccctggaggccacccagctgctgctgaagctgctggacttccagaaccgggaggagttccggcggctgctgtacttcatggctgtggccgccaaccccagcgagttcaagctgcagaaggagagtgacaacaggatggtggtgaagaggatcttcagcaaggccatcgtggacaacaagaacctgagcaagggcaagacagacctgctggtgctcttcctgatggaccaccagaaggatgtgttcaagatccctggcaccctgcacaagatcgtgtctgtgaagctgatggccatccagaatggccgggaccccaacagagatgctggctacatctactgccagagaattgaccagagggactacagcaacaacacagagaagaccaccaaggatgagctgctgaacctgctgaagaccctggatgaggacagcaagctgagcgccaaggagaagaagaagctgctgggccagttctacaagtgccacccagacatcttcatcgagcactttggagactag

SEQ ID NO: 149842 - DNA, 1509 bp, synthetic construct
  misc_feature 1..1509: note = Description of Artificial Sequence: Synthetic coding sequence
  source 1..1509: mol_type = other DNA
atgaggggcctgtgtgagttctactggcaggagtttggcatcaagggcttctctgtggcccagaagccctttggagccacctacgtgtggagcagcatcatcaacaccctgcagacccaggtggaggtgaagaagaggaggcaccggctgaagaggcacaatgactgctttgtgggcagcgaggccgtggatgtgatcttcagccacctgatccagaacaagtactttggagatgtggacatcccccgggccaaggtggtgcgggtgtgccaggccctgatggactacaaggtgtttgaagctgtgcccaccaaggtgtttgggaaggacaagaagcccacctttgaggacagcagctgcagcctgtaccgcttcaccaccatccccaaccaggacagccagctgggcaaggagaacaagctgtacagccctgcccgctatgcagatgccctcttcaagagcagtgacatccgcagcgccagcctggaggacctgtgggagaacctgagcctgaagccagccaacagcccccacgtgaacatcagcgccaccctgagcccccaggtgatcaatgaggtgtggcaggaggagaccatcggccgcctgctgcagctggtggacctgcccctgctggacagcctgctgaagcagcaggaggccgtgcccaagatcccccagcccaagaggcagagcaccatggtgaacagcagcaactacctggaccggggcatcctgaaggcctacagcgacagccaggaggatgagtggctgtctgctgccatcgactgcctggagtacctgcctgaccagatggtggtggagatcagccgctccttccctgagcagcctgacagaacagacctggtgaaggagctgctgtttgatgccatcggccgctactacagcagccgggagcccctgctgaaccacctgagtgatgtgcacaacggcattgctgagctgctggtgaatggcaagacagaaattgccctggaggccacccagctgctgctgaagctgctggacttccagaaccgggaggagttccggcggctgctgtacttcatggctgtggccgccaaccccagcgagttcaagctgcagaaggagagtgacaacaggatggtggtgaagaggatcttcagcaaggccatcgtggacaacaagaacctgagcaagggcaagacagacctgctggtgctcttcctgatggaccaccagaaggatgtgttcaagatccctggcaccctgcacaagatcgtgtctgtgaagctgatggccatccagaatggccgggaccccaacagagatgctggctacatctactgccagagaattgaccagagggactacagcaacaacacagagaagaccaccaaggatgagctgctgaacctgctgaagaccctggatgaggacagcaagctgagcgccaaggagaagaagaagctgctgggccagttctacaagtgccacccagacatcttcatcgagcactttggagactag

SEQ ID NO: 149843 - DNA, 1230 bp, synthetic construct
  misc_feature 1..1230: note = Description of Artificial Sequence: Synthetic coding sequence
  source 1..1230: mol_type = other DNA
atggaggagggcggcagcactggatctgctggcagtgacagcagcaccagcggcagcggcggggcccagcagcgggagctggagaggatggccgaggtgctggtgactggagagcagctgcggctgcggctgcacgaggagaaggtgatcaaggacagaagacaccacctgaagacctaccccaactgctttgtggccaaggagctgattgactggctgattgagcacaaggaggccagtgaccgggagacagccatcaagctgatgcagaagctggccgaccggggcatcatccaccacgtgtgtgatgagcacaaggagttcaaggatgtgaagctgttctaccgcttcaggaaggatgatggcaccttccccctggacaatgaggtgaaggccttcatgaggggccagaggctgtatgagaagctgatgagccctgagaacaccctgctgcagccccgggaggaggagggcgtgaagtatgaaagaaccttcatggccagcgagttcctggactggctggtgcaggagggggaggccaccaccaggaaggaggccgagcagctgtgccaccggctgatggagcacggcatcatccagcacgtgagcaacaagcacccctttgtggacagcaacctgctgtaccagttcaggatgaacttcagaagaagaagaaggctgatggagctgctgaatgagaagagccccagcagccaggagacccatgacagccccttctgcctgaggaagcagagccatgacaacaggaagagcaccagcttcatgtctgtgagccccagcaaggagatcaagatcgtgtctgctgtgagaagaagctccatgagcagctgtggcagcagcggctacttcagcagcagccccaccctgagcagcagcccccctgtgctgtgcaaccccaagtctgtgctgaagaggcctgtgaccagcgaggagctgctgacccctggggccccctatgccaggaagaccttcaccatcgtgggagatgctgtgggctggggctttgtggtgcggggcagcaagccctgccacatccaggccgtggaccccagcggccctgctgctgctgctggcatgaaggtgtgccagtttgtggtgtctgtgaatggcctgaatgtgctgcacgtggactacagaacagtgagcaacctgatcctgaccggccccaggaccatcgtgatggaggtgatggaggagctggagtgctag

SEQ ID NO: 149844 - DNA, 2877 bp, synthetic construct
  misc_feature 1..2877: note = Description of Artificial Sequence: Synthetic coding sequence
  source 1..2877: mol_type = other DNA
atgaggacccacaccaggggggcccccagcgtcttcttcatctacctgctgtgctttgtgtctgcctacatcacagatgaaaatcctgaggtgatgatccccttcaccaatgccaactatgacagccaccccatgctgtacttcagcagagctgaggtggccgagctgcagctgcgggccgccagcagccatgagcacatcgccgcccggctgacagaggccgtgcacaccatgctgagcagccccctggagtacctgcccccctgggaccccaaggactacagcgcccgctggaatgagatcttcggcaacaacctgggcgccctggccatgttctgtgtgctgtacccagagaacatcgaggcccgggacatggccaaggactacatggagaggatggccgcccagcccagctggctggtgaaggatgccccctgggatgaggtgcccctggcccacagcctggtgggctttgccacagcctatgacttcctgtacaactacctgagcaagacccagcaggagaagttcctggaggtgattgccaatgccagcggctacatgtatgagaccagctaccgccggggctggggcttccagtacctgcacaaccaccagcccaccaactgcatggccctgctgaccggcagcctggtgctgatgaaccagggctacctgcaggaggcctacctgtggaccaagcaggtgctgaccatcatggagaagagcctggtgctgctgcgggaggtgacagatggcagcctgtatgagggcgtggcctacggcagctacaccaccaggagcctcttccagtacatgttcctggtgcagaggcacttcaacatcaaccacttcggccacccctggctgaagcagcactttgccttcatgtaccgcaccatcctgcccggcttccagaggacagtggccatcgctgacagcaactacaactggttctacggccctgagagccagctggtgttcctggacaagtttgtgatgagaaatggcagcggcaactggctggccgaccagatcagaagaaacagagtggtggagggccctggcacccccagcaagggccagcgctggtgcaccctgcacacagagttcctgtggtatgatggcagcctgaagtctgtgcccccaccagactttggcacccccaccctgcactactttgaggactggggcgtggtgacctacggcagcgccctgcctgctgagatcaacagaagcttcctgtccttcaagagcggcaagctgggcggccgggccatctatgacatcgtgcacaggaacaagtacaaggactggatcaagggctggaggaacttcaatgccggccacgagcacccagaccagaacagcttcacctttgccccaaatggagtgcccttcatcacagaggccctgtatggccccaagtacaccttcttcaacaacgtgctgatgttcagccctgctgtgtccaagagctgcttcagcccctgggtgggccaggtgacagaggactgcagcagcaagtggagcaagtacaagcatgacctggccgccagctgccagggccgggtggtggccgctgaggagaagaatggagtggtgttcatccggggggagggcgtgggcgcctacaacccccagctgaacctgaagaatgtgcagaggaacctgatcctgctgcacccccagctgctgctgctggtggaccagatccacctgggggaggagagccccctggagacagctgccagcttcttccacaacgtggatgtgccctttgaggagaccgtggtggatggagtgcatggagccttcatccggcagagagatggcctgtacaagatgtactggatggatgacaccggctacagcgagaaggccacctttgcctctgtgacctacccccggggctacccctacaacggcaccaactacgtgaatgtgaccatgcacctgcggagccccatcacccgggccgcctacctgttcatcggccccagcattgatgtgcagagcttcaccgtgcatggagacagccagcagctggatgtgttcatcgccaccagcaagcacgcctatgccacctacctgtggacaggagaggccaccggccagagcgcctttgcccaggtgattgctgacagacacaagatcctgtttgacagaaattctgccatcaagagcagcatcgtgcctgaggtgaaggactatgctgccatcgtggagcagaacctgcagcacttcaagcctgtgttccagctgctggagaagcagatcctgagccgggtgaggaacacagccagcttcaggaagacagctgagcggctgctgcgcttcagtgacaagaggcagacagaggaggccatcgaccgcatctttgccatcagccagcagcagcagcagcagagcaagagcaagaagaacagaagagctgggaagcgctacaagtttgtggatgctgtgcctgacatctttgcccagatcgaggtgaatgagaagaagatccggcagaaggcccagatcctggcccagaaggagctgcccattgatgaagatgaggagatgaaggacctgctggactttgctgatgtgacctatgagaagcacaagaatggaggcctcatcaagggccgcttcggccaggccaggatggtgaccaccacccacagccgggcccccagcctgagcgccagctacaccaggctcttcctgatcctgaacatcgccatcttctttgtgatgctggccatgcagctgacctacttccagagggcccagagcctgcacggccagcgctgcctgtatgctgtgctgctgattgacagctgcatcctgctgtggctgtacagcagctgcagccagagccagtgctag

SEQ ID NO: 149845 - DNA, 2877 bp, synthetic construct; identical to SEQ ID NO: 149844
  misc_feature 1..2877: note = Description of Artificial Sequence: Synthetic coding sequence
  source 1..2877: mol_type = other DNA

SEQ ID NO: 149846 - DNA, 501 bp, synthetic construct
  misc_feature 1..501: note = Description of Artificial Sequence: Synthetic coding sequence
  source 1..501: mol_type = other DNA
atgaggacccacaccaggggggcccccagcgtcttcttcatctacctgctgtgctttgtgtctgcctacatcacagatgaaaatcctgaggtgatgatccccttcaccaatgccaactatgacagccaccccatgctgtacttcagcagagctgaggtggccgagctgcagctgcgggccgccagcagccatgagcacatcgccgcccggctgacagaggccgtgcacaccatgctgagcagccccctggagtacctgcccccctgggaccccaaggactacagcgcccgctggaatgagatcttcggcaacaacctgggcgccctggccatgttctgtgtgctgtacccagagaacatcgaggcccgggacatggccaaggactacatggagaggatggccgcccagcccagctggctggtgaaggatgccccctgggatgaggtgcccctggcccacagcctggtgggctttgccacagcctatgacttcctgtactag

SEQ ID NO: 149847 - DNA, 2877 bp, synthetic construct; identical to SEQ ID NO: 149844
  misc_feature 1..2877: note = Description of Artificial Sequence: Synthetic coding sequence
  source 1..2877: mol_type = other DNA

SEQ ID NO: 149848 - DNA, 2934 bp, synthetic construct
  misc_feature 1..2934: note = Description of Artificial Sequence: Synthetic coding sequence
  source 1..2934: mol_type = other DNA
atgggcagctttgaagatggcctggccgccctggagatctggaggagtgatgccaccatgaggacccacaccaggggggcccccagcgtcttcttcatctacctgctgtgctttgtgtctgcctacatcacagatgagaaccctgaggtgatgatccccttcaccaatgccaactatgacagccaccccatgctgtacttcagcagagctgaggtggccgagctgcagctgcgggccgccagcagccatgagcacatcgccgcccggctgacagaagctgtgcacaccatgctgagcagccccctggagtacctgcccccctgggaccccaaggactacagcgcccgctggaatgagatctttggaaacaacctgggcgccctggccatgttctgtgtgctgtacccagaaaatattgaggcccgggacatggccaaggactacatggagaggatggccgcccagcccagctggctggtgaaggatgccccctgggatgaggtgcccctggcccacagcctggtgggctttgccacagcctatgacttcctgtacaactacctgagcaagacccagcaggagaagttcctggaggtgattgccaatgccagcggctacatgtatgagaccagctacagaagaggctggggcttccagtacctgcacaaccaccagcccaccaactgcatggccctgctgaccggcagcctggtgctgatgaaccagggctacctgcaggaggcctacctgtggaccaagcaggtgctgaccatcatggagaagagcctggtgctgctgcgggaggtgacagatggcagcctgtatgaaggagtggcctacggcagctacaccaccaggagcctcttccagtacatgttcctggtgcagaggcacttcaacatcaaccacttcggccacccctggctgaagcagcactttgccttcatgtaccgcaccatcctgcccggcttccagaggacagtggccatcgctgacagcaactacaactggttctacggccctgagagccagctggtgttcctggacaagtttgtgatgagaaatggaagtggcaactggctggccgaccagatcagaagaaacagagtggtggagggccctggcacccccagcaagggccagcgctggtgcaccctgcacacagagttcctgtggtatgatggcagcctgaagtctgtgcccccaccagactttggcacccccaccctgcactactttgaggactggggcgtggtgacctacggcagcgccctgcctgctgagatcaacagaagcttcctgtccttcaagagcggcaagctgggcggccgggccatctatgacatcgtgcacaggaacaagtacaaggactggatcaagggctggaggaacttcaatgccggccacgagcacccagaccagaacagcttcacctttgcccccaacggggtgcccttcatcacagaggccctgtatggccccaagtacaccttcttcaacaacgtgctgatgttctccccagctgtgtccaagagctgcttcagcccctgggtgggccaggtgacagaggactgcagcagcaagtggagcaagtacaagcatgacctggccgccagctgccagggccgggtggtggccgctgaggagaagaatggagtggtgttcatccggggggagggcgtgggcgcctacaacccccagctgaacctgaagaatgtgcagaggaacctgatcctgctgcacccccagctgctgctgctggtggaccagatccacctgggggaggagagccccctggagacagctgccagcttcttccacaacgtggatgtgccctttgaggagaccgtggtggatggagtgcacggggccttcatccggcagagagatggcctgtacaagatgtactggatggatgacaccggctacagcgagaaggccacctttgcctctgtgacctacccccggggctacccctacaacggcaccaactacgtgaatgtgaccatgcacctgcggagccccatcaccagggctgcctacctgttcatcggccccagcattgatgtgcagagcttcaccgtgcacggggacagccagcagctggatgtgttcatcgccaccagcaagcacgcctatgccacctacctgtggacaggagaggccaccggccagagcgcctttgcccaggtgattgctgacagacacaagatcctgtttgacaggaacagcgccatcaagagcagcatcgtgcctgaggtgaaggactatgctgccatcgtggagcagaacctgcagcacttcaagcctgtgttccagctgctggagaagcagatcctgagccgggtgaggaacacagccagcttcaggaagacagctgagcggctgctgcgcttcagtgacaagaggcagacagaggaggccatcgaccgcatctttgccatcagccagcagcagcagcagcagagcaagagcaagaagaacagaagagctgggaagcgctacaagtttgtggatgctgtgcctgacatctttgcccagatcgaggtgaatgagaagaagatccggcagaaggcccagatcctggcccagaaggagctgcccattgatgaagatgaggagatgaaggacctgctggactttgctgatgtgacctatgagaagcacaagaatggaggcctcatcaagggccgcttcggccaggccaggatggtgaccaccacccacagccgggcccccagcctgagcgccagctacaccaggctcttcctgatcctgaacatcgccatcttctttgtgatgctggccatgcagctgacctacttccagagggcccagagcctgcacggccagcgctgcctgtatgctgtgctgctgattgacagctgcatcctgctgtggctgtacagcagctgcagccagagccagtgctag

SEQ ID NO: 149849 - DNA, 570 bp, synthetic construct
  misc_feature 1..570: note = Description of Artificial Sequence: Synthetic coding sequence
  source 1..570: mol_type = other DNA
atggccgccctgaagggccggcaggtgtactgggccacagctgggaagatcagcggctggacctggccccacgccccccggcggccccacgtgctgctgctgaatggaattggagtgggcggggccctgggcagcattgatgagctgctgtgccaggccctgagcaatggcctgaatgtgcctgagggcagcctgaccagcacctgtgcccagcagccagatggcctcatccacacagccaagtggggccacgtgcacagcctgagcagccacagccctggggccccaaatgcctgtggggtgctgcccggcaccaccgtggatgatggagtgcaccaggacctgcagagggtgctggcctgtgagcaggtgtatgacctggagggcatgctggatgatgcccacagccatgagctgctggccgtggtggccgctgtgcaccaccacggcgtgtccaaggccctgcacaacggcaccctgagctttgtggaggccttcggcggcatccccccctgcaccgtgcgcatcttccgccgctggtttggctgcctgggggacctggagatctag

SEQ ID NO: 149850 - DNA, 3669 bp, synthetic construct
  misc_feature 1..3669: note = Description of Artificial Sequence: Synthetic coding sequence
  source 1..3669: mol_type = other DNA
atgcccaagggcggggccccaccctggatcatggccctgatgttcaccggccacctgctcttcctggccctgctgatgtttgccttcagcacctttgaggagagcgtgagcaactacagcgagtgggccgtgttcacagatgacatcgaccagttcaagacccagaaggtgcaggacttccggcccaaccagaagctgaagaagtccatgctgcaccccagcctgtactttgatgctggggagatccaggccatgaggcagaagagccgggccagccacctgcacctgttccgggccatccgctctgctgtgacagtgatgctgagcaaccccacctactacctgcccccacccaagcatgctgactttgctgccaagtggaatgagatctacggcaacaacctgccccccctggccctgtactgcctgctgtgcccagaggacaaggtggcctttgaatttgtgctggagtacatggacaggatggtgggctacaaggactggctggtggagaatgcccctggagatgaggtgcccatcggccacagcctgactggatttgccacagcctttgacttcctgtacaacctgctggacaaccaccggcggcagaagtacctggagaagatctgggtgatcacagaggagatgtatgagtacagcaaggtgcgctcctggggcaagcagctgctgcacaaccaccaggccaccaacatgattgccctgctgaccggggccctggtgactggagtggacaagggcagcaaggccaacatctggaagcaggccgtggtggatgtgatggagaagaccatgttcctgctgaaccacatcgtggatggcagcctggatgagggcgtggcctacggcagctacacagccaagtctgtgacccagtatgtgttcctggcccagaggcacttcaacatcaacaacctggacaacaactggctgaagatgcacttctggttctactatgccaccctgctgcccggcttccagaggacagtgggcattgctgacagcaactacaactggttctacggccctgagagccagctggtgttcctggacaagttcatcctgaagaatggagctggcaactggctggcccagcagatcaggaagcaccggcccaaggatggccccatggtgcccagcacagcccagcgctggagcaccctgcacacagagtacatctggtatgacccccagctgaccccccagcccccagctgactatggaacagccaagatccacaccttccccaactggggcgtggtgacctacggggccggcctgcccaacacccagaccaacacctttgtgtccttcaagagcggcaagctgggcggccgggctgtgtatgacatcgtgcacttccagccctacagctggattgatggctggaggagcttcaaccctggccacgagcacccagaccagaacagcttcacctttgcccccaacggccaggtgtttgtgtctgaggccctgtatggccccaagctgagccacctgaacaacgtgctggtgtttgcccccagccccagcagccagtgcaacaagccctgggagggccagctgggagaatgtgcccagtggctgaagtggacaggagaggaggtgggagatgctgctggggagatcatcacagccagccagcacggggagatggtgtttgtgtctggagaggccgtgtctgcctacagcagcgccatgaggctgaagtctgtgtaccgggccctgctgctgctgaacagccagaccctgctggtggtggaccacatcgagcggcaggaggacagccccatcaacagcgtgtctgccttcttccacaacctggacatcgacttcaagtacatcccctacaagttcatgaaccgctacaatggagccatgatggatgtgtgggatgcccactacaagatgttctggtttgaccaccacggcaacagccccatggccagcatccaggaggccgagcaggccgctgagttcaagaagcgctggacccagtttgtgaatgtgaccttccagatggagcccaccatcacccgcatcgcctacgtgttctacggcccctacatcaacgtgagcagctgccgcttcatcgacagcagcaaccctggcctgcagatcagcctgaatgtgaacaacacagaacatgtggtgtccatcgtgacagactaccacaacctgaagacccgcttcaactacctgggctttggaggctttgcctctgtggccgaccagggccagatcacccgcttcggcctgggcacccaggccatcgtgaagcctgtgagacatgaccgcatcatcttccccttcggcttcaagttcaacattgctgtgggcctcatcctgtgcatcagcctggtgatcctgaccttccagtggaggttctacctgtccttcaggaagctgatgcgctggatcctgatcctggtgattgccctgtggttcatcgagctgctggatgtgtggagcacctgcagccagcccatctgtgccaagtggaccaggacagaggccgagggcagcaagaagagcctgagcagcgagggccaccacatggacctgcctgatgtggtgatcaccagcctgcccggcagcggggctgagatcctgaagcagctgttcttcaacagcagtgacttcctgtacatccgggtgcccacagcctacatcgacatccctgagacagagctggagattgacagctttgtggatgcctgtgagtggaaggtgtctgacatccgcagcggccacttccggctgctgcggggctggctgcagagcctggtgcaggacaccaagctgcacctgcagaacatccacctgcacgagcccaacagaggcaagctggcccagtactttgccatgaacaaggacaagaagaggaagttcaagagaagagagagcctgcctgagcagaggagccagatgaagggggcctttgacagagatgctgagtacatccgggccctgcggcggcacctggtgtactaccccagcgcccggcctgtgctgagcctgagcagcggctcctggaccctgaagctgcacttcttccaggaggtgctgggcgcctccatgagggccctgtacatcgtgcgggacccccgggcctggatctacagcatgctgtacaacagcaagcccagcctgtacagcctgaagaatgtgcctgagcacctggccaagctgttcaagattgagggcggcaagggcaagtgcaacctgaacagcggctacgcctttgaatatgagcccctgaggaaggagctgagcaagagcaagagcaatgctgtgtccctgctgagccacctgtggctggccaacacagctgctgccctgcgcatcaacacagacctgctgcccaccagctaccagctggtgaagtttgaggacatcgtgcacttcccccagaagaccacagagcgcatctttgccttcctgggcatccccctgagccctgccagcctgaaccagatcctgtttgccaccagcaccaacctcttctacctgccctatgaaggagagatcagccccaccaacaccaacgtgtggaagcagaacctgcccagagatgagatcaagctgattgagaacatctgctggaccctgatggaccggctgggctaccccaagttcatggactag

SEQ ID NO: 149851 - DNA, 3639 bp, synthetic construct
  misc_feature 1..3639: note = Description of Artificial Sequence: Synthetic coding sequence
  source 1..3639: mol_type = other DNA
atggccctgatgttcaccggccacctgctcttcctggccctgctgatgtttgccttcagcacctttgaggagagcgtgagcaactacagcgagtgggccgtgttcacagatgacatcgaccagttcaagacccagaaggtgcaggacttccggcccaaccagaagctgaagaagtccatgctgcaccccagcctgtactttgatgctggggagatccaggccatgaggcagaagagccgggccagccacctgcacctgttccgggccatccgctctgctgtgacagtgatgctgagcaaccccacctactacctgcccccacccaagcatgctgactttgctgccaagtggaatgagatctacggcaacaacctgccccccctggccctgtactgcctgctgtgcccagaggacaaggtggcctttgaatttgtgctggagtacatggacaggatggtgggctacaaggactggctggtggagaatgcccctggagatgaggtgcccatcggccacagcctgactggatttgccacagcctttgacttcctgtacaacctgctggacaaccaccggcggcagaagtacctggagaagatctgggtgatcacagaggagatgtatgagtacagcaaggtgcgctcctggggcaagcagctgctgcacaaccaccaggccaccaacatgattgccctgctgaccggggccctggtgactggagtggacaagggcagcaaggccaacatctggaagcaggccgtggtggatgtgatggagaagaccatgttcctgctgaaccacatcgtggatggcagcctggatgagggcgtggcctacggcagctacacagccaagtctgtgacccagtatgtgttcctggcccagaggcacttcaacatcaacaacctggacaacaactggctgaagatgcacttctggttctactatgccaccctgctgcccggcttccagaggacagtgggcattgctgacagcaactacaactggttctacggccctgagagccagctggtgttcctggacaagttcatcctgaagaatggagctggcaactggctggcccagcagatcaggaagcaccggcccaaggatggccccatggtgcccagcacagcccagcgctggagcaccctgcacacagagtacatctggtatgacccccagctgaccccccagcccccagctgactatggaacagccaagatccacaccttccccaactggggcgtggtgacctacggggccggcctgcccaacacccagaccaacacctttgtgtccttcaagagcggcaagctgggcggccgggctgtgtatgacatcgtgcacttccagccctacagctggattgatggctggaggagcttcaaccctggccacgagcacccagaccagaacagcttcacctttgcccccaacggccaggtgtttgtgtctgaggccctgtatggccccaagctgagccacctgaacaacgtgctggtgtttgcccccagccccagcagccagtgcaacaagccctgggagggccagctgggagaatgtgcccagtggctgaagtggacaggagaggaggtgggagatgctgctggggagatcatcacagccagccagcacggggagatggtgtttgtgtctggagaggccgtgtctgcctacagcagcgccatgaggctgaagtctgtgtaccgggccctgctgctgctgaacagccagaccctgctggtggtggaccacatcgagcggcaggaggacagccccatcaacagcgtgtctgccttcttccacaacctggacatcgacttcaagtacatcccctacaagttcatgaaccgctacaatggagccatgatggatgtgtgggatgcccactacaagatgttctggtttgaccaccacggcaacagccccatggccagcatccaggaggccgagcaggccgctgagttcaagaagcgctggacccagtttgtgaatgtgaccttccagatggagcccaccatcacccgcatcgcctacgtgttctacggcccctacatcaacgtgagcagctgccgcttcatcgacagcagcaaccctggcctgcagatcagcctgaatgtgaacaacacagaacatgtggtgtccatcgtgacagactaccacaacctgaagacccgcttcaactacctgggctttggaggctttgcctctgtggccgaccagggccagatcacccgcttcggcctgggcacccaggccatcgtgaagcctgtgagacatgaccgcatcatcttccccttcggcttcaagttcaacattgctgtgggcctcatcctgtgcatcagcctggtgatcctgaccttccagtggaggttctacctgtccttcaggaagctgatgcgctggatcctgatcctggtgattgccctgtggttcatcgagctgctggatgtgtggagcacctgcagccagcccatctgtgccaagtggaccaggacagaggccgagggcagcaagaagagcctgagcagcgagggccaccacatggacctgcctgatgtggtgatcaccagcctgcccggcagcggggctgagatcctgaagcagctgttcttcaacagcagtgacttcctgtacatccgggtgcccacagcctacatcgacatccctgagacagagctggagattgacagctttgtggatgcctgtgagtggaaggtgtctgacatccgcagcggccacttccggctgctgcggggctggctgcagagcctggtgcaggacaccaagctgcacctgcagaacatccacctgcacgagcccaacagaggcaagctggcccagtactttgccatgaacaaggacaagaagaggaagttcaagagaagagagagcctgcctgagcagaggagccagatgaagggggcctttgacagagatgctgagtacatccgggccctgcggcggcacctggtgtactaccccagcgcccggcctgtgctgagcctgagcagcggctcctggaccctgaagctgcacttcttccaggaggtgctgggcgcctccatgagggccctgtacatcgtgcgggacccccgggcctggatctacagcatgctgtacaacagcaagcccagcctgtacagcctgaagaatgtgcctgagcacctggccaagctgttcaagattgagggcggcaagggcaagtgcaacctgaacagcggctacgcctttgaatatgagcccctgaggaaggagctgagcaagagcaagagcaatgctgtgtccctgctgagccacctgtggctggccaacacagctgctgccctgcgcatcaacacagacctgctgcccaccagctaccagctggtgaagtttgaggacatcgtgcacttcccccagaagaccacagagcgcatctttgccttcctgggcatccccctgagccctgccagcctgaaccagatcctgtttgccaccagcaccaacctcttctacctgccctatgaaggagagatcagccccaccaacaccaacgtgtggaagcagaacctgcccagagatgagatcaagctgattgagaacatctgctggaccctgatggaccggctgggctaccccaagttcatggactag

SEQ ID NO: 149852 - DNA, 606 bp, synthetic construct
  misc_feature 1..606: note = Description of Artificial Sequence: Synthetic coding sequence
  source 1..606: mol_type = other DNA
atggacctgagcctgctgtgggtgctgctgcccctggtgaccatggcctggggccagtacggggactatggctacccctaccagcagtaccatgactacagtgatgatggctgggtgaacctgaaccggcagggcttctcctaccagtgcccccagggccaggtgattgtggccgtgcgcagcatcttcagcaagaaggagggcagtgaccggcagtggaactatgcctgcatgcccaccccccagagcctgggggagcccacagagtgctggtgggaggagatcaacagagctggcatggagtggtaccagacctgcagcaacaacggcctggtggccggcttccagagccgctactttgagagcgtgctggaccgggagtggcagttctactgctgccgctacagcaagcgctgcccctacagctgctggctgaccacagagtacccaggccactatggagaggagatggacatgatctcctacaactatgactactacatccggggggccaccaccaccttctctgctgtggagcgggaccggcagtggaagttcatcatgtgcaggatgacagaatatgactgtgaatttgccaacgtgtag

SEQ ID NO: 149853 - DNA, 333 bp, synthetic construct
  misc_feature 1..333: note = Description of Artificial Sequence: Synthetic coding sequence
  source 1..333: mol_type = other DNA
atgaggttcatgaccctgctcttcctgacagccctggccggggccctggtgtgtgcctatgaccctgaggccgccagcgcccctggcagcggcaacccctgccacgaggccagcgctgcccagaaggaaaatgctggagaagatcctggcctggcccggcaggcccccaagcccaggaagcagaggagcagcctgctggagaagggcctggatggagccaagaaggctgtgggcggcctgggcaagctgggcaaggatgctgtggaggacctggagagcgtgggcaaaggagctgtgcatgatgtgaaggatgtgctggacagcgtgctgtag

SEQ ID NO: 149854 - DNA, 1191 bp, synthetic construct
  misc_feature 1..1191: note = Description of Artificial Sequence: Synthetic coding sequence
  source 1..1191: mol_type = other DNA
atggccctgctgaccaacctgctgcccctgtgctgcctggccctgctggccctgcctgcccagagctgtggccctggccggggccctgtgggcagaagaagatatgccaggaagcagctggtgcccctgctgtacaagcagtttgtgcctggggtgcctgagaggaccctgggcgccagcggccctgctgagggccgggtggcccggggcagcgagcgcttccgggacctggtgcccaactacaacccagacatcatcttcaaggatgaagaaaattctggagctgaccggctgatgacagagcgctgcaaggagcgggtgaatgccctggccatcgctgtgatgaacatgtggccaggagtgcggctgcgggtgacagagggctgggatgaagatggccaccacgcccaggacagcctgcactatgagggccgggccctggacatcaccaccagtgaccgggacaggaacaagtatggcctgctggcccggctggccgtggaggccggctttgactgggtgtactatgagagcagaaatcatgtgcacgtgtctgtgaaggctgacaacagcctggccgtgcgggccggcggctgcttccctggaaatgccaccgtgcggctgtggagcggggagaggaagggcctgcgggagctgcacagaggagactgggtgctggccgcagatgccagcggccgggtggtgcccacccctgtgctgctcttcctggaccgggacctgcagaggcgggccagctttgtggccgtggagacagagtggccacccaggaagctgctgctgaccccctggcacctggtgtttgctgcccggggccctgccccagcccctggggactttgcccctgtgtttgcccggcggctgcgggccggggacagcgtgctggcccctggaggagatgccctgcggcctgcccgggtggcccgggtggcccgggaggaggccgtgggcgtgtttgcccccctgacagcccacggcaccctgctggtgaatgatgtgctggccagctgctatgctgtgctggagagccaccagtgggcccaccgggcctttgcccccctgcggctgctgcacgccctgggcgccctgctgcctggaggagctgtgcagcccaccggcatgcactggtacagccggctgctgtaccgcctggccgaggagctgctgggctag

SEQ ID NO: 149855 - DNA, 1413 bp, synthetic construct
  misc_feature 1..1413: note = Description of Artificial Sequence: Synthetic coding sequence
  source 1..1413: mol_type = other DNA
atgagccaggcctacagcagcagccagagggtgtcctcctacagaaggaccttcggcggggcccctggcttccccctgggcagccccctgagcagccctgtgttcccccgggccggcttcggcagcaagggcagcagcagctctgtgaccagccgggtgtaccaggtgtccaggaccagcggcggggccggcggcctgggcagcctgcgggccagccggctgggcaccaccaggacccccagcagctatggagctggggagctgctggacttcagcctggctgatgctgtgaaccaggagttcctgaccaccaggaccaatgagaaggtggagctgcaggagctgaatgacagatttgccaactacatcgagaaggtgcgcttcctggagcagcagaatgctgccctggccgctgaggtgaaccggctgaagggccgggagcccaccagggtggccgagctgtatgaggaggagctgcgggagctgcggcggcaggtggaggtgctgaccaaccagagggcccgggtggatgtggagcgggacaacctgctggatgacctgcagaggctgaaggccaagctgcaggaggagatccagctgaaggaggaggccgagaacaacctggccgccttccgggcagatgtggatgctgccaccctggccagaattgacctggagaggagaattgagagcctgaatgaggagatcgccttcctgaagaaggtgcatgaggaggagatccgggagctgcaggcccagctgcaggagcagcaggtgcaggtggagatggacatgagcaagccagacctgacagctgccctgcgggacatccgggcccagtatgagaccatcgccgccaagaacatcagcgaggccgaggagtggtacaagagcaaggtgtctgacctgacccaggccgccaacaagaacaatgatgccctgcggcaggccaagcaggagatgatggagtaccgccaccagatccagagctacacctgtgaaattgatgccctgaagggcaccaatgacagcctgatgaggcagatgagggagctggaggacagatttgccagcgaggccagcggctaccaggacaacatcgcccggctggaggaggagatccgccacctgaaggatgagatggcccggcacctgcgggagtaccaggacctgctgaatgtgaagatggccctggatgtggagatcgccacctacaggaagctgctggagggggaggagagccgcatcaacctgcccatccagacctacagcgccctgaacttccgggagaccagccctgagcagaggggcagcgaggtgcacaccaagaagacagtgatgatcaagaccatcgagaccagagatggagaggtggtgtctgaggccacccagcagcagcacgaggtgctgtag

SEQ ID NO: 149856 - DNA, 2523 bp, synthetic construct
  misc_feature 1..2523: note = Description of Artificial Sequence: Synthetic coding sequence
  source 1..2523: mol_type = other DNA
atggccctggccagcgctgcccctggcagcatcttctgcaagcagctgctcttcagcctgctggtgctgaccctgctgtgtgatgcctgccagaaggtgtacctgcgggtgcccagccacctgcaggccgagaccctggtgggcaaggtgaacctggaggagtgcctgaagagcgccagcctcatccgcagcagtgaccctgccttccgcatcctggaggatggcagcatctacaccacccatgacctgatcctgagcagcgagaggaagagcttcagcatcttcctgagtgatggccagaggcgggagcagcaggagatcaaggtggtgctgagcgcccgggagaacaagagccccaagaagaggcacaccaaggacacagccctgaagaggagcaagaggcgctgggcccccatcccagccagcctgatggagaacagcctgggccccttcccccagcacgtgcagcagatccagagtgatgctgcccagaactacaccatcttctacagcatcagcggccctggggtggacaaggagcccttcaacctcttctacatcgagaaggacacaggagacatcttctgcaccaggagcattgaccgggagaagtatgagcagtttgccctgtatggctacgccaccacagcagatggctacgcccctgagtaccccctgcccctcatcatcaagattgaagatgacaatgacaatgccccctactttgagcaccgggtgaccatcttcaccgtgcctgagaactgccgcagcggcacctctgtgggcaaggtgacagccacagacctggatgagccagacaccctgcacacccggctgaagtacaagatcctgcagcagatcccagaccaccccaagcacttcagcatccacccagacaccggggtcatcaccaccaccacccccttcctggaccgggagaagtgtgacacctaccagctgatcatggaggtgcgggacatgggcggccagcccttcggcctcttcaacacaggcaccatcaccatcagcctggaggatgaaaatgacaaccccccatccttcacagagaccagctatgtgacagaggtggaggagaacagaattgatgtggagatcctgaggatgaaggtgcaggaccaggacctgcccaacaccccccacagcaaggctgtgtacaagatcctgcagggcaatgaaaatggaaacttcatcatcagcacagaccccaacaccaatgaaggagtgctgtgtgtggtgaagcccctgaactatgaggtgaaccggcaggtgatcctgcaggtgggcgtcatcaatgaggcccagttcagcaaggccgccagcagccagacccccaccatgtgcaccaccaccgtgacagtgaagatcatcgacagtgatgagggccctgagtgccacccccctgtgaaggtgatccagagccaggacggcttccctgctggccaggagctgctgggctacaaggccctggaccctgagatcagcagcggggagggcctgcgctaccagaagctgggagatgaggacaactggtttgagatcaaccagcacactggagacctgcggaccctgaaggtgctggaccgggagagcaagtttgtgaagaacaaccagtacaacatctctgtggtggccgtggatgctgtgggccgcagctgcaccggcaccctggtggtgcacctggatgactacaatgaccacgccccccagattgacaaggaggtgaccatctgccagaacaatgaagattttgctgtgctgaagcctgtggaccctgatggcccagaaaatggaccacccttccagttcttcctggacaacagcgccagcaagaactggaacatcgaggagaaggatggcaagacagccatcctgcggcagaggcagaacctggactacaactactacagcgtgcccatccagatcaaggacagacatggcctggtggccacccacatgctgactgtgcgggtgtgtgactgcagcaccccatctgagtgcaggatgaaggacaagagcaccagagatgtgcggcccaacgtcatcctgggccgctgggccatcctggccatggtgctgggctctgtgctgctgctgtgcatcctcttcacctgcttctgtgtgacagccaagaggacagtgaagaagtgcttccctgaggacatcgcccagcagaacctgattgtgagcaacacagagggccctggagaggaggtgacagaggccaacatccggctgcccatgcagaccagcaacatctgtgacacctccatgtctgtgggcaccgtgggcggccagggcatcaagacccagcagagctttgagatggtgaagggcggctacaccctggacagcaacaagggcggcggccaccagaccctggagagcgtgaagggcgtgggccagggcgacaccggccgctatgcctacacagactggcagagcttcacccagccccggctgggggaggagagcatccggggccacaccctcatcaagaactag

SEQ ID NO: 149857 - DNA, 2685 bp, synthetic construct
  misc_feature 1..2685: note = Description of Artificial Sequence: Synthetic coding sequence
  source 1..2685: mol_type = other DNA
atggccctggccagcgctgcccctggcagcatcttctgcaagcagctgctcttcagcctgctggtgctgaccctgctgtgtgatgcctgccagaaggtgtacctgcgggtgcccagccacctgcaggccgagaccctggtgggcaaggtgaacctggaggagtgcctgaagagcgccagcctcatccgcagcagtgaccctgccttccgcatcctggaggatggcagcatctacaccacccatgacctgatcctgagcagcgagaggaagagcttcagcatcttcctgagtgatggccagaggcgggagcagcaggagatcaaggtggtgctgagcgcccgggagaacaagagccccaagaagaggcacaccaaggacacagccctgaagaggagcaagaggcgctgggcccccatcccagccagcctgatggagaacagcctgggccccttcccccagcacgtgcagcagatccagagtgatgctgcccagaactacaccatcttctacagcatcagcggccctggggtggacaaggagcccttcaacctcttctacatcgagaaggacacaggagacatcttctgcaccaggagcattgaccgggagaagtatgagcagtttgccctgtatggctacgccaccacagcagatggctacgcccctgagtaccccctgcccctcatcatcaagattgaagatgacaatgacaatgccccctactttgagcaccgggtgaccatcttcaccgtgcctgagaactgccgcagcggcacctctgtgggcaaggtgacagccacagacctggatgagccagacaccctgcacacccggctgaagtacaagatcctgcagcagatcccagaccaccccaagcacttcagcatccacccagacaccggggtcatcaccaccaccacccccttcctggaccgggagaagtgtgacacctaccagctgatcatggaggtgcgggacatgggcggccagcccttcggcctcttcaacacaggcaccatcaccatcagcctggaggatgaaaatgacaaccccccatccttcacagagaccagctatgtgacagaggtggaggagaacagaattgatgtggagatcctgaggatgaaggtgcaggaccaggacctgcccaacaccccccacagcaaggctgtgtacaagatcctgcagggcaatgaaaatggaaacttcatcatcagcacagaccccaacaccaatgaaggagtgctgtgtgtggtgaagcccctgaactatgaggtgaaccggcaggtgatcctgcaggtgggcgtcatcaatgaggcccagttcagcaaggccgccagcagccagacccccaccatgtgcaccaccaccgtgacagtgaagatcatcgacagtgatgagggccctgagtgccacccccctgtgaaggtgatccagagccaggacggcttccctgctggccaggagctgctgggctacaaggccctggaccctgagatcagcagcggggagggcctgcgctaccagaagctgggagatgaggacaactggtttgagatcaaccagcacactggagacctgcggaccctgaaggtgctggaccgggagagcaagtttgtgaagaacaaccagtacaacatctctgtggtggccgtggatgctgtgggccgcagctgcaccggcaccctggtggtgcacctggatgactacaatgaccacgccccccagattgacaaggaggtgaccatctgccagaacaatgaagattttgctgtgctgaagcctgtggaccctgatggcccagaaaatggaccacccttccagttcttcctggacaacagcgccagcaagaactggaacatcgaggagaaggatggcaagacagccatcctgcggcagaggcagaacctggactacaactactacagcgtgcccatccagatcaaggacagacatggcctggtggccacccacatgctgactgtgcgggtgtgtgactgcagcaccccatctgagtgcaggatgaaggacaagagcaccagagatgtgcggcccaacgtcatcctgggccgctgggccatcctggccatggtgctgggctctgtgctgctgctgtgcatcctcttcacctgcttctgtgtgacagccaagaggacagtgaagaagtgcttccctgaggacatcgcccagcagaacctgattgtgagcaacacagagggccctggagaggaggtgacagaggccaacatccggctgcccatgcagaccagcaacatctgtgacacctccatgtctgtgggcaccgtgggcggccagggcatcaagacccagcagagctttgagatggtgaagggcggctacaccctggacagcaacaagggcggcggccaccagaccctggagagcgtgaagggcgtgggccagggcgacaccggccgctatgcctacacagactggcagagcttcacccagccccggctgggggagaaggtgtacctgtgtggccaggatgaggagcacaagcactgtgaggactatgtgtgcagctacaactatgagggcaagggcagcctggccggctctgtgggctgctgcagcgaccggcaggaggaggagggcctggagttcctggaccacctggagcccaagttccgcaccctggccaagacctgcatcaagaagtag

SEQ ID NO: 149858 - DNA, 2691 bp, synthetic construct
  misc_feature 1..2691: note = Description of Artificial Sequence: Synthetic coding sequence
  source 1..2691: mol_type = other DNA
atggctgctgctggccccaggagatctgtgagaggagctgtgtgcctgcacctgctgctgaccctggtgatcttcagccgggccggggaggcctgcaagaaggtgatcctgaatgtgcccagcaagctggaggccgacaagatcatcggccgggtgaacctggaggagtgcttccgctctgctgacctgatccgcagcagtgaccctgacttccgggtgctgaatgatggctctgtgtacacagcccgggctgtggccctgagtgacaagaagaggagcttcaccatctggctgagtgacaagaggaagcagacccagaaggaggtgacagtgctgctggagcaccagaagaaggtgtccaagaccaggcacacccgggagaccgtgctgcggcgggccaagaggcgctgggcccccatcccctgcagcatgcaggagaacagcctgggccccttccccctcttcctgcagcaggtggagagtgatgctgcccagaactacaccgtcttctacagcatcagcggccggggcgtggacaaggagcccctgaacctcttctacatcgagcgggacaccggcaacctcttctgcaccaggcctgtggaccgggaggagtatgatgtgtttgacctgattgcctatgccagcacagcagatggctacagcgctgacctgcccctgcccctgcccatccgggtggaggatgaaaatgacaaccaccctgtgttcacagaggccatctacaactttgaggtgctggagagcagccggcccggcaccaccgtgggcgtggtgtgtgccacagacagagatgagccagacaccatgcacacccggctgaagtacagcatcctgcagcagacccccaggagccctggcctcttctctgtgcaccccagcactggagtcatcaccaccgtgagccactacctggaccgggaggtggtggacaagtacagcctcatcatgaaggtgcaggacatggatggccagttcttcggcctcatcggcaccagcacctgcatcatcaccgtgacagacagcaatgacaatgcccccaccttccggcagaatgcctatgaggcctttgtggaggagaatgccttcaacgtggagatcctgcgcatccccatcgaggacaaggacctgatcaacacagccaactggagggtgaacttcaccatcctgaagggaaatgaaaatggccacttcaagatcagcacagacaaggagaccaatgaaggagtgctgtctgtggtgaagcccctgaactatgaagaaaatcggcaggtgaacctggagattggagtgaacaatgaggccccctttgcccgggacatcccccgggtgacagccctgaacagagccctggtgacagtgcacgtgcgggacctggatgagggccctgagtgcaccccagctgcccagtatgtgcgcatcaaggagaacctggccgtgggcagcaagatcaatggctacaaggcctatgaccctgaaaatagaaatggaaatggcctgcgctacaagaagctgcatgaccccaagggctggatcaccattgatgagatcagcggcagcatcatcaccagcaagatcctggaccgggaggtggagacccccaagaatgagctgtacaacatcaccgtgctggccatcgacaaggatgacaggagctgcaccggcaccctggccgtgaacattgaagatgtgaatgacaaccccccagagatcctgcaggagtatgtggtgatctgcaagcccaagatgggctacacagacatcctggccgtggaccctgatgagcctgtgcacggggcccccttctacttcagcctgcccaacaccagccctgagatcagccggctgtggagcctgaccaaggtgaatgacacagctgcccggctgagctaccagaagaatgccggcttccaggagtacaccatccccatcaccgtgaaggaccgggccggccaggccgccaccaagctgctgcgggtgaacctgtgtgagtgcacccaccccacccagtgccgggccaccagccgcagcactggagtcatcctgggcaagtgggccatcctggccatcctgctgggcatcgccctgctcttctctgtgctgctgaccctggtgtgtggggtgtttggagccaccaagggcaagcgcttccctgaggacctggcccagcagaacctgatcatcagcaacacagaggcccctggagatgacagagtgtgcagcgccaacggcttcatgacccagaccaccaacaacagcagccagggcttctgtggcaccatgggcagcggcatgaagaatggaggccaggagaccatcgagatgatgaagggcggcaaccagaccctggagagctgcagaggagctggccaccaccacaccctggacagctgccggggcggccacacagaggtggacaactgccgctacacctacagcgagtggcacagcttcacccagccccggctgggggagaagctgcaccgctgcaaccagaatgaagacaggatgcccagccaggactatgtgctgacctacaactatgagggccggggcagccctgctggctctgtgggctgctgcagcgagaagcaggaggaggatggcctggacttcctgaacaacctggagcccaagttcatcaccctggccgaggcctgcaccaagaggtag

SEQ ID NO: 149859 - DNA, 2520 bp, synthetic construct
  misc_feature 1..2520: note = Description of Artificial Sequence: Synthetic coding sequence
  source 1..2520: mol_type = other DNA
atggctgctgctggccccaggagatctgtgagaggagctgtgtgcctgcacctgctgctgaccctggtgatcttcagccgggccggggaggcctgcaagaaggtgatcctgaatgtgcccagcaagctggaggccgacaagatcatcggccgggtgaacctggaggagtgcttccgctctgctgacctgatccgcagcagtgaccctgacttccgggtgctgaatgatggctctgtgtacacagcccgggctgtggccctgagtgacaagaagaggagcttcaccatctggctgagtgacaagaggaagcagacccagaaggaggtgacagtgctgctggagcaccagaagaaggtgtccaagaccaggcacacccgggagaccgtgctgcggcgggccaagaggcgctgggcccccatcccctgcagcatgcaggagaacagcctgggccccttccccctcttcctgcagcaggtggagagtgatgctgcccagaactacaccgtcttctacagcatcagcggccggggcgtggacaaggagcccctgaacctcttctacatcgagcgggacaccggcaacctcttctgcaccaggcctgtggaccgggaggagtatgatgtgtttgacctgattgcctatgccagcacagcagatggctacagcgctgacctgcccctgcccctgcccatccgggtggaggatgaaaatgacaaccaccctgtgttcacagaggccatctacaactttgaggtgctggagagcagccggcccggcaccaccgtgggcgtggtgtgtgccacagacagagatgagccagacaccatgcacacccggctgaagtacagcatcctgcagcagacccccaggagccctggcctcttctctgtgcaccccagcactggagtcatcaccaccgtgagccactacctggaccgggaggtggtggacaagtacagcctcatcatgaaggtgcaggacatggatggccagttcttcggcctcatcggcaccagcacctgcatcatcaccgtgacagacagcaatgacaatgcccccaccttccggcagaatgcctatgaggcctttgtggaggagaatgccttcaacgtggagatcctgcgcatccccatcgaggacaaggacctgatcaacacagccaactggagggtgaacttcaccatcctgaagggaaatgaaaatggccacttcaagatcagcacagacaaggagaccaatgaaggagtgctgtctgtggtgaagcccctgaactatgaagaaaatcggcaggtgaacctggagattggagtgaacaatgaggccccctttgcccgggacatcccccgggtgacagccctgaacagagccctggtgacagtgcacgtgcgggacctggatgagggccctgagtgcaccccagctgcccagtatgtgcgcatcaaggagaacctggccgtgggcagcaagatcaatggctacaaggcctatgaccctgaaaatagaaatggaaatggcctgcgctacaagaagctgcatgaccccaagggctggatcaccattgatgagatcagcggcagcatcatcaccagcaagatcctggaccgggaggtggagacccccaagaatgagctgtacaacatcaccgtgctggccatcgacaaggatgacaggagctgcaccggcaccctggccgtgaacattgaagatgtgaatgacaaccccccagagatcctgcaggagtatgtggtgatctgcaagcccaagatgggctacacagacatcctggccgtggaccctgatgagcctgtgcacggggcccccttctacttcagcctgcccaacaccagccctgagatcagccggctgtggagcctgaccaaggtgaatgacacagctgcccggctgagctaccagaagaatgccggcttccaggagtacaccatccccatcaccgtgaaggaccgggccggccaggccgccaccaagctgctgcgggtgaacctgtgtgagtgcacccaccccacccagtgccgggccaccagccgcagcactggagtcatcctgggcaagtgggccatcctggccatcctgctgggcatcgccctgctcttctctgtgctgctgaccctggtgtgtggggtgtttggagccaccaagggcaagcgcttccctgaggacctggcccagcagaacctgatcatcagcaacacagaggcccctggagatgacagagtgtgcagcgccaacggcttcatgacccagaccaccaacaacagcagccagggcttctgtggcaccatgggcagcggcatgaagaatggaggccaggagaccatcgagatgatgaagggcggcaaccagaccctggagagctgcagaggagctggccaccaccacaccctggacagctgccggggcggccacacagaggtggacaactgccgctacacctacagcgagtggcacagcttcacccagccccggctgggggaggagagcatccggggccacactggatag

SEQ ID NO: 149860 - DNA, 3150 bp, synthetic construct
  misc_feature 1..3150: note = Description of Artificial Sequence: Synthetic coding sequence
  source 1..3150: mol_type = other DNA
atggactggagcttcttccgggtggtggccatgctgttcatcttcctggtggtggtggaggtgaacagcgagttccgcatccaggtgcgggactacaacaccaagaatggcaccatcaagtggcacagcatccggcggcagaagcgggagtggatcaagtttgctgctgcctgccgggagggggaggacaacagcaagaggaaccccatcgccaagatccacagcgactgtgccgccaaccagcaggtgacctaccgcatcagcggcgtgggcatcgaccagcccccctacggcatcttcgtcatcaaccagaagacaggagagatcaacatcaccagcatcgtggaccgggaggtgacccccttcttcatcatctactgccgggccctgaacagcatgggccaggacctggagcggcccctggagctgcgggtgcgggtgctggacatcaatgacaacccccctgtgttctccatggccacctttgctggccagatcgaggagaacagcaatgccaacaccctggtgatgatcctgaatgccacagatgctgatgagcccaacaacctgaacagcaagatcgccttcaagatcatccggcaggagcccagcgacagccccatgttcatcatcaacagaaatactggagagatccgcaccatgaacaacttcctggaccgggagcagtatggccagtatgccctggccgtgcggggcagtgacagagatggaggagcagatggcatgtctgcagaatgtgagtgcaacatcaagatcctggatgtgaatgacaacatcccctacatggagcagagcagctacaccatcgagatccaggagaacaccctgaacagcaacctgctggagatccgggtgattgacctggatgaggagttcagcgccaactggatggctgtgatcttcttcatctctggaaatgaaggcaactggtttgaaattgagatgaatgaaagaacaaatgtgggcatcctgaaggtggtgaagcccctggactatgaggccatgcagagcctgcagctgagcattggagtgaggaacaaggccgagttccaccacagcatcatgagccagtacaagctgaaggccagcgccatctctgtgacagtgctgaatgtcatcgagggccctgtgttccggcccggcagcaagacctacgtggtgactggaaacatgggcagcaatgacaaggtgggggactttgtggccacagacctggacaccggccggcccagcaccaccgtgcgctacgtgatgggcaacaacccagctgacctgctggccgtggacagcaggacaggcaagctgaccctgaagaacaaggtgaccaaggagcagtacaacatgctgggcggcaagtaccagggcaccatcctgagcattgatgacaacctgcagaggacctgcaccggcaccatcaacatcaacatccagagctttggaaatgatgacaggaccaacacagagcccaacaccaagatcaccaccaacacaggccggcaggagagcaccagcagcaccaactatgacaccagcaccaccagcacagacagcagccaggtgtacagcagcgagcctggaaatggagccaaggacctgctgagtgacaacgtgcacttcggccctgctggcatcggcctgctgatcatgggcttcctggtgctgggcctggtgcccttcctgatgatctgctgtgactgtggcggggcccccaggtctgctgctggctttgagcctgtgcctgagtgcagtgatggagccatccacagctgggccgtggagggcccccagcctgagccccgggacatcaccaccgtcatcccccagatccccccagacaatgccaacatcattgaatgtattgacaacagcggcgtgtacaccaatgaatatggaggccgggagatgcaggacctgggcggcggggagaggatgacaggctttgagctgacagaaggagtgaagaccagcggcatgcctgagatctgccaggagtacagcggcaccctgcggaggaacagcatgagagaatgtcgggagggcggcctgaacatgaacttcatggagagctacttctgccagaaggcctatgcctatgcagatgaagatgagggccggcccagcaatgactgcctgctgatctatgacattgaaggagtgggcagccctgctggctctgtgggctgctgcagcttcatcggggaggacctggatgacagcttcctggacaccctgggccccaagttcaagaagctggccgacatcagcctgggcaaggagagctacccagacctggaccccagctggccaccccagagcacagagcctgtgtgcctgccccaggagacagagcctgtggtgtctggccacccccccatcagcccccacttcggcaccaccaccgtcatcagcgagagcacctaccccagcggccctggggtgctgcaccccaagcccatcctggaccccctgggctatggaaatgtgacagtgacagagagctacaccaccagtgacaccctgaagcccagcgtgcacgtgcatgacaacagacctgccagcaatgtggtggtgacagagcgggtggtgggccccatctctggagctgacctgcacggcatgctggagatgccagacctgagagatggcagcaatgtgattgtgacagagcgggtgattgcccccagcagcagcctgcccaccagcctgaccatccaccacccccgggagagcagcaatgtggtggtgacagagagggtcatccagcccaccagcggcatgattggcagcctgtccatgcaccctgagctggccaatgcccacaacgtcatcgtgacagagcgggtggtgtctggagctggggtgacaggcatcagcggcaccaccggcatcagcggcggcatcggcagcagcggcctggtgggcacctccatgggcgccggcagcggggccctgagcggggccggcatcagcggcggcggcatcggcctgagcagcctgggcggcacagccagcatcggccacatgaggagcagcagtgaccaccacttcaaccagaccatcggcagcgccagccccagcacagcccggagccgcatcaccaagtacagcacagtgcagtacagcaagtag

SEQ ID NO: 149861 - DNA, 3357 bp, synthetic construct
  misc_feature 1..3357: note = Description of Artificial Sequence: Synthetic coding sequence
  source 1..3357: mol_type = other DNA
atggcccggagccctggccgggcctatgccctgctgctgctgctgatctgcttcaacgtgggcagcggcctgcacctgcaggtgctgagcaccagaaatgaaaacaagctgctgcccaagcacccccacctggtgcggcagaagagggcctggatcacagcccctgtggccctgcgggagggggaggacctgagcaagaagaaccccatcgccaagatccacagcgacctggccgaggagcggggcctgaagatcacctacaagtacaccgggaagggcatcacagagcccccatttggcatctttgtgttcaacaaggacaccggggagctgaatgtgaccagcatcctggaccgggaggagacccccttcttcctgctgaccggctacgccctggatgcccggggcaacaacgtggagaagcccctggagctgcgcatcaaggtgctggacatcaatgacaatgaacctgtgttcacccaggatgtgtttgtgggctctgtggaggagctgtctgctgcccacaccctggtgatgaagatcaatgccacagatgctgatgagcccaacaccctgaacagcaagatctcctaccgcatcgtgtccctggagcccgcctacccacctgtgttctacctgaacaaggacacaggagagatctacaccacctctgtgaccctggaccgggaggagcacagcagctacaccctgactgtggaggccagagatggaaatggagaggtgacagacaagcctgtgaagcaggcccaggtgcagatccgcatcctggatgtgaatgacaacatccctgtggtggagaacaaggtgctggagggcatggtggaggagaaccaggtgaatgtggaggtgacccgcatcaaggtgtttgatgctgatgaaattggaagtgacaactggctggccaacttcacctttgccagcggaaatgaaggaggctacttccacattgaaacagatgcccagaccaatgaaggaattgtgaccctcatcaaggaggtggactatgaggagatgaagaacctggacttctctgtgattgtggccaacaaggccgccttccacaagagcatccgcagcaagtacaagcccacccccatccccatcaaggtgaaggtgaagaatgtgaaggagggcatccacttcaagagcagcgtcatcagcatctacgtgtctgagagcatggacaggagcagcaagggccagatcatcggcaacttccaggcctttgatgaggacaccggcctgcctgcccacgcccgctacgtgaagctggaggaccgggacaactggatctctgtggacagcgtgaccagcgagatcaagctggccaagctgcctgactttgagagccgctacgtgcagaatggcacctacacagtgaagatcgtggccatcagcgaggactaccccaggaagaccatcaccggcaccgtgctgatcaacgtggaggacatcaatgacaactgccccaccctcatcgagcctgtgcagaccatctgccatgatgctgaatatgtgaatgtgacagctgaggacctggatggccaccccaacagcggccccttctccttcagcgtcatcgacaagcccccaggcatggccgagaagtggaagatcgcccggcaggagagcacctctgtgctgctgcagcagagcgagaagaagctgggccgctctgagatccagttcctgatcagtgacaaccagggcttcagctgcccagagaagcaggtgctgaccctgactgtgtgtgagtgcctgcacggcagcggctgccgggaggcccagcacgacagctatgtgggcctgggccctgctgccatcgccctgatgatcctggccttcctgctgctgctgctggtgcccctgctgctgctgatgtgccactgtgggaaaggagccaagggcttcacccccatccctggcaccatcgagatgctgcacccctggaacaatgaaggagcccccccagaggacaaggtggtgcccagcttcctgcctgtggaccagggcggcagcctggtgggcagaaatggagtgggcggcatggccaaggaggccaccatgaagggcagcagcagcgccagcatcgtgaagggccagcacgagatgtctgagatggatggccgctgggaggagcacaggagcctgctgagcggccgggccacccagttcaccggggccaccggggccatcatgaccacagagaccaccaagacagcccgggccactggagccagccgggacatggccggggcccaggccgctgctgtggccctgaatgaggagttcctgaggaactacttcacagacaaggccgccagctacacagaggaggatgagaaccacacagccaaggactgcctgctggtgtacagccaggaggagacagagagcctgaatgccagcatcggctgctgcagcttcattgaaggagagctggatgaccgcttcctggatgacctgggcctgaagttcaagaccctggccgaggtgtgcctgggccagaagattgacatcaacaaggagattgagcagaggcagaagccagccacagagacctccatgaacacagccagccacagcctgtgtgagcagaccatggtgaacagcgagaacacctacagcagcggcagcagcttccctgtgcccaagagcctgcaggaggccaatgctgagaaggtgacccaggagatcgtgacagagaggtctgtgagcagccggcaggcccagaaggtggccacccccctgcctgaccccatggccagcagaaatgtcatcgccacagagaccagctatgtgacaggcagcaccatgccacccaccaccgtcatcctgggccccagccagccccagagcctcatcgtgacagagcgggtgtatgccccagccagcaccctggtggaccagccctatgccaatgaaggcaccgtggtggtgacagagagggtcatccagccccatggaggcggcagcaaccccctggagggcacccagcacctgcaggatgtgccctacgtgatggtgcgggagcgggagagcttcctggcccccagcagtggagtgcagcccaccctggccatgcccaacattgctgtgggccagaatgtgacagtgacagagcgggtgctggccccagccagcaccctgcagagcagctaccagatccccacagagaacagcatgacagccaggaacaccaccgtgtctggagctggggtgcccggccccctgcctgactttggcctggaggagagcggccacagcaacagcaccatcaccaccagcagcaccagggtgaccaagcacagcacagtgcagcacagctacagctag

SEQ ID NO: 149862 - DNA, 3123 bp, synthetic construct
  misc_feature 1..3123: note = Description of Artificial Sequence: Synthetic coding sequence
  source 1..3123: mol_type = other DNA
atggactggctgttcttcaggaacatctgcctgctgatcatcctgatggtggtgatggaggtgaacagcgagttcatcgtggaggtgaaggagtttgatattgaaaatggcaccaccaagtggcagacagtgcggcggcagaagcgggagtggatcaagtttgctgctgcctgccgggagggggaggacaacagcaagaggaaccccatcgccaagatccgcagtgactgtgagagcaaccagaagatcacctaccgcatcagcggcgtgggcatcgacaggcctccctatggagtcttcaccatcaaccccaggactggagagatcaacatcacctctgtggtggaccgggagatcacccccctcttcctgatctactgccgggccctgaacagcagaggagaggacctggagcggcccctggagctgcgggtgaaggtgatggacatcaatgacaatgcccctgtgttcagccagagcgtgtacacagccagcattgaggagaacagtgatgccaacaccctggtggtgaagctgtgtgccacagatgctgatgaggagaaccacctgaacagcaagatcgcctacaagatcgtgtcccaggagcccagcggggcccccatgttcatcctgaaccgctacacaggagaggtgtgcaccatgagcagcttcctggaccgggagcagcacagcatgtacaacctggtggtgcggggcagtgacagagatggagctgctgatggcctgagcagtgaatgtgactgccgcatcaaggtgctggatgtgaatgacaacttccccaccctggagaagaccagctacagcgccagcattgaggagaactgcctgagcagcgagctgatccggctgcaggccatcgacctggatgaggagggcacagacaactggctggcccagtacctgatcctgtctggaaatgatggcaactggtttgacatccagacagacccccagaccaatgaaggcatcctgaaggtggtgaagatgctggactatgagcaggcccccaacatccagctgagcattggagtgaagaaccaggccgacttccactacagcgtggccagccagttccagatgcaccccacccctgtgcgcatccaggtggtggatgtgcgggagggccctgccttccaccccagcaccatggccttctctgtgcgggagggcatcaagggcagcagcctgctgaactacgtgctgggcacctacacagccatcgacctggacaccggcaacccagccacagatgtgcgctacatcattggacatgatgctggctcctggctgaagattgacagcaggactggagagatccagttcagccgggagtttgacaagaagagcaagtacatcatcaatggcatctacacagctgagatcctggccattgatgatggcagcggcaagacagccaccggcaccatctgcatcgaggtgcctgacatcaatgactactgccccaacatcttccctgagaggaggaccatctgcatcgacagccccagcgtgctgatctctgtgaatgagcacagctatggcagccccttcaccttctgtgtggtggatgagcccccaggcattgctgacatgtgggatgtgcgcagcaccaatgccaccagcgccatcctgacagccaagcaggtgctgagccctggcttctatgagatccccatcctggtgaaggacagctacaacagagcctgtgagctggcccagatggtgcagctgtatgcctgtgactgtgatgacaaccacatgtgcctggacagcggggctgctggcatctacacagaggacatcactggagacacctacggccctgtgacagaggaccaggccggcgtgtccaatgtgggcctgggccctgctggcatcggcatgatggtgctgggcatcctgctgctgatcctggcccccctgctgctgctgctgtgctgctgcaagcagaggcagcctgagggcctgggcaccaggtttgcccctgtgcctgagggcggggagggcgtgatgcagagctggagaattgaaggagcccacccagaagatagagatgtgagcaacatctgtgcccccatgacagccagcaacacccaggacaggatggacagcagcgagatctacaccaacacctacgccgccggcggcaccgtggagggcggcgtgtctggagtggagctgaacacaggcatgggcacagctgtgggcctgatggctgctggagctgctggggccagcggggccgccaggaagaggagcagcaccatgggcaccctgcgggactatgcagatgctgacatcaacatggccttcctggacagctacttcagcgagaaggcctatgcctatgcagatgaagatgagggccggcctgccaatgactgcctgctgatctatgaccacgagggcgtgggcagccctgtgggcagcatcggctgctgctcctggatcgtggatgacctggatgagagctgcatggagaccctggaccccaagttccgcaccctggccgagatctgcctgaacacagaaattgagcccttccccagccaccaggcctgcatccccatcagcacagacctgcccctgctgggccccaactactttgtgaatgaatcttctggcctgacccccagcgaggtggagttccaggaggagatggccgccagcgagcctgtggtgcacggggacatcatcgtgacagagacctatggaaatgctgacccctgtgtgcagcccaccaccatcatctttgacccccagctggcccccaacgtggtggtgacagaggccgtgatggcccctgtgtatgacatccagggcaacatctgtgtgcctgctgagctggccgactacaacaacgtcatctatgcagagcgggtgctggccagccctggggtgcctgacatgagcaacagcagcaccacagagggctgcatgggccctgtgatgagcggcaacatcctggtgggccctgagatccaggtgatgcagatgatgagcccagacctgcccatcggccagacagtgggcagcaccagccccatgaccagccgccaccgggtgacccgctacagcaacatccactacacccagcagtag

SEQ ID NO: 149863 - DNA, 3180 bp, synthetic construct
  misc_feature 1..3180: note = Description of Artificial Sequence: Synthetic coding sequence
  source 1..3180: mol_type = other DNA
atggactggctgttcttcaggaacatctgcctgctgatcatcctgatggtggtgatggaggtgaacagcgagttcatcgtggaggtgaaggagtttgatattgaaaatggcaccaccaagtggcagacagtgcggcggcagaagcgggagtggatcaagtttgctgctgcctgccgggagggggaggacaacagcaagaggaaccccatcgccaagatccgcagtgactgtgagagcaaccagaagatcacctaccgcatcagcggcgtgggcatcgacaggcctccctatggagtcttcaccatcaaccccaggactggagagatcaacatcacctctgtggtggaccgggagatcacccccctcttcctgatctactgccgggccctgaacagcagaggagaggacctggagcggcccctggagctgcgggtgaaggtgatggacatcaatgacaatgcccctgtgttcagccagagcgtgtacacagccagcattgaggagaacagtgatgccaacaccctggtggtgaagctgtgtgccacagatgctgatgaggagaaccacctgaacagcaagatcgcctacaagatcgtgtcccaggagcccagcggggcccccatgttcatcctgaaccgctacacaggagaggtgtgcaccatgagcagcttcctggaccgggagcagcacagcatgtacaacctggtggtgcggggcagtgacagagatggagctgctgatggcctgagcagtgaatgtgactgccgcatcaaggtgctggatgtgaatgacaacttccccaccctggagaagaccagctacagcgccagcattgaggagaactgcctgagcagcgagctgatccggctgcaggccatcgacctggatgaggagggcacagacaactggctggcccagtacctgatcctgtctggaaatgatggcaactggtttgacatccagacagacccccagaccaatgaaggcatcctgaaggtggtgaagatgctggactatgagcaggcccccaacatccagctgagcattggagtgaagaaccaggccgacttccactacagcgtggccagccagttccagatgcaccccacccctgtgcgcatccaggtggtggatgtgcgggagggccctgccttccaccccagcaccatggccttctctgtgcgggagggcatcaagggcagcagcctgctgaactacgtgctgggcacctacacagccatcgacctggacaccggcaacccagccacagatgtgcgctacatcattggacatgatgctggctcctggctgaagattgacagcaggactggagagatccagttcagccgggagtttgacaagaagagcaagtacatcatcaatggcatctacacagctgagatcctggccattgatgatggcagcggcaagacagccaccggcaccatctgcatcgaggtgcctgacatcaatgactactgccccaacatcttccctgagaggaggaccatctgcatcgacagccccagcgtgctgatctctgtgaatgagcacagctatggcagccccttcaccttctgtgtggtggatgagcccccaggcattgctgacatgtgggatgtgcgcagcaccaatgccaccagcgccatcctgacagccaagcaggtgctgagccctggcttctatgagatccccatcctggtgaaggacagctacaacagagcctgtgagctggcccagatggtgcagctgtatgcctgtgactgtgatgacaaccacatgtgcctggacagcggggctgctggcatctacacagaggacatcactggagacacctacggccctgtgacagaggaccaggccggcgtgtccaatgtgggcctgggccctgctggcatcggcatgatggtgctgggcatcctgctgctgatcctggcccccctgctgctgctgctgtgctgctgcaagcagaggcagcctgagggcctgggcaccaggtttgcccctgtgcctgagggcggggagggcgtgatgcagagctggagaattgaaggagcccacccagaagatagactcttcagcgcctatgccctgcccggcggcggcggcacagcagatggcggcggctctgtgctgggccgctgtgccctgcaggccaccccagccctgctgaaccagcacccccccttcagcgagatctacaccaacacctatgctgctgggggcaccgtggagggcggcgtgtctggagtggagctgaacacaggcatgggcacagctgtgggcctgatggccgccggggctgctggggccagcggggccgccaggaagaggagcagcaccatgggcaccctgcgggactatgcagatgctgacatcaacatggccttcctggacagctacttcagcgagaaggcctatgcctatgcagatgaagatgagggccgcccagccaatgactgcctgctgatctatgaccatgaaggagtgggcagccctgtgggcagcatcggctgctgctcctggatcgtggatgacctggatgagagctgcatggagaccctggaccccaagttccgcaccctggccgagatctgcctgaacacagaaattgagcccttccccagccaccaggcctgcatccccatcagcacagacctgcccctgctgggccccaactactttgtgaatgaaagcagcggcctgaccccatctgaggtggagttccaggaggagatggccgccagcgagcctgtggtgcatggagacatcatcgtgacagagacctatggaaatgctgacccctgtgtgcagcccaccaccatcatctttgacccccagctggccccaaatgtggtggtgacagaagctgtgatggcccctgtgtatgacatccagggcaacatctgtgtgcctgctgagctggccgactacaacaacgtcatctatgcagagcgggtgctggccagccctggggtgcctgacatgagcaacagcagcaccacagagggctgcatgggccctgtgatgagcggcaacatcctggtgggccctgagatccaggtgatgcagatgatgagcccagacctgcccatcggccagacagtgggcagcaccagccccatgaccagccgccaccgggtgacccgctacagcaacatccactacacccagcagtag

SEQ ID NO: 149864 - DNA, 498 bp, synthetic construct
  misc_feature 1..498: note = Description of Artificial Sequence: Synthetic coding sequence
  source 1..498: mol_type = other DNA
atggccagcggcgtgcaggtggctgatgaggtgtgccgcatcttctatgacatgaaggtgaggaagtgcagcaccccagaggagatcaagaagaggaagaaggctgtgatcttctgcctgtctgctgacaagaagtgcatcatcgtggaggagggcaaggagatcctggtgggagatgtgggcgtgaccatcacagaccccttcaagcactttgtgggcatgctgcctgagaaggactgccgctatgccctgtatgatgccagctttgagaccaaggagagcaggaaggaggagctgatgttcttcctgtgggcccctgagctggcccccctgaagagcaagatgatctatgccagcagcaaggatgccatcaagaagaagttccagggcatcaagcatgagtgccaggccaacggccctgaggacctgaacagagcctgcatcgccgagaagctgggcggcagcctgattgtggcctttgagggctgccctgtgtag

SEQ ID NO: 149865 - DNA, 447 bp, synthetic construct
  misc_feature 1..447: note = Description of Artificial Sequence: Synthetic coding sequence
  source 1..447: mol_type = other DNA
atgaaggtgaggaagtgcagcaccccagaggagatcaagaagaggaagaaggccgtcatcttctgcctgtctgctgacaagaagtgcatcatcgtggaggagggcaaggagatcctggtgggagatgtgggcgtgaccatcacagaccccttcaagcactttgtgggcatgctgcctgagaaggactgccgctatgccctgtatgatgccagctttgagaccaaggagagcaggaaggaggagctgatgttcttcctgtgggcccctgagctggcccccctgaagagcaagatgatctatgccagcagcaaggatgccatcaagaagaagttccagggcatcaagcatgagtgccaggccaatggacctgaggacctgaacagagcctgcatcgccgagaagctgggcggcagcctcatcgtggcctttgagggctgccctgtgtag

SEQ ID NO: 149866 - DNA, 897 bp, synthetic construct
  misc_feature 1..897: note = Description of Artificial Sequence: Synthetic coding sequence
  source 1..897: mol_type = other DNA
atgtctgatgccaacctggacagcagcaagaagaacttcctggagggggaggtggatgatgaggagagcgtcatcctgaccctggtgcctgtgaaggatgatgccaacatggagcagatggagcccagcgtgagcagcaccagtgatgtgaagctggagaagcccaagaagtacaaccctggccacctgctgcagaccaatgagcagttcaccgccccccagaaggcccgctgcaagatcccagccctgcccctgcccaccatcctgccccccatcaacaaggtgtgccgggacaccctgcgggactggtgccagcagctgggcctgagcaccaacgggaagaagattgaggtgtacctgcggctgcacagacatgcctacccagagcagaggcaggacatgcctgagatgagccaggagacccggctgcagcgctgcagcaggaagaggaaggctgtgaccaagagggcccggctgcagaggagctatgagatgaatgaaagagctgaggagaccaacacagtggaggtgatcaccagcgcccctggggccatgctggcctcctgggccagaattgctgcccgggctgtgcagcccaaggccctgaacagctgcagcatccctgtgtctgtggaggccttcctgatgcaggccagcggcgtgcgctggtgtgtggtgcacggccgcctgctgtctgctgacaccaagggctgggtgcggctgcagttccacgccggccaggcctgggtgcccaccacccacaggaggatgatcagcctcttcctgctgcctgcctgcatcttccccagccctggcatcgaggacaacatgctgtgcccagactgtgccaagaggaacaagaagatgatgaagaggctgatgacagtggagaagtag

SEQ ID NO: 149867 - DNA, 480 bp, synthetic construct
  misc_feature 1..480: note = Description of Artificial Sequence: Synthetic coding sequence
  source 1..480: mol_type = other DNA
atggaccccagccagttcaaccccacctacatccctggcagcccccagatgctgacagaggagaacagcagagatgattctggggccagccagatcagcagcgagaccctcatcaagaacctgagcaacctgaccatcaatgccagcagcgagagcgtgagccccctgtctgaggccctgctgcggcgggagagcgtgggcgctgctgtgctgcgggagattgaagatgagtggctgtacagccggcggggcgtgaggaccctgctgtctgtgcagcgggagaagatggcccggctgcgctacatgctgctgggcggcgtgaggacccatgagcggcggcccaccaacaaggagcccaagggcgtgaagaaggagagccggcccttcaagtgcccctgcagcttctgtgtgtccaatggctgggaccccagtgaaaatgccagaattggcaaccaggacaccaagcccctgcagccctag

SEQ ID NO: 149868 - DNA, 915 bp, synthetic construct
  misc_feature 1..915: note = Description of Artificial Sequence: Synthetic coding sequence
  source 1..915: mol_type = other DNA
atgctgcggggcagcgccagcagcacctccatggagaaggccaagggcaaggagtggaccagcacagagaagagccgggaggaggaccagcaggccagcaaccagcccaacagcatcgccctgcccggcaccagcgccaagaggaccaaggagaagatgagcatcaagggcagcaaggtgctgtgccccaagaagaaggccgagcacacagacaacccccggccccagaagaagatccccatcccccccctgcccagcaagctgccccctgtgaacctgatccaccgggacatcctgcgggcctggtgccagcagctgaagctgagcagcaagggccagaagctggatgcctacaagaggctgtgtgcctttgcctaccccaaccagaaggacttccccagcacagccaaggaggccaagatcaggaagagcctgcagaagaagctgaaggtggagaagggggagaccagcctgcagagcagcgagacccaccccccagaggtggccctgccccctgtgggggagcccccagccctggagaacagcacagccctgctggagggcgtgaacacagtggtggtgaccaccagcgcccctgaggccctgctggcctcctgggcccgcatcagcgcccgggcccggaccccagaggccgtggagagcccccaggaggccagcggcgtgcgctggtgtgtggtgcacggcaagagcctgcctgctgacacagatggctgggtgcacctgcagttccacgccggccaggcctgggtgcctgagaagcaggagggccgggtgtctgccctcttcctgctgcctgccagcaacttccccccaccccacctggaggacaacatgctgtgccccaagtgtgtgcacaggaacaaggtgctgatcaagagcctgcagtgggagtag

SEQ ID NO: 149869 - DNA, 351 bp, synthetic construct
  misc_feature 1..351: note = Description of Artificial Sequence: Synthetic coding sequence
  source 1..351: mol_type = other DNA
atgggcaccctgcctgcccggcggcacatccccccctgggtgaaggtgcctgaggacctgaaggaccctgaggtgttccaggtgcagacccggctgctgaaggccatctttggaccagatggcagccgcatcccctacatcgagcaggtgtccaaggccatgctggagctgaaggccctggagagcagtgacctgacagaggtggtggtgtatggcagctacctgtacaagctgcggaccaagtggatgctgcagagcatggccgagtggcaccggcagaggcaggagcggggcatgctgaagctggccgaggccatgaatgccctggagctgggcccctggatgaagtag

SEQ ID NO: 149870 - DNA, 1104 bp, synthetic construct
  misc_feature 1..1104: note = Description of Artificial Sequence: Synthetic coding sequence
  source 1..1104: mol_type = other DNA
atgagcagcaccctggccaagattgctgagattgaagctgagatggcccggacccagaagaacaaggccacagcccaccacctgggcctgctgaaggcccggctggccaagctgcggcgggagctgatcacccccaagggcggcggcggcggcggccctggagagggctttgatgtggccaagacaggagatgccagaattggatttgtgggcttccccagcgtgggcaagagcaccctgctgagcaacctggccggcgtgtacagcgaggtggccgcctatgagttcaccaccctgaccaccgtgcctggggtcatccgctacaagggggccaagatccagctgctggacctgcccggcatcatcgagggcgccaaggatggcaagggccggggccggcaggtgattgctgtggcccggacctgcaacctgatcctgattgtgctggatgtgctgaagcccctgggccacaagaagatcattgaaaatgagctggagggcttcggcatccggctgaacagcaagccacccaacatcggcttcaagaagaaggacaagggcggcatcaacctgacagccacctgcccccagagcgagctggatgctgagaccgtgaagagcatcctggccgagtacaagatccacaatgctgatgtgaccctgcggagtgatgccacagcagatgacctgattgatgtggtggagggcaacagagtgtacatcccctgcatctacgtgctgaacaagattgaccagatcagcattgaggagctggacatcatctacaaggtgccccactgtgtgcccatcagcgcccaccaccgctggaactttgatgacctgctggagaagatctgggactacctgaagctggtgcgcatctacaccaagcccaagggccagctgcctgactacaccagccctgtggtgctgccctacagcaggaccaccgtggaggacttctgcatgaagatccacaagaacctgatcaaggagttcaagtatgccctggtgtggggcctgtctgtgaagcacaacccccagaaggtgggcaaggaccacaccctggaggatgaagatgtgatccagatcgtgaagaagtag

SEQ ID NO: 149871 - DNA, 396 bp, synthetic construct
  misc_feature 1..396: note = Description of Artificial Sequence: Synthetic coding sequence
  source 1..396: mol_type = other DNA
atggctgctgctgtggccatggagacagatgatgctggcaaccggctgcgcttccagctggagctggagtttgtgcagtgcctggccaaccccaactacctgaacttcctggcccagaggggctacttcaaggacaaggcctttgtgaactacctgaagtacctgctgtactggaaggaccctgaatatgccaagtacctgaagtacccccagtgcctgcacatgctggagctgctgcagtatgagcacttcaggaaggagctggtgaatgcccagtgtgccaagttcattgatgagcagcagatcctgcactggcagcactacagcaggaagaggatgaggctgcagcaggccctggccgagcagcagcagcagaacaacaccagcggcaagtag

SEQ ID NO: 149872 - DNA, 1032 bp, synthetic construct
  misc_feature 1..1032: note = Description of Artificial Sequence: Synthetic coding sequence
  source 1..1032: mol_type = other DNA
atgggcatcctggagaagatcagcgagattgagaaggagatcgcccggacccagaagaacaaggccacagagtaccacctgggcctgctgaaggccaagctggccaagtaccgggcccagctgctggagcccagcaagagcgccagcagcaaaggagagggctttgatgtgatgaagtctggagatgcccgggtggccctgattggcttccccagcgtgggcaagagcaccttcctgagcctgatgaccagcacagccagcgaggccgccagctatgagttcaccaccctgacctgcatccctggggtcatcgagtacaagggggccaacatccagctgctggacctgcccggcatcatcgagggcgccgcccagggcaagggccggggccggcaggtgattgctgtggccaggacagcagatgtgatcatcatgatgctggatgccaccaagggggaggtgcagaggagcctgctggagaaggagctggagagcgtgggcatccggctgaacaagcacaagcccaacatctacttcaagcccaagaagggcggcggcatctccttcaacagcacagtgaccctgacccagtgcagcgagaagctggtgcagctgatcctgcacgagtacaagatcttcaatgctgaggtgctcttccgggaggactgcagcccagatgagttcattgatgtgattgtgggcaacagagtgtacatgccctgcctgtatgtgtacaacaagattgaccagatctccatggaggaggtggaccggctggccaggaagcccaacagcgtggtgatcagctgtggcatgaagctgaacctggactacctgctggagatgctgtgggagtacctggccctgacctgcatctacaccaagaagaggggccagaggccagacttcacagatgccatcatcctgaggaaaggagcctctgtggagcacgtgtgccaccgcatccacaggagcctggccagccagttcaaggccccagcccccagcacagtgcgcagcggctgggcctag

SEQ ID NO: 149873 - DNA, 2037 bp, synthetic construct
  misc_feature 1..2037: note = Description of Artificial Sequence: Synthetic coding sequence
  source 1..2037: mol_type = other DNA
atggagctgcggagctaccagtgggaggtgatcatgcctgccctggagggcaagaacatcatcatctggctgcccaccggggccggcaagaccagggctgctgcctacgtggccaagaggcacctggagaccgtggatggagccaaggtggtggtgctggtgaacagagtgcacctggtgacccagcacggggaggagttccggaggatgctggatggccgctggacagtgaccaccctgagcggggacatgggcccccgggccggcttcggccacctggcccgctgccacgacctgctgatctgcacagctgagctgctgcagatggccctgaccagccctgaggaggaggagcacgtggagctgactgtgttcagcctcatcgtggtggatgagtgccaccacacccacaaggacacagtgtacaacgtcatcatgagccagtacctggagctgaagctgcagagggcccagcccctgccccaggtgctgggcctgacagccagccctggcaccggcggggccagcaagctggatggagccatcaaccacgtgctgcagctgtgtgccaacctggacacctggtgcatcatgagcccccagaactgctgcccccagctgcaggagcacagccagcagccctgcaagcagtacaacctgtgccacagaagaagccaggacccctttggagacctgctgaagaagctgatggaccagatccatgaccacctggagatgcctgagctgagcaggaagtttggcacccagatgtatgagcagcaggtggtgaagctgtctgaggccgccgccctggccggcctgcaggagcagagggtgtatgccctgcacctgcggcgctacaatgatgccctgctgattcatgacacagtgcgggctgtggatgccctggccgccctgcaggacttctaccaccgggagcacgtgaccaagacccagatcctgtgtgccgagcggcggctgctggccctgtttgatgacaggaagaatgagctggcccacctggccacccacggccctgagaaccccaagctggagatgctggagaagatcctgcagaggcagttcagcagcagcaacagcccccggggcatcatcttcaccaggacccggcagagcgcccacagcctgctgctgtggctgcagcagcagcagggcctgcagacagtggacatccgggcccagctgctgattggagctggcaacagcagccagagcacccacatgacccagagggaccagcaggaggtgatccagaagttccaggacggcaccctgaacctgctggtggccacctctgtggccgaggagggcctggacatcccccactgcaatgtggtggtgcgctatggcctgctgaccaatgagatctccatggtgcaggcccggggccgggcccgggctgaccagagcgtgtatgcctttgtggccacagagggcagccgggagctgaagcgggagctgatcaatgaggccctggagaccctgatggagcaggccgtggccgctgtgcagaagatggaccaggccgagtaccaggccaagatccgggacctgcagcaggccgccctgaccaagagagctgcccaggccgcccagcgggagaaccagaggcagcagtttcctgtggagcacgtgcagctgctgtgcatcaactgcatggtggccgtgggccacggcagtgacctgaggaaggtggagggcacccaccacgtgaatgtgaaccccaacttcagcaactactacaacgtgtcccgggaccctgtggtgatcaacaaggtgttcaaggactggaagccaggcggcgtcatcagctgcaggaactgtggggaggtgtggggcctgcagatgatctacaagtctgtgaagctgcctgtgctgaaggtgcgctccatgctgctggagaccccccagggccgcatccaggccaagaagtggagccgggtgcccttctctgtgcctgactttgacttcctgcagcactgtgccgagaacctgagtgacctgagcctggactag

SEQ ID NO: 149874 - DNA, 909 bp, synthetic construct
  misc_feature 1..909: note = Description of Artificial Sequence: Synthetic coding sequence
  source 1..909: mol_type = other DNA
atggagctgcggagctaccagtgggaggtgatcatgcctgccctggagggcaagaacatcatcatctggctgcccaccggggccggcaagaccagggctgctgcctacgtggccaagaggcacctggagaccgtggatggagccaaggtggtggtgctggtgaacagagtgcacctggtgacccagcacggggaggagttccggaggatgctggatggccgctggacagtgaccaccctgagcggggacatgggcccccgggccggcttcggccacctggcccgctgccacgacctgctgatctgcacagctgagctgctgcagatggccctgaccagccctgaggaggaggagcacgtggagctgactgtgttcagcctcatcgtggtggatgagtgccaccacacccacaaggacacagtgtacaacgtcatcatgagccagtacctggagctgaagctgcagagggcccagcccctgccccaggtgctgggcctgacagccagccctggcaccggcggggccagcaagctggatggagccatcaaccacgtgctgcagctgtgtgccaacctggacacctggtgcatcatgagcccccagaactgctgcccccagctgcaggagcacagccagcagccctgcaagcagtacaacctgtgccacagaagaagccaggacccctttggagacctgctgaagaagctgatggaccagatccatgaccacctggagatgcctgagctgagcaggaagtttggcacccagatgtatgagcagcaggtggtgaagctgtctgaggccgccgccctggccggcctgcaggagcagagggtgtatgccctgcacctgcggcgctacaatgatgccctgctgattcatgacacagtgcgggctgtggatgcctag

SEQ ID NO: 149875 - DNA, 1464 bp, synthetic construct
  misc_feature 1..1464: note = Description of Artificial Sequence: Synthetic coding sequence
  source 1..1464: mol_type = other DNA
atggagctgcggagctaccagtgggaggtgatcatgcctgccctggagggcaagaacatcatcatctggctgcccaccggggccggcaagaccagggctgctgcctacgtggccaagaggcacctggagaccgtggatggagccaaggtggtggtgctggtgaacagagtgcacctggtgacccagcacggggaggagttccggaggatgctggatggccgctggacagtgaccaccctgagcggggacatgggcccccgggccggcttcggccacctggcccgctgccaccacacccacaaggacacagtgtacaacgtcatcatgagccagtacctggagctgaagctgcagagggcccagcccctgccccaggtgctgggcctgacagccagccctggcactggaggagccagcaagctggatggagccatcaaccacgtgctgcagctgtgtgccaacctggacacctggtgcatcatgagcccccagaactgctgcccccagctgcaggagcacagccagcagccctgcaagcagtacaacctgtgccaccggcgcagccaggacccctttggagacctgctgaagaagctgatggaccagatccatgaccacctggagatgcctgagctgagcaggaagtttggcacccagatgtatgagcagcaggtggtgaagctgtctgaggccgccgccctggccggcctgcaggagcagagggtgtatgccctgcacctgcggcgctacaatgatgccctgctgattcatgacacagtgcgggctgtggatgccctggccgccctgcaggacttctaccaccgggagcacgtgaccaagacccagatcctgtgtgccgagcggcggctgctggccctgtttgatgacaggaagaatgagctggcccacctggccacccacggccctgagaaccccaagctggagatgctggagaagatcctgcagaggcagttcagcagcagcaacagcccccggggcatcatcttcaccaggacccggcagagcgcccacagcctgctgctgtggctgcagcagcagcagggcctgcagacagtggacatccgggcccagctgctgattggagctggcaacagcagccagagcacccacatgacccagagggaccagcaggaggtgatccagaagttccaggacggcaccctgaacctgctggtggccacctctgtggccgaggagggcctggacatcccccactgcaatgtggtggtgcgctatggcctgctgaccaatgagatctccatggtgcaggcccggggccgggcccgggctgaccagagcgtgtatgcctttgtggccacagagggcagccgggagctgaagcgggagctgatcaatgaggccctggagaccctgatggagcaggccgtggccgctgtgcagaagatggaccaggccgagtaccaggccaaggagctgctgtag

SEQ ID NO: 149876 - DNA, 471 bp, synthetic construct
  misc_feature 1..471: note = Description of Artificial Sequence: Synthetic coding sequence
  source 1..471: mol_type = other DNA
atggagctgcggagctaccagtgggaggtgatcatgcctgccctggagggcaagaacatcatcatctggctgcccaccggggccggcaagaccagggctgctgcctacgtggccaagaggcacctggagaccgtggatggagccaaggtggtggtgctggtgaacagagtgcacctggtgacccagcacggggaggagttccggaggatgctggatggccgctggacagtgaccaccctgagcggggacatgggcccccgggccggcttcggccacctggcccgctgccacgacctgctgatctgcacagctgagctgctgcagatggccctgaccagccctgaggaggaggagcacgtggagctgactgtgttcagcctcatcgtggtggatgagtgccaccacacccacaaggacacagtgtacaacgtcatcatgagccagtacctggagctgaagctgcagaggtag

SEQ ID NO: 149877 - DNA, 2208 bp, synthetic construct
  misc_feature 1..2208: note = Description of Artificial Sequence: Synthetic coding sequence
  source 1..2208: mol_type = other DNA
atggccaaggagcggggcctcatcagccccagcgactttgcccagctgcagaagtacatggagtacagcaccaagaaggtgtctgatgtgctgaagctgtttgaagatggagagatggccaagtatgtgcagggagatgccatcggctatgagggcttccagcagttcctgaagatctacctggaggtggacaacgtgcccaggcacctgagcctggccctcttccagagctttgagaccggccactgcctgaatgagaccaacgtgaccaaggatgtggtgtgcctgaatgatgtgtcctgctacttcagcctgctggagggcggccggcctgaggacaagctggagttcaccttcaagctgtatgacacagacagaaatggcatcctggacagcagcgaggtggacaagatcatcctgcagatgatgagggtggccgagtacctggactgggatgtgtctgagctgcggcccatcctgcaggagatgatgaaggagattgattatgatggcagcggctctgtgtcccaggccgagtgggtgcgggccggggccaccaccgtgcccctgctggtgctgctgggcctggagatgaccctgaaggatgatggccagcacatgtggaggcccaagcgcttccccaggcctgtgtactgcaacctgtgtgagagcagcatcggcctgggcaagcagggcctgagctgcaacctgtgcaagtacacagtgcatgaccagtgtgccatgaaggccctgccctgtgaggtgtccacctacgccaagagcaggaaggacattggagtgcagagccacgtgtgggtgcggggcggctgtgagagcggccgctgtgaccgctgccagaagaagatccgcatctaccacagcctgaccggcctgcactgtgtgtggtgccacctggagatccatgatgactgcctgcaggccgtgggccatgaatgtgactgtggcctgctgcgggaccacatcctgccccccagcagcatctaccccagcgtgctggccagcggccctgacaggaagaacagcaagaccagccagaagaccatggatgacctgaacctgagcaccagcgaggccctgagaattgatcctgtgcccaacacccaccccctgctggtgtttgtgaaccccaagagcggcggcaagcagggccagagggtgctgtggaagttccagtacatcctgaacccccggcaggtgttcaacctgctgaaggatggccctgagatcggcctgcggctcttcaaggatgtgcctgacagccgcatcctggtgtgtggaggagatggcaccgtgggctggatcctggagaccatcgacaaggccaacctgcctgtgctgccccctgtggccgtgctgcccctgggcactggaaatgacctggcccgctgcctgcgctggggcggcggctatgagggccagaacctggccaagatcctgaaggacctggagatgagcaaggtggtgcacatggaccgctggagcgtggaggtgatcccccagcagacagaggagaagagtgaccctgtgcccttccagatcatcaacaactacttcagcattggagtggatgccagcatcgcccaccgcttccacatcatgagggagaagtacccagagaagttcaacagcaggatgaagaacaagctgtggtactttgaatttgccaccagcgagagcatcttcagcacctgcaagaagctggaggagagcctgactgtggagatctgtgggaagcccctggacctgagcaacctgagcctggagggcattgctgtgctgaacatccccagcatgcacggcggcagcaacctgtggggagacacccggcggccccatggagacatctacggcatcaaccaggccctgggcgccacagccaaggtgatcacagatcctgacatcctgaagacctgtgtgcctgacctgagtgacaagaggctggaggtggtgggcctggagggcgccatcgagatgggccagatctacaccaagctgaagaatgccggccgccgcctggccaagtgcagcgagatcaccttccacaccaccaagaccctgcccatgcagattgatggagagccctggatgcagaccccctgcaccatcaagatcacccacaagaaccagatgcccatgctgatgggccccccacccaggagcaccaacttcttcggcttcctgtcctag

SEQ ID NO: 149878 - DNA, 2208 bp, synthetic construct; identical to SEQ ID NO: 149877
  misc_feature 1..2208: note = Description of Artificial Sequence: Synthetic coding sequence
  source 1..2208: mol_type = other DNA

SEQ ID NO: 149879 - DNA, 744 bp, synthetic construct
  misc_feature 1..744: note = Description of Artificial Sequence: Synthetic coding sequence
  source 1..744: mol_type = other DNA
atggccaaggagcggggcctcatcagccccagcgactttgcccagctgcagaagtacatggagtacagcaccaagaaggtgtctgatgtgctgaagctgtttgaagatggagagatggccaagtatgtgcagggagatgccatcggctatgagggcttccagcagttcctgaagatctacctggaggtggacaacgtgcccaggcacctgagcctggccctcttccagagctttgagaccggccactgcctgaatgagaccaacgtgaccaaggatgtggtgtgcctgaatgatgtgtcctgctacttcagcctgctggagggcggccggcctgaggacaagctggagttcaccttcaagctgtatgacacagacagaaatggcatcctggacagcagcgaggtggacaagatcatcctgcagatgatgagggtggccgagtacctggactgggatgtgtctgagctgcggcccatcctgcaggagatgatgaaggagattgattatgatggcagcggctctgtgtcccaggccgagtgggtgcgggccggggccaccaccgtgcccctgctggtgctgctgggcctggagatgaccctgaaggatgatggccagcacatgtggaggcccaagcgcttccccaggcctgtgtactgcaacctgtgtgagagcagcatcggcctgggcaagcagggcctgagctgcaaccggcccatcacctgtgtgggcgcccggcggctgtag

SEQ ID NO: 149880 - DNA, 351 bp, synthetic construct
  misc_feature 1..351: note = Description of Artificial Sequence: Synthetic coding sequence
  source 1..351: mol_type = other DNA
atggccaaggagcggggcctcatcagccccagcgactttgcccagctgcagaagtacatggagtacagcaccaagaaggtgtctgatgtgctgaagctgtttgaagatggagagatggccaagtatgtgcagggagatgccatcggctatgagggcttccagcagttcctgaagatctacctggaggtggacaacgtgcccaggcacctgagcctggccctcttccagagctttgagaccggccactgcctgaatgagaccaacgtgaccaaggatgtggtgtgcctgaatgatgtgtcctgctacttcagcctgctggagggcggccggcctgaggacaagctggagtag

SEQ ID NO: 149881 - DNA, 177 bp, synthetic construct
  misc_feature 1..177: note = Description of Artificial Sequence: Synthetic coding sequence
  source 1..177: mol_type = other DNA
atggccaaggagcggggcctcatcagccccagcgactttgcccagctgcagaagtacatggagtacagcaccaagaaggtgtctgatgtgctgaagctgtttgaagatggagagatggccaagtatgtgcagggagatgccatcggctatgagggcttccagcagttcctgaagtag

SEQ ID NO: 149882 - DNA, 66 bp, synthetic construct
  misc_feature 1..66: note = Description of Artificial Sequence: Synthetic coding sequence
  source 1..66: mol_type = other DNA
atggccaaggagcggggcctcatcagccccagcgactttgcccagctgcagaagtacatggagtag

SEQ ID NO: 149883 - DNA, 444 bp, synthetic construct
  misc_feature 1..444: note = Description of Artificial Sequence: Synthetic coding sequence
  source 1..444: mol_type = other DNA
atggccaaggagcggggcctcatcagccccagcgactttgcccagctgcagaagtacatggagtacagcaccaagaaggtgtctgatgtgctgaagctgtttgaagatggagagatggccaagtatgtgcagggagatgccatcggctatgagggcttccagcagttcctgaagatctacctggaggtggacaacgtgcccaggcacctgagcctggccctcttccagagctttgagaccggccactgcctgaatgagaccaacgtgaccaaggatgtggtgtgcctgaatgatgtgtcctgctacttcagcctgctggagggcggccggcctgaggacaagctggagttcaccttcaagctgtatgacacagacagaaatggcatcctggacagcagcgaggtggacaagatcatcctgcagatgatgagggtggccgagtag

SEQ ID NO: 149884 - DNA, 2208 bp, synthetic construct; identical to SEQ ID NO: 149877
  misc_feature 1..2208: note = Description of Artificial Sequence: Synthetic coding sequence
  source 1..2208: mol_type = other DNA

SEQ ID NO: 149885 - DNA, 402 bp, synthetic construct
  misc_feature 1..402: note = Description of Artificial Sequence: Synthetic coding sequence
  source 1..402: mol_type = other DNA
atggccaaggagcggggcctcatcagccccagcgactttgcccagctgcagaagtacatggagtacagcaccaagaaggtgtctgatgtgctgaagctgtttgaagatggagagatggccaagtatgtgcagggagatgccatcggctatgagggcttccagcagttcctgaagatctacctggaggtggacaacgtgcccaggcacctgagcctggccctcttccagagctttgagaccggccactgcctgaatgagaccaacgtgaccaaggatgtggtgtgcctgaatgatgtgtcctgctacttcagcctgctggagggcggccggcctgaggacaagctggagttcaccttcaagctgtatgacacagacagaaatggcatcctggacagcagctag

SEQ ID NO: 149886 - DNA, 324 bp, synthetic construct
  misc_feature 1..324: note = Description of Artificial Sequence: Synthetic coding sequence
  source 1..324: mol_type = other DNA
atggccaaggagcggggcctcatcagccccagcgactttgcccagctgcagaagtacatggagtacagcaccaagaaggtgtctgatgtgctgaagctgtttgaagatggagagatggccaagtatgtgcagggagatgccatcggctatgagggcttccagcagttcctgaagatctacctggaggtggacaacgtgcccaggcacctgagcctggccctcttccagagctttgagaccggccactgcctgaatgagaccaacgtgaccaaggatgtggtgtgcctgaatgatgtgtcctgctacttcagcctgctggagtag

SEQ ID NO: 149887 - DNA, 135 bp, synthetic construct
  misc_feature 1..135: note = Description of Artificial Sequence: Synthetic coding sequence
  source 1..135: mol_type = other DNA
atggccaaggagcggggcctcatcagccccagcgactttgcccagctgcagaagtacatggagtacagcaccaagaaggtgtctgatgtgctgaagctgtttgaagatggagagatggccaagtatgtgcagtag

SEQ ID NO: 149888 - DNA, 135 bp, synthetic construct; identical to SEQ ID NO: 149887
  misc_feature 1..135: note = Description of Artificial Sequence: Synthetic coding sequence
  source 1..135: mol_type = other DNA

SEQ ID NO: 149889 - DNA, 402 bp, synthetic construct; identical to SEQ ID NO: 149885
  misc_feature 1..402: note = Description of Artificial Sequence: Synthetic coding sequence
  source 1..402: mol_type = other DNA

SEQ ID NO: 149890 - DNA, 135 bp, synthetic construct; identical to SEQ ID NO: 149887
  misc_feature 1..135: note = Description of Artificial Sequence: Synthetic coding sequence
  source 1..135: mol_type = other DNA

SEQ ID NO: 149891 - DNA, 2415 bp, synthetic construct
  misc_feature 1..2415: note = Description of Artificial Sequence: Synthetic coding sequence
  source 1..2415: mol_type = other DNA
atgaccaaccaggagaagtgggcccacctgagccccagcgagttcagccagctgcagaagtatgcagagtacagcaccaagaagctgaaggatgtgctggaggagttccatggaaatggagtgctggccaagtacaaccctgagggcaagctggtggtgctgggcaacaccatcgactttgagggcttcaagctgttcatgaagaccttcctggaggccgagctgcctgatgacttcaccgcccacctgttcatgtccttcagcaacaagttcccccacagcagccccatggtgaagagcaagccagccctgctgagcggcggcctgaggatgaacaagggggccatcaccccacccaggaccaccagccctgccaacacctgcagccctgaggtgatccacctgaaggacatcgtgtgctacctgagcctgctggagcggggccggcctgaggacaagctggagttcatgttccggctgtatgacacagatggaaatggcttcctggacagcagcgagctggagaacatcatcagccagatgatgcacgtggccgagtacctggagtgggatgtgacagagctgaaccccatcctgcacgagatgatggaggagattgattatgaccatgatggcaccgtgtccctggaggagtggatccagggcggcatgaccaccatccccctgctggtgctgctgggcctggagaacaacgtgaaggatgatggccagcacgtgtggaggctgaagcacttcaacaagccagcctactgcaacctgtgcctgaacatgctgattggagtgggcaagcagggcctgtgctgcagcttctgcaagtacacagtgcatgagcgctgtgtggcccgggccccacccagctgcatcaagacctacgtgaagagcaagaggaacacagatgtgatgcaccactactgggtggagggcaactgccccaccaagtgtgacaagtgccacaagacagtgaagtgctaccagggcctgaccggcctgcactgtgtgtggtgccagatcaccctgcacaacaagtgtgccagccacctgaagccagaatgtgactgtggccccctgaaggaccacatcctgccccccaccaccatctgccctgtggtgctgcagaccctgcccaccagcggcgtgtctgtgcctgaggagcggcagagcacagtgaagaaggagaagagcggcagccagcagcccaacaaggtgattgacaagaacaagatgcagagggccaacagcgtgacagtggatggccagggcctgcaggtgacccctgtgcccggcacccaccccctgctggtgtttgtgaaccccaagagcggcggcaagcagggcgagcgcatctacaggaagttccagtacctgctgaacccccggcaggtgtacagcctgtctggaaatggccccatgcctggcctgaacttcttcagagatgtgcctgacttccgggtgctggcctgtggaggagatggcaccgtgggctgggtgctggactgcatcgagaaggccaacgtgggcaagcacccccctgtggccatcctgcccctgggcactggaaatgacctggcccgctgcctgcgctggggcggcggctatgaaggagagaacctgatgaagatcctgaaggacatcgagaacagcacagagatcatgctggaccgctggaagtttgaggtgatccccaatgacaaggatgagaagggggaccctgtgccctacagcatcatcaacaactacttcagcattggagtggatgccagcatcgcccaccgcttccacatcatgagggagaagcaccctgagaagttcaacagcaggatgaagaacaagttctggtactttgaatttggcaccagcgagaccttcagcgccacctgcaagaagctgcatgaatctgtggagattgaatgtgatggagtgcagattgacctgatcaacatcagcctggagggcatcgccatcctgaacatccccagcatgcacggcggcagcaacctgtggggcgagagcaagaagaggaggagccaccggcgcatcgagaagaagggcagtgacaagaggaccaccgtgacagatgccaaggagctgaagtttgccagccaggacctgagtgaccagctgctggaggtggtgggcctggagggcgccatggagatgggccagatctacacaggcctgaagtctgctggccggcggctggcccagtgcagctgtgtggtgatccgcaccagcaagagcctgcccatgcagattgatggagagccctggatgcagaccccctgcaccatcaagatcacccacaagaaccaggcccccatgctgatgggccccccacccaagacaggcctcttctgcagcctggtgaagaggaccaggaacagaagcaaggagtag

SEQ ID NO: 149892 - DNA, 2415 bp, synthetic construct
  misc_feature 1..2415: note = Description of Artificial Sequence: Synthetic coding sequence
  source 1..2415: mol_type = other DNA
atgaccaaccaggagaagtgggcccacctgagccccagcgagttcagccagctgcagaagtatgcagagtacagcaccaagaagctgaaggatgtgctggaggagttccatggaaatggagtgctggccaagtacaaccctgagggcaagcaggacatcctgaaccagaccatcgactttgagggcttcaagctgttcatgaagaccttcctggaggccgagctgcctgatgacttcaccgcccacctgttcatgtccttcagcaacaagttcccccacagcagccccatggtgaagagcaagccagccctgctgagcggcggcctgaggatgaacaagggggccatcaccccacccaggaccaccagccctgccaacacctgcagccctgaggtgatccacctgaaggacatcgtgtgctacctgagcctgctggagcggggccggcctgaggacaagctggagttcatgttccggctgtatgacacagatggaaatggcttcctggacagcagcgagctggagaacatcatcagccagatgatgcacgtggccgagtacctggagtgggatgtgacagagctgaaccccatcctgcacgagatgatggaggagattgattatgaccatgatggcaccgtgtccctggaggagtggatccagggcggcatgaccaccatccccctgctggtgctgctgggcctggagaacaacgtgaaggatgatggccagcacgtgtggaggctgaagcacttcaacaagccagcctactgcaacctgtgcctgaacatgctgattggagtgggcaagcagggcctgtgctgcagcttctgcaagtacacagtgcatgagcgctgtgtggcccgggccccacccagctgcatcaagacctacgtgaagagcaagaggaacacagatgtgatgcaccactactgggtggagggcaactgccccaccaagtgtgacaagtgccacaagacagtgaagtgctaccagggcctgaccggcctgcactgtgtgtggtgccagatcaccctgcacaacaagtgtgccagccacctgaagccagaatgtgactgtggccccctgaaggaccacatcctgccccccaccaccatctgccctgtggtgctgcagaccctgcccaccagcggcgtgtctgtgcctgaggagcggcagagcacagtgaagaaggagaagagcggcagccagcagcccaacaaggtgattgacaagaacaagatgcagagggccaacagcgtgacagtggatggccagggcctgcaggtgacccctgtgcccggcacccaccccctgctggtgtttgtgaaccccaagagcggcggcaagcagggcgagcgcatctacaggaagttccagtacctgctgaacccccggcaggtgtacagcctgtctggaaatggccccatgcctggcctgaacttcttcagagatgtgcctgacttccgggtgctggcctgtggaggagatggcaccgtgggctgggtgctggactgcatcgagaaggccaacgtgggcaagcacccccctgtggccatcctgcccctgggcactggaaatgacctggcccgctgcctgcgctggggcggcggctatgaaggagagaacctgatgaagatcctgaaggacatcgagaacagcacagagatcatgctggaccgctggaagtttgaggtgatccccaatgacaaggatgagaagggggaccctgtgccctacagcatcatcaacaactacttcagcattggagtggatgccagcatcgcccaccgcttccacatcatgagggagaagcaccctgagaagttcaacagcaggatgaagaacaagttctggtactttgaatttggcaccagcgagaccttcagcgccacctgcaagaagctgcatgaatctgtggagattgaatgtgatggagtgcagattgacctgatcaacatcagcctggagggcatcgccatcctgaacatccccagcatgcacggcggcagcaacctgtggggcgagagcaagaagaggaggagccaccggcgcatcgagaagaagggcagtgacaagaggaccaccgtgacagatgccaaggagctgaagtttgccagccaggacctgagtgaccagctgctggaggtggtgggcctggagggcgccatggagatgggccagatctacacaggcctgaagtctgctggccggcggctggcccagtgcagctgtgtggtgatccgcaccagcaagagcctgcccatgcagattgatggagagccctggatgcagaccccctgcaccatcaagatcacccacaagaaccaggcccccatgctgatgggccccccacccaagacaggcctcttctgcagcctggtgaagaggaccaggaacagaagcaaggagtag

SEQ ID NO: 149893 - DNA, 2412 bp, synthetic construct
  misc_feature 1..2412: note = Description of Artificial Sequence: Synthetic coding sequence
  source 1..2412: mol_type = other DNA
atgaccaaccaggagaagtgggcccacctgagccccagcgagttcagccagctgcagaagtatgcagagtacagcaccaagaagctgaaggatgtgctggaggagttccatggaaatggagtgctggccaagtacaaccctgagggcaagcaggacatcctgaaccagaccatcgactttgagggcttcaagctgttcatgaagaccttcctggaggccgagctgcctgatgacttcaccgcccacctgttcatgtccttcagcaacaagttcccccacagcagccccatggtgaagagcaagccagccctgctgagcggcggcctgaggatgaacaagggggccatcaccccacccaggaccaccagccctgccaacacctgcagccctgaggtgatccacctgaaggacatcgtgtgctacctgagcctgctggagcggggccggcctgaggacaagctggagttcatgttccggctgtatgacacagatggaaatggcttcctggacagcagcgagctggagaacatcatcagccagatgatgcacgtggccgagtacctggagtgggatgtgacagagctgaaccccatcctgcacgagatgatggaggagattgattatgaccatgatggcaccgtgtccctggaggagtggatccagggcggcatgaccaccatccccctgctggtgctgctgggcctggagaacaacgtgaaggatgatggccagcacgtgtggaggctgaagcacttcaacaagccagcctactgcaacctgtgcctgaacatgctgattggagtgggcaagcagggcctgtgctgcagcttctgcaagtacacagtgcatgagcgctgtgtggcccgggccccacccagctgcatcaagacctacgtgaagagcaagaggaacacagatgtgatgcaccactactgggtggagggcaactgccccaccaagtgtgacaagtgccacaagacagtgaagtgctaccagggcctgaccggcctgcactgtgtgtggtgccagatcaccctgcacaacaagtgtgccagccacctgaagccagaatgtgactgtggccccctgaaggaccacatcctgccccccaccaccatctgccctgtggtgctgaccctgcccaccagcggcgtgtctgtgcctgaggagcggcagagcacagtgaagaaggagaagagcggcagccagcagcccaacaaggtgattgacaagaacaagatgcagagggccaacagcgtgacagtggatggccagggcctgcaggtgacccctgtgcccggcacccaccccctgctggtgtttgtgaaccccaagagcggcggcaagcagggcgagcgcatctacaggaagttccagtacctgctgaacccccggcaggtgtacagcctgtctggaaatggccccatgcctggcctgaacttcttcagagatgtgcctgacttccgggtgctggcctgtggaggagatggcaccgtgggctgggtgctggactgcatcgagaaggccaacgtgggcaagcacccccctgtggccatcctgcccctgggcactggaaatgacctggcccgctgcctgcgctggggcggcggctatgaaggagagaacctgatgaagatcctgaaggacatcgagaacagcacagagatcatgctggaccgctggaagtttgaagtcatccccaatgacaaggatgagaagggggaccctgtgccctacagcatcatcaacaactacttcagcattggagtggatgccagcatcgcccaccgcttccacatcatgagggagaagcaccctgagaagttcaacagcaggatgaagaacaagttctggtactttgaatttggcaccagcgagaccttcagcgccacctgcaagaagctgcacgagagcgtggagattgaatgtgatggagtgcagattgacctgatcaacatcagcctggagggcatcgccatcctgaacatccccagcatgcatggaggcagcaacctgtggggcgagagcaagaagagaagaagccacagaagaattgagaagaagggcagtgacaagaggaccaccgtgacagatgccaaggagctgaagtttgccagccaggacctgagtgaccagctgctggaggtggtgggcctggagggcgccatggagatgggccagatctacacaggcctgaagtctgctggaagaaggctggcccagtgcagctgtgtggtgatccgcaccagcaagagcctgcccatgcagattgatggagagccctggatgcagaccccctgcaccatcaagatcacccacaagaaccaggcccccatgctgatgggccccccacccaagacaggcctcttctgcagcctggtgaagaggaccaggaacagaagcaaggagtag

SEQ ID NO: 149894 - DNA, 2415 bp, synthetic construct; identical to SEQ ID NO: 149892
  misc_feature 1..2415: note = Description of Artificial Sequence: Synthetic coding sequence
  source 1..2415: mol_type = other DNA

SEQ ID NO: 149895 - DNA, 2322 bp, synthetic construct
  misc_feature 1..2322: note = Description of Artificial Sequence: Synthetic coding sequence
  source 1..2322: mol_type = other DNA
atgaccaaccaggagaagtgggcccacctgagccccagcgagttcagccagctgcagaagtatgcagagtacagcaccaagaagctgaaggatgtgctggaggagttccatggaaatggagtgctggccaagtacaaccctgagggcaagcaggacatcctgaaccagaccatcgactttgagggcttcaagctgttcatgaagaccttcctggaggccgagctgcctgatgacttcaccgcccacctgttcatgtccttcagcaacaagttcccccacagcagccccatggtgaagagcaagccagccctgctgagcggcggcctgaggatgaacaagggggccatcaccccacccaggaccaccagccctgccaacacctgcagccctgaggtgatccacctgaaggacatcgtgtgctacctgagcctgctggagcggggccggcctgaggacaagctggagttcatgttccggctgtatgacacagatggaaatggcttcctggacagcagcgagctggagaacatcatcagccagatgatgcacgtggccgagtacctggagtgggatgtgacagagctgaaccccatcctgcacgagatgatggaggagattgattatgaccatgatggcaccgtgtccctggaggagtggatccagggcggcatgaccaccatccccctgctggtgctgctgggcctggagaacaacgtgaaggatgatggccagcacgtgtggaggctgaagcacttcaacaagccagcctactgcaacctgtgcctgaacatgctgattggagtgggcaagcagggcctgtgctgcagcttctgcaagtacacagtgcatgagcgctgtgtggcccgggccccacccagctgcatcaagacctacgtgaagagcaagaggaacacagatgtgatgcaccactactgggtggagggcaactgccccaccaagtgtgacaagtgccacaagacagtgaagtgctaccagggcctgaccggcctgcactgtgtgtggtgccagatcaccctgcacaacaagtgtgccagccacctgaagccagaatgtgactgtggccccctgaaggaccacatcctgccccccaccaccatctgccctgtggtgctgcagaccctgcccaccagcggcgtgtctgtgcctgaggagcggcagagcacagtgaagaaggagaagagcggcagccagcagcccaacaaggtgattgacaagaacaagatgcagagggccaacagcgtgacagtggatggccagggcctgcaggtgacccctgtgcccggcacccaccccctgctggtgtttgtgaaccccaagagcggcggcaagcagggcgagcgcatctacaggaagttccagtacctgctgaacccccggcaggtgtacagcctgtctggaaatggccccatgcctggcctgaacttcttcagagatgtgcctgacttccgggtgctggcctgtggaggagatggcaccgtgggctgggtgctggactgcatcgagaaggccaacgtgggcaagcacccccctgtggccatcctgcccctgggcactggaaatgacctggcccgctgcctgcgctggggcggcggctatgaaggagagaacctgatgaagatcctgaaggacatcgagaacagcacagagatcatgctggaccgctggaagtttgaggtgatccccaatgacaaggatgagaagggggaccctgtgccctacagcatcatcaacaactacttcagcattggagtggatgccagcatcgcccaccgcttccacatcatgagggagaagcaccctgagaagttcaacagcaggatgaagaacaagttctggtactttgaatttggcaccagcgagaccttcagcgccacctgcaagaagctgcatgaatctgtggagattgaatgtgatggagtgcagattgacctgatcaacatcagcctggagggcatcgccatcctgaacatccccagcatgcacggcggcagcaacctgtggggcgagagcaagaagaggaggagccaccggcgcatcgagaagaagggcagtgacaagaggaccaccgtgacagatgccaaggagctgaagtttgccagccaggacctgagtgaccagctgctggaggtggtgggcctggagggcgccatggagatgggccagatctacacaggcctgaagtctgctggccggcggctggcccagtgcagctgtgtggtgatccgcaccagcaagagcctgcccatgcagattgatggagagccctggatgcagaccccctgcaccgtgtccacagaatag

SEQ ID NO: 149896 - DNA, 2391 bp, synthetic construct
  misc_feature 1..2391: note = Description of Artificial Sequence: Synthetic coding sequence
  source 1..2391: mol_type = other DNA
atgaccaaccaggagaagtgggcccacctgagccccagcgagttcagccagctgcagaagtatgcagagtacagcaccaagaagctgaaggatgtgctggaggagttccatggaaatggagtgctggccaagtacaaccctgagggcaccatcgactttgagggcttcaagctgttcatgaagaccttcctggaggccgagctgcctgatgacttcaccgcccacctgttcatgtccttcagcaacaagttcccccacagcagccccatggtgaagagcaagccagccctgctgagcggcggcctgaggatgaacaagggggccatcaccccacccaggaccaccagccctgccaacacctgcagccctgaggtgatccacctgaaggacatcgtgtgctacctgagcctgctggagcggggccggcctgaggacaagctggagttcatgttccggctgtatgacacagatggaaatggcttcctggacagcagcgagctggagaacatcatcagccagatgatgcacgtggccgagtacctggagtgggatgtgacagagctgaaccccatcctgcacgagatgatggaggagattgattatgaccatgatggcaccgtgtccctggaggagtggatccagggcggcatgaccaccatccccctgctggtgctgctgggcctggagaacaacgtgaaggatgatggccagcacgtgtggaggctgaagcacttcaacaagccagcctactgcaacctgtgcctgaacatgctgattggagtgggcaagcagggcctgtgctgcagcttctgcaagtacacagtgcatgagcgctgtgtggcccgggccccacccagctgcatcaagacctacgtgaagagcaagaggaacacagatgtgatgcaccactactgggtggagggcaactgccccaccaagtgtgacaagtgccacaagacagtgaagtgctaccagggcctgaccggcctgcactgtgtgtggtgccagatcaccctgcacaacaagtgtgccagccacctgaagccagaatgtgactgtggccccctgaaggaccacatcctgccccccaccaccatctgccctgtggtgctgaccctgcccaccagcggcgtgtctgtgcctgaggagcggcagagcacagtgaagaaggagaagagcggcagccagcagcccaacaaggtgattgacaagaacaagatgcagagggccaacagcgtgacagtggatggccagggcctgcaggtgacccctgtgcccggcacccaccccctgctggtgtttgtgaaccccaagagcggcggcaagcagggcgagcgcatctacaggaagttccagtacctgctgaacccccggcaggtgtacagcctgtctggaaatggccccatgcctggcctgaacttcttcagagatgtgcctgacttccgggtgctggcctgtggaggagatggcaccgtgggctgggtgctggactgcatcgagaaggccaacgtgggcaagcacccccctgtggccatcctgcccctgggcactggaaatgacctggcccgctgcctgcgctggggcggcggctatgaaggagagaacctgatgaagatcctgaaggacatcgagaacagcacagagatcatgctggaccgctggaagtttgaggtgatccccaatgacaaggatgagaagggggaccctgtgccctacagcatcatcaacaactacttcagcattggagtggatgccagcatcgcccaccgcttccacatcatgagggagaagcaccctgagaagttcaacagcaggatgaagaacaagttctggtactttgaatttggcaccagcgagaccttcagcgccacctgcaagaagctgcatgaatctgtggagattgaatgtgatggagtgcagattgacctgatcaacatcagcctggagggcatcgccatcctgaacatccccagcatgcacggcggcagcaacctgtggggcgagagcaagaagaggaggagccaccggcgcatcgagaagaagggcagtgacaagaggaccaccgtgacagatgccaaggagctgaagtttgccagccaggacctgagtgaccagctgctggaggtggtgggcctggagggcgccatggagatgggccagatctacacaggcctgaagtctgctggccggcggctggcccagtgcagctgtgtggtgatccgcaccagcaagagcctgcccatgcagattgatggagagccctggatgcagaccccctgcaccatcaagatcacccacaagaaccaggcccccatgctgatgggccccccacccaagacaggcctcttctgcagcctggtgaagaggaccaggaacagaagcaaggagtag

SEQ ID NO: 149897 - DNA, 228 bp, synthetic construct
  misc_feature 1..228: note = Description of Artificial Sequence: Synthetic coding sequence
  source 1..228: mol_type = other DNA
atgaccaaccaggagaagtgggcccacctgagccccagcgagttcagccagctgcagaagtatgcagagtacagcaccaagaagctgaaggatgtgctggaggagttccatggaaatggagtgctggccaagtacaaccctgagggcaagcaggacatcctgaaccagaccatcgactttgagggcttcaagctgttcatgaagaccttcctggaggccgagctgtag

SEQ ID NO: 149898 - DNA, 2358 bp, synthetic construct
  misc_feature 1..2358: note = Description of Artificial Sequence: Synthetic coding sequence
  source 1..2358: mol_type = other DNA
atgaccaaccaggagaagtgggcccacctgagccccagcgagttcagccagctgcagaagtatgcagagtacagcaccaagaagctgaaggatgtgctggaggagttccatggaaatggagtgctggccaagtacaaccctgagggcaccatcgactttgagggcttcaagctgttcatgaagaccttcctggaggccgagctgcctgatgacttcaccgcccacctgttcatgtccttcagcaacaagttcccccacagcagccccatggtgaagagcaagccagccctgctgagcggcggcctgaggatgaacaagggggccatcaccccacccaggaccaccagccctgccaacacctgcagccctgaggtgatccacctgaaggacatcgtgtgctacctgagcctgctggagcggggccggcctgaggacaagctggagttcatgttccggctgtatgacacagatggaaatggcttcctggacagcagcgagctggagaacatcatcagccagatgatgcacgtggccgagtacctggagtgggatgtgacagagctgaaccccatcctgcacgagatgatggaggagattgattatgaccatgatggcaccgtgtccctggaggagtggatccagggcggcatgaccaccatccccctgctggtgctgctgggcctggagaacaacgtgaaggatgatggccagcacgtgtggaggctgaagcacttcaacaagccagcctactgcaacctgtgcctgaacatgctgattggagtgggcaagcagggcctgtgctgcagcttctgcaagtacacagtgcatgagcgctgtgtggcccgggccccacccagctgcatcaagacctacgtgaagagcaagaggaacacagatgtgatgcaccactactgggtggagggcaactgccccaccaagtgtgacaagtgccacaagacagtgaagtgctaccagggcctgaccggcctgcactgtgtgtggtgccagatcaccctgcacaacaagtgtgccagccacctgaagccagaatgtgactgtggccccctgaaggaccacatcctgccccccaccaccatctgccctgtggtgctggagcggcagagcacagtgaagaaggagaagagcggcagccagcagcccaacaaggtgattgacaagaacaagatgcagagggccaacagcgtgacagtggatggccagggcctgcaggtgacccctgtgcccggcacccaccccctgctggtgtttgtgaaccccaagagcggcggcaagcagggcgagcgcatctacaggaagttccagtacctgctgaacccccggcaggtgtacagcctgtctggaaatggccccatgcctggcctgaacttcttcagagatgtgcctgacttccgggtgctggcctgtggaggagatggcaccgtgggctgggtgctggactgcatcgagaaggccaacgtgggcaagcacccccctgtggccatcctgcccctgggcactggaaatgacctggcccgctgcctgcgctggggcggcggctatgaaggagagaacctgatgaagatcctgaaggacatcgagaacagcacagagatcatgctggaccgctggaagtttgaagtcatccccaatgacaaggatgagaagggggaccctgtgccctacagcatcatcaacaactacttcagcattggagtggatgccagcatcgcccaccgcttccacatcatgagggagaagcaccctgagaagttcaacagcaggatgaagaacaagttctggtactttgaatttggcaccagcgagaccttcagcgccacctgcaagaagctgcacgagagcgtggagattgaatgtgatggagtgcagattgacctgatcaacatcagcctggagggcatcgccatcctgaacatccccagcatgcatggaggcagcaacctgtggggcgagagcaagaagagaagaagccacagaagaattgagaagaagggcagtgacaagaggaccaccgtgacagatgccaaggagctgaagtttgccagccaggacctgagtgaccagctgctggaggtggtgggcctggagggcgccatggagatgggccagatctacacaggcctgaagtctgctggaagaaggctggcccagtgcagctgtgtggtgatccgcaccagcaagagcctgcccatgcagattgatggagagccctggatgcagaccccctgcaccatcaagatcacccacaagaaccaggcccccatgctgatgggccccccacccaagacaggcctcttctgcagcctggtgaagaggaccaggaacagaagcaaggagtag

SEQ ID NO: 149899 - DNA, 3645 bp, synthetic construct
  misc_feature 1..3645: note = Description of Artificial Sequence: Synthetic coding sequence
  source 1..3645: mol_type = other DNA
atggctgctgctgctggggcccctcctcctggccccccccagcccccacctcctcctcctcctgaggagagcagtgacagcgagcctgaggccgagcccggcagcccccagaagctgatcaggaaggtgtccaccagcggccagatccggcagaagaccatcatcaaggagggcatgctgaccaagcagaacaacagcttccagaggagcaagaggcgctacttcaagctgcggggccgcaccctgtactatgccaagacagccaagagcatcatctttgatgaggtggacctgacagatgcctctgtggccgagagcagcaccaagaatgtgaacaacagcttcaccgtcatcaccccctgcaggaagctgatcctgtgtgccgacaacaggaaggagatggaggactggattgctgccctgaagacagtgcagaaccgggagcactttgagcccacccagtacagcatggaccacttcagcggcatgcacaactggtacgcctgcagccacgcccggcccacctactgcaatgtgtgccgggaggccctgtctggagtgaccagccacggcctgagctgtgaggtgtgcaagttcaaggcccacaagagatgtgctgtgcgggccaccaacaactgcaagtggaccaccctggccagcatcggcaaggacatcattgaagatgctgatggcatcgccatgccccaccagtggctggagggcaacctgcctgtgtctgccaagtgcaccgtgtgtgacaagacctgtggctctgtgctgcggctgcaggactggcgctgcctgtggtgcaaggccatggtgcacaccagctgcaaggagagcctgctgaccaagtgccccctgggcctgtgcaaggtgtctgtcatccccccaacagccctgaacagcattgacagtgatggcttctggaaggccagctgcccccccagctgcaccagccccctgctggtgtttgtgaacagcaagagcggggacaaccagggcgtgaagttcctgcggcgcttcaagcagctgctgaacccagcccaggtgtttgacctgatgaatggaggcccccacctgggcctgcggctcttccagaagtttgacaccttccgcatcctggtgtgtggaggagatggctctgtgggctgggtgctgtctgaaattgacagcctgaacctgcacaagcagtgccagctgggcgtgctgcccctgggcactggaaatgacctggcccgggtgctgggctggggcagcgcctgtgatgatgacacccagctgccccagatcctggagaagctggagcgggccagcaccaagatgctggaccgctggagcgtgatggcctatgaggccaagctgccccggcaggccagcagcagcacagtgacagaggacttcagcgaggacagcgaggtgcagcagatcctcttctatgaagattctgtggccgcccacctgagcaagatcctgaccagtgaccagcacagcgtggtgatcagcagcgccaaggtgctgtgtgagaccgtgaaggactttgtggcccgggtgggcaaggcctatgagaagaccacagagagcagcgaggagagcgaggtgatggccaagaagtgcagcgtgctgaaggagaagctggacagcctgctgaagaccctggatgatgagagccaggccagcagcagcctgcccaaccccccacccaccatcgccgaggaggctgaagatggagatggcagcggcagcatctgtggcagcactggagaccggctggtggccagcgcctgcccagcccggccccagatcttccggccccgggagcagctgatgctgcgggccaacagcctgaagaaggccatccggcagatcatcgagcacacagagaaggctgtggatgagcagaatgcccagacccaggagcaggagggctttgtgctgggcctgtctgagagcgaggagaagatggaccaccgggtgtgcccccccctgagccacagcgagagctttggagtgcccaagggccgcagccagaggaaggtgtccaagagcccctgtgagaagctgatcagcaagggcagcctgagcctgggcagcagcgccagcctgcccccccagcccggcagcagagatggcctgcctgccctgaacaccaagatcctgtacccaaatgtgcgggccggcatgagcggcagcctgcccggcggcagcgtcatcagccggctgctgatcaatgctgaccccttcaacagcgagcctgagaccctggagtactacacagagaagtgtgtgatgaacaactacttcggcatcggcctggatgccaagatcagcctggacttcaacaacaagagagatgagcaccctgagaagtgccgcagcaggaccaagaacatgatgtggtatggagtgctgggcaccaaggagctgctgcacaggacctacaagaacctggagcagaaggtgctgctggagtgtgatggccggcccatccccctgcccagcctgcagggcattgctgtgctgaacatccccagctatgccggcggcaccaacttctggggcggcaccaaggaggatgacacctttgctgcccccagctttgatgacaagatcctggaggtggtggccgtgtttggctccatgcagatggctgtgtccagggtcatccggctgcagcaccaccgcatcgcccagtgcaggacagtgaagatcagcatcctgggagatgaaggagtgcctgtgcaggtggatggagaggcctgggtgcagcccccaggctacatccgcatcgtgcacaagaacagagcccagaccctgacccgggaccgggcctttgagagcaccctgaagtcctgggaggacaagcagaagtgtgagctgcccaggcctcccagctgcagcctgcaccctgagatgctgtctgaggaggaggccacccagatggaccagtttggccaggccgccggcgtgctgatccacagcatccgggagatcgcccagagccaccgggacatggagcaggagctggcccatgctgtgaatgccagcagcaagtccatggacagagtgtatggcaagcccaggaccacagagggcctgaactgcagctttgtgctggagatggtgaacaacttccgggccctgcggagtgaaacagagctgctgctgagcggcaagatggccctgcagctggaccccccccagaaggagcagctgggcagcgccctggccgagatggaccggcagctgcggcggctggccgacaccccctggctgtgccagagcgctgagcctggagatgaggagagcgtgatgctggacctggccaagaggagccgcagcggcaagttccggctggtgaccaagttcaagaaggagaagaacaacaagaacaaggaggcccacagcagcctgggcgcccctgtgcacctgtggggcacagaggaggtggccgcctggctggagcacctgagcctgtgtgagtacaaggacatcttcaccaggcatgacatccggggcagcgagctgctgcacctggagcggcgggacctgaaggacctgggcgtgaccaaggtgggccacatgaagaggatcctgtgtggcatcaaggagctgagccgcagcgccccagctgtggaggcctag

SEQ ID NO: 149900 - DNA, 3513 bp, synthetic construct
  misc_feature 1..3513: note = Description of Artificial Sequence: Synthetic coding sequence
  source 1..3513: mol_type = other DNA
atgaacatgttcctgtacttccagaccatcatcaaggagggcatgctgaccaagcagaacaacagcttccagaggagcaagaggcgctacttcaagctgcggggccgcaccctgtactatgccaagacagccaagagcatcatctttgatgaggtggacctgacagatgcctctgtggccgagagcagcaccaagaatgtgaacaacagcttcaccgtcatcaccccctgcaggaagctgatcctgtgtgccgacaacaggaaggagatggaggactggattgctgccctgaagacagtgcagaaccgggagcactttgagcccacccagtacagcatggaccacttcagcggcatgcacaactggtacgcctgcagccacgcccggcccacctactgcaatgtgtgccgggaggccctgtctggagtgaccagccacggcctgagctgtgaggtgtgcaagttcaaggcccacaagagatgtgctgtgcgggccaccaacaactgcaagtggaccaccctggccagcatcggcaaggacatcattgaagatgctgatggcatcgccatgccccaccagtggctggagggcaacctgcctgtgtctgccaagtgcaccgtgtgtgacaagacctgtggctctgtgctgcggctgcaggactggcgctgcctgtggtgcaaggccatggtgcacaccagctgcaaggagagcctgctgaccaagtgccccctgggcctgtgcaaggtgtctgtcatccccccaacagccctgaacagcattgacagtgatggcttctggaaggccagctgcccccccagctgcaccagccccctgctggtgtttgtgaacagcaagagcggggacaaccagggcgtgaagttcctgcggcgcttcaagcagctgctgaacccagcccaggtgtttgacctgatgaatggaggcccccacctgggcctgcggctcttccagaagtttgacaccttccgcatcctggtgtgtggaggagatggctctgtgggctgggtgctgtctgaaattgacagcctgaacctgcacaagcagtgccagctgggcgtgctgcccctgggcactggaaatgacctggcccgggtgctgggctggggcagcgcctgtgatgatgacacccagctgccccagatcctggagaagctggagcgggccagcaccaagatgctggaccgctggagcgtgatggcctatgaggccaagctgccccggcaggccagcagcagcacagtgacagaggacttcagcgaggacagcgaggtgcagcagatcctcttctatgaagattctgtggccgcccacctgagcaagatcctgaccagtgaccagcacagcgtggtgatcagcagcgccaaggtgctgtgtgagaccgtgaaggactttgtggcccgggtgggcaaggcctatgagaagaccacagagagcagcgaggagagcgaggtgatggccaagaagtgcagcgtgctgaaggagaagctggacagcctgctgaagaccctggatgatgagagccaggccagcagcagcctgcccaaccccccacccaccatcgccgaggaggctgaagatggagatggcagcggcagcatctgtggcagcactggagaccggctggtggccagcgcctgcccagcccggccccagatcttccggccccgggagcagctgatgctgcgggccaacagcctgaagaaggccatccggcagatcatcgagcacacagagaaggctgtggatgagcagaatgcccagacccaggagcaggagggctttgtgctgggcctgtctgagagcgaggagaagatggaccaccgggtgtgcccccccctgagccacagcgagagctttggagtgcccaagggccgcagccagaggaaggtgtccaagagcccctgtgagaagctgatcagcaagggcagcctgagcctgggcagcagcgccagcctgcccccccagcccggcagcagagatggcctgcctgccctgaacaccaagatcctgtacccaaatgtgcgggccggcatgagcggcagcctgcccggcggcagcgtcatcagccggctgctgatcaatgctgaccccttcaacagcgagcctgagaccctggagtactacacagagaagtgtgtgatgaacaactacttcggcatcggcctggatgccaagatcagcctggacttcaacaacaagagagatgagcaccctgagaagtgccgcagcaggaccaagaacatgatgtggtatggagtgctgggcaccaaggagctgctgcacaggacctacaagaacctggagcagaaggtgctgctggagtgtgatggccggcccatccccctgcccagcctgcagggcattgctgtgctgaacatccccagctatgccggcggcaccaacttctggggcggcaccaaggaggatgacacctttgctgcccccagctttgatgacaagatcctggaggtggtggccgtgtttggctccatgcagatggctgtgtccagggtcatccggctgcagcaccaccgcatcgcccagtgcaggacagtgaagatcagcatcctgggagatgaaggagtgcctgtgcaggtggatggagaggcctgggtgcagcccccaggctacatccgcatcgtgcacaagaacagagcccagaccctgacccgggaccgggcctttgagagcaccctgaagtcctgggaggacaagcagaagtgtgagctgcccaggcctcccagctgcagcctgcaccctgagatgctgtctgaggaggaggccacccagatggaccagtttggccaggccgccggcgtgctgatccacagcatccgggagatcgcccagagccaccgggacatggagcaggagctggcccatgctgtgaatgccagcagcaagtccatggacagagtgtatggcaagcccaggaccacagagggcctgaactgcagctttgtgctggagatggtgaacaacttccgggccctgcggagtgaaacagagctgctgctgagcggcaagatggccctgcagctggaccccccccagaaggagcagctgggcagcgccctggccgagatggaccggcagctgcggcggctggccgacaccccctggctgtgccagagcgctgagcctggagatgaggagagcgtgatgctggacctggccaagaggagccgcagcggcaagttccggctggtgaccaagttcaagaaggagaagaacaacaagaacaaggaggcccacagcagcctgggcgcccctgtgcacctgtggggcacagaggaggtggccgcctggctggagcacctgagcctgtgtgagtacaaggacatcttcaccaggcatgacatccggggcagcgagctgctgcacctggagcggcgggacctgaaggacctgggcgtgaccaaggtgggccacatgaagaggatcctgtgtggcatcaaggagctgagccgcagcgccccagctgtggaggcctag

SEQ ID NO: 149901 - DNA, 1704 bp, synthetic construct
  misc_feature 1..1704: note = Description of Artificial Sequence: Synthetic coding sequence
  source 1..1704: mol_type = other DNA
atggaggccgagaggaggcctgcccctggcagccccagcgagggcctgtttgctgatggccacctgatcctgtggaccctgtgcagcgtgctgctgcctgtgttcatcaccttctggtgcagcctgcagaggagccggcggcagctgcacagaagagacatcttcaggaagagcaagcacggctggagggacacagacctcttcagccagcccacctactgctgcgtgtgtgcccagcacatcctgcagggcgccttctgtgactgctgcggcctgcgggtggatgagggctgcctgaggaaggctgacaagcgcttccagtgcaaggagatcatgctgaagaatgacaccaaggtgctggatgccatgccccaccactggatcagaggaaatgtgcccctgtgcagctactgcatggtgtgcaagcagcagtgtggctgccagcccaagctgtgtgactaccgctgcatctggtgccagaagacagtgcatgatgagtgcatgaagaacagcctgaagaatgagaagtgtgactttggagagttcaagaacctgatcatcccccccagctacctgaccagcatcaaccagatgaggaaggacaagaagacagattatgaggtgctggccagcaagctgggcaagcagtggacccccctcatcatcctggccaacagccgcagcggcaccaacatgggagagggcctgctgggggagttccgcatcctgctgaaccctgtgcaggtgtttgatgtgaccaagaccccacccatcaaggccctgcagctgtgcaccctgctgccctactacagcgcccgggtgctggtgtgtggaggagatggcaccgtgggctgggtgctggatgctgtggatgacatgaagatcaagggccaggagaagtacatcccccaggtggccgtgctgcccctgggcactggaaatgacctgagcaacaccctgggctggggcaccggctacgccggggagatccctgtggcccaggtgctgagaaatgtgatggaggctgatggcatcaagctggaccgctggaaggtgcaggtgaccaacaagggctactacaacctgaggaagcccaaggagttcaccatgaacaactacttctctgtgggcccagatgccctgatggccctgaacttccacgcccaccgggagaaggcccccagcctcttcagcagccgcatcctgaacaaggctgtgtacctgttctacggcaccaaggactgcctggtgcaggagtgcaaggacctgaacaagaaggtggagctggagctggatggagagcgggtggccctgcccagcctggagggcatcatcgtgctgaacatcggctactggggcggcggctgccgcctgtgggagggcatgggagatgagacctaccccctggcccggcatgatgatggcctgctggaggtggtgggcgtgtatggcagcttccactgtgcccagatccaggtgaagctggccaaccccttcagaattggccaggcccacacagtgcggctcatcctgaagtgcagcatgatgcccatgcaggtggatggagagccctgggcccagggcccctgcaccgtgaccatcacccacaagacccacgccatgatgctgtacttcagcggggagcagacagatgatgacatcagcagcaccagtgaccaggaggacatcaaggccacagaatag

SEQ ID NO: 149902 - DNA, 2376 bp, synthetic construct
  misc_feature 1..2376: note = Description of Artificial Sequence: Synthetic coding sequence
  source 1..2376: mol_type = other DNA
atgggagaggagcgctgggtgtccctgaccccagaggagtttgaccagctgcagaagtacagcgagtacagcagcaagaagatcaaggatgccctgacagagttcaatgaaggaggcagcctgaagcagtatgacccccatgagcccatctcctatgatgtgttcaagctgttcatgagggcctacctggaggtggacctgccccagcccctgagcacccacctgttcctggccttcagccagaagcccaggcatgagaccagtgaccaccccacagagggcgccagcaacagcgaggccaacagcgctgacaccaacatccagaatgctgacaatgccaccaaggcagatgaggcctgtgccccagacacagagagcaacatggccgagaagcaggccccagctgaggaccaggtggccgccacccccctggagccccctgtgcccaggagcagcagcagcgagagccctgtggtgtacctgaaggatgtggtgtgctacctgagcctgctggagaccggccggccccaggacaagctggagttcatgttccggctgtatgacagtgatgaaaatggcctgctggaccaggccgagatggactgcatcgtgaaccagatgctgcacatcgcccagtacctggagtgggaccccacagagctgcggcccatcctgaaggagatgctgcagggcatggactatgacagagatggctttgtgtccctgcaggagtgggtgcatggaggcatgaccaccatccccctgctggtgctgctgggcatggatgacagcggcagcaaaggagatggaagacatgcctggaccatgaagcacttcaagaagcccacctactgcaacttctgccacatcatgctgatgggcgtgaggaagcagggcctgtgctgcacctactgcaagtacacagtgcatgagcgctgtgtgtccaggaacatccctggctgtgtgaagacctacagcaaggccaagaggtctggagaggtgatgcagcacgcctgggtggagggcaacagctctgtgaagtgtgaccgctgccacaagagcatcaagtgctaccagagcgtgacagcccggcactgtgtgtggtgcaggatgaccttccacaggaaatgtgagctgagcaccctgtgtgatggaggagagctgcgggaccacatcctgctgcccaccagcatctgccccatcacccgggacaggcctggagagaagagtgatggctgtgtgtctgccaagggggagctggtgatgcagtacaagatcatccccaccccaggcacccaccccctgctggtgctggtgaaccccaagagcggcggccggcagggcgagcgcatcctgaggaagttccactacctgctgaaccccaagcaggtgttcaacctggacaatggaggccccaccccaggcctgaacttcttccgggacaccccagacttccgggtgctggcctgtggaggagatggcaccgtgggctggatcctggactgcatcgacaaggccaactttgccaagcacccccctgtggccgtgctgcccctgggcactggaaatgacctggcccgctgcctgcgctggggcggcggctatgaaggaggcagcctgaccaagatcctgaaggacatcgagcagagccccctggtgatgctggaccgctggcacctggaggtgatcccccgggaggaggtggagaatggagaccaggtgccctacagcatcatgaacaactacttcagcattggagtggatgccagcatcgcccaccgcttccacgtgatgagggagaagcaccctgagaagttcaacagcaggatgaagaacaagctgtggtactttgaatttggcaccagcgagacctttgctgccacctgcaagaagctgcatgaccacatcgagctggagtgtgatggagtgggcgtggacctgagcaacatcttcctggagggcatcgccatcctgaacatccccagcatgtatggaggcaccaacctgtggggcgagaacaagaagaacagagctgtgatccgggagagcaggaaaggagtgacagaccccaaggagctgaagttctgtgtgcaggacctgagtgaccagctgctggaggtggtgggcctggagggcgccatggagatgggccagatctacacaggcctgaagtctgctggccggcggctggcccagtgtgcctctgtgaccatccgcaccaacaagctgctgcccatgcaggtggatggagagccctggatgcagccctgctgcaccatcaagatcacccacaagaaccaggcccccatgatgatgggccccccccagaagagcagcttcttcagcctgcggaggaagagccgcagcaaggactag

SEQ ID NO: 149903 - DNA, 2301 bp, synthetic construct
  misc_feature 1..2301: note = Description of Artificial Sequence: Synthetic coding sequence
  source 1..2301: mol_type = other DNA
atgggagaggagcgctgggtgtccctgaccccagaggagtttgaccagctgcagaagtacagcgagtacagcagcaagaagatcaaggatgccctgacagagttcaatgaaggaggcagcctgaagcagtatgacccccatgagcccatctcctatgatgtgttcaagctgttcatgagggcctacctggaggtggacctgccccagcccctgagcacccacctgttcctggccttcagccagaagcccaggcatgagaccagtgaccaccccacagagggcgccagcaacagcgaggccaacagcgctgacaccaacatccagaatgctgacaatgccaccaaggcagatgaggcctgtgccccagacacagagagcaacatggccgagaagcaggccccagctgaggaccaggtggccgccacccccctggagccccctgtgcccaggagcagcagcagcgagagccctgtggtgtacctgaaggatgtggtgtgctacctgagcctgctggagaccggccggccccaggacaagctggagttcatgttccggctgtatgacagtgatgaaaatggcctgctggaccaggccgagatggactgcatcgtgaaccagatgctgcacatcgcccagtacctggagtgggaccccacagagctgcggcccatcctgaaggagatgctgcagggcatggactatgacagagatggctttgtgtccctgcaggagtgggtgcatggaggcatgaccaccatccccctgctggtgctgctgggcatggatgacagcggcagcaaaggagatggaagacatgcctggaccatgaagcacttcaagaagcccacctactgcaacttctgccacatcatgctgatgggcgtgaggaagcagggcctgtgctgcacctactgcaagtacacagtgcatgagcgctgtgtgtccaggaacatccctggctgtgtgaagacctacagcaaggccaagaggtctggagaggtgatgcagcacgcctgggtggagggcaacagctctgtgaagtgtgaccgctgccacaagagcatcaagtgctaccagagcgtgacagcccggcactgtgtgtggtgcaggatgaccttccacaggaaatgtgagctgagcaccctgtgtgatggaggagagctgcgggaccacatcctgctgcccaccagcatctgccccatcacccgggacaggcctggagagaagagtgatggctgtgtgtctgccaagggggagctggtgatgcagtacaagatcatccccaccccaggcacccaccccctgctggtgctggtgaaccccaagagcggcggccggcagggcgagcggctgaacttcttccgggacaccccagacttccgggtgctggcctgtggaggagatggcaccgtgggctggatcctggactgcatcgacaaggccaactttgccaagcacccccctgtggccgtgctgcccctgggcactggaaatgacctggcccgctgcctgcgctggggcggcggctatgagggcggcagcctgaccaagatcctgaaggacatcgagcagagccccctggtgatgctggaccgctggcacctggaggtgatcccccgggaggaggtggagaatggagaccaggtgccctacagcatcatgaacaactacttcagcattggagtggatgccagcatcgcccaccgcttccacgtgatgagggagaagcaccctgagaagttcaacagcaggatgaagaacaagctgtggtactttgaatttggcaccagcgagacctttgctgccacctgcaagaagctgcatgaccacatcgagctggagtgtgatggagtgggcgtggacctgagcaacatcttcctggagggcatcgccatcctgaacatccccagcatgtatggaggcaccaacctgtggggcgagaacaagaagaacagagctgtgatccgggagagcaggaagggcgtgacagaccccaaggagctgaagttctgtgtgcaggacctgagtgaccagctgctggaggtggtgggcctggagggcgccatggagatgggccagatctacacaggcctgaagtctgctggaagaaggctggcccagtgtgcctctgtgaccatccgcaccaacaagctgctgcccatgcaggtggatggagagccctggatgcagccctgctgcaccatcaagatcacccacaagaaccaggcccccatgatgatgggccccccccagaagagcagcttcttcagcctgcggaggaagagccgcagcaaggactag

SEQ ID NO: 149904 - DNA, 2259 bp, synthetic construct
  misc_feature 1..2259: note = Description of Artificial Sequence: Synthetic coding sequence
  source 1..2259: mol_type = other DNA
atgggagaggagcgctgggtgtccctgaccccagaggagtttgaccagctgcagaagtacagcgagtacagcagcaagaagatcaaggatgccctgacagagttcaatgaaggaggcagcctgaagcagtatgacccccatgagcccatctcctatgatgtgttcaagctgttcatgagggcctacctggaggtggacctgccccagcccctgagcacccacctgttcctggccttcagccagaagcccaggcatgagaccagtgaccaccccacagagggcgccagcaacagcgaggccaacagcgctgacaccaacatccagaatgctgacaatgccaccaaggcagatgaggcctgtgccccagacacagagagcaacatggccgagaagcaggccccagctgaggaccaggtggccgccacccccctggagccccctgtgcccaggagcagcagcagcgagagccctgtggtgtacctgaaggatgtggtgtgctacctgagcctgctggagaccggccggccccaggacaagctggagttcatgttccggctgtatgacagtgatgaaaatggcctgctggaccaggccgagatggactgcatcgtgaaccagatgctgcacatcgcccagtacctggagtgggaccccacagagctgcggcccatcctgaaggagatgctgcagggcatggactatgacagagatggctttgtgtccctgcaggagtgggtgcatggaggcatgaccaccatccccctgctggtgctgctgggcatggatgacagcggcagcaaaggagatggaagacatgcctggaccatgaagcacttcaagaagcccacctactgcaacttctgccacatcatgctgatgggcgtgaggaagcagggcctgtgctgcacctactgcaagtacacagtgcatgagcgctgtgtgtccaggaacatccctggctgtgtgaagacctacagcaaggccaagaggtctggagagttccacaggaaatgtgagctgagcaccctgtgtgatggaggagagctgcgggaccacatcctgctgcccaccagcatctgccccatcacccgggacaggcctggagagaagagtgatggctgtgtgtctgccaagggggagctggtgatgcagtacaagatcatccccaccccaggcacccaccccctgctggtgctggtgaaccccaagagcggcggccggcagggcgagcgcatcctgaggaagttccactacctgctgaaccccaagcaggtgttcaacctggacaatggaggccccaccccaggcctgaacttcttccgggacaccccagacttccgggtgctggcctgtggaggagatggcaccgtgggctggatcctggactgcatcgacaaggccaactttgccaagcacccccctgtggccgtgctgcccctgggcactggaaatgacctggcccgctgcctgcgctggggcggcggctatgagggcggcagcctgaccaagatcctgaaggacatcgagcagagccccctggtgatgctggaccgctggcacctggaggtgatcccccgggaggaggtggagaatggagaccaggtgccctacagcatcatgaacaactacttcagcattggagtggatgccagcatcgcccaccgcttccacgtgatgagggagaagcaccctgagaagttcaacagcaggatgaagaacaagctgtggtactttgaatttggcaccagcgagacctttgctgccacctgcaagaagctgcatgaccacatcgagctggagtgtgatggagtgggcgtggacctgagcaacatcttcctggagggcatcgccatcctgaacatccccagcatgtatggaggcaccaacctgtggggcgagaacaagaagaacagagctgtgatccgggagagcaggaagggcgtgacagaccccaaggagctgaagttctgtgtgcaggacctgagtgaccagctgctggaggtggtgggcctggagggcgccatggagatgggccagatctacacaggcctgaagtctgctggaagaaggctggcccagtgtgcctctgtgaccatccgcaccaacaagctgctgcccatgcaggtggatggagagccctggatgcagccctgctgcaccatcaagatcacccacaagaaccaggcccccatgatgatgggccccccccagaagagcagcttcttcagcctgcggaggaagagccgcagcaaggactag

SEQ ID NO: 149905 - DNA, 1818 bp, synthetic construct
  misc_feature 1..1818: note = Description of Artificial Sequence: Synthetic coding sequence
  source 1..1818: mol_type = other DNA
agcctgaagatgggagaggagcgctgggtgtccctgaccccagaggagtttgaccagctgcagaagtacagcgagtacagcagcaagaagatcaaggatgccctgacagagttcaatgaaggaggcagcctgaagcagtatgacccccatgagcccatctcctatgatgtgttcaagctgttcatgagggcctacctggaggtggacctgccccagcccctgagcacccacctgttcctggccttcagccagaagcccaggcatgagaccagtgaccaccccacagaaggagccagcaacagcgaggccaacagcgctgacaccaacatccagaatgctgacaatgccaccaaggcagatgaggcctgtgccccagacacagagagcaacatggccgagaagcaggccccagctgaggaccaggtggccgccacccccctggagccccctgtgcccaggagcagcagcagcgagagccctgtggtgtacctgaaggatgtggtgtgctacctgagcctgctggagaccggccggccccaggacaagctggagttcatgttccggctgtatgacagtgatgaaaatggcctgctggaccaggccgagatggactgcatcgtgaaccagatgctgcacatcgcccagtacctggagtgggaccccacagagctgcggcccatcctgaaggagatgctgcagggcatggactatgacagagatggctttgtgtccctgcaggagtgggtgcacggcggcatgaccaccatccccctgctggtgctgctgggcatggatgattctggcagcaaaggagatggaagacatgcctggaccatgaagcacttcaagaagcccacctactgcaacttctgccacatcatgctgatgggcgtgaggaagcagggcctgtgctgcacctactgcaagtacacagtgcatgagcgctgtgtgtccaggaacatccctggctgtgtgaagacctacagcaaggccaagaggtctggagagttccacaggaaatgtgagctgagcaccctgtgtgatggaggagagctgcgggaccacatcctgctgcccaccagcatctgccccatcacccgggacaggcctggagagaagagtgatggctgtgtgtctgccaagggggagctggtgatgcagtacaagatcatccccaccccaggcacccaccccctgctggtgctggtgaaccccaagagcggcggccggcagggcgagcgcatcctgaggaagttccactacctgctgaaccccaagcaggtgttcaacctggacaatggaggccccaccccaggcctgaacttcttccgggacaccccagacttccgggtgctggcctgtggaggagatggcaccgtgggctggatcctggactgcatcgacaaggccaactttgccaagcacccccctgtggccgtgctgcccctgggcactggaaatgacctggcccgctgcctgcgctggggcggcggctatgaaggaggcagcctgaccaagatcctgaaggacatcgagcagagccccctggtgatgctggaccgctggcacctggaggtgatcccccgggaggaggtggagaatggagaccaggtgccctacagcatcatgaacaactacttcagcattggagtggatgccagcatcgcccaccgcttccacgtgatgagggagaagcaccctgagaagttcaacagcaggatgaagaacaagctgtggtactttgaatttggcaccagcgagacctttgctgccacctgcaagaagctgcatgaccacatcgagctggagtggtgctag

SEQ ID NO: 149906 - DNA, 2199 bp, synthetic construct
  misc_feature 1..2199: note = Description of Artificial Sequence: Synthetic coding sequence
  source 1..2199: mol_type = other DNA
atgggagaggagcgctgggtgtccctgaccccagaggagtttgaccagctgcagaagtacagcgagtacagcagcaagaagatcaaggatgccctgacagagttcaatgaaggaggcagcctgaagcagtatgacccccatgagcccatctcctatgatgtgttcaagctgttcatgagggcctacctggaggtggacctgccccagcccctgagcacccacctgttcctggccttcagccagaagcccaggcatgagaccagtgaccaccccacagagggcgccagcaacagcgaggccaacagcgctgacaccaacatccagaatgctgacaatgccaccaaggcagatgaggcctgtgccccagacacagagagcaacatggccgagaagcaggccccagctgaggaccaggtggccgccacccccctggagccccctgtgcccaggagcagcagcagcgagagccctgtggtgtacctgaaggatgtggtgtgctacctgagcctgctggagaccggccggccccaggacaagctggagttcatgttccggctgtatgacagtgatgaaaatggcctgctggaccaggccgagatggactgcatcgtgaaccagatgctgcacatcgcccagtacctggagtgggaccccacagagctgcggcccatcctgaaggagatgctgcagggcatggactatgacagagatggctttgtgtccctgcaggagtgggtgcatggaggcatgaccaccatccccctgctggtgctgctgggcatggatgacagcggcagcaaaggagatggaagacatgcctggaccatgaagcacttcaagaagcccacctactgcaacttctgccacatcatgctgatgggcgtgaggaagcagggcctgtgctgcacctactgcaagtacacagtgcatgagcgctgtgtgtccaggaacatccctggctgtgtgaagacctacagcaaggccaagaggtctggagagttccacaggaaatgtgagctgagcaccctgtgtgatggaggagagctgcgggaccacatcctgctgcccaccagcatctgccccatcacccgctacaagatcatccccaccccaggcacccaccccctgctggtgctggtgaaccccaagagcggcggccggcagggcgagcgcatcctgaggaagttccactacctgctgaaccccaagcaggtgttcaacctggacaatggaggccccaccccaggcctgaacttcttccgggacaccccagacttccgggtgctggcctgtggaggagatggcaccgtgggctggatcctggactgcatcgacaaggccaactttgccaagcacccccctgtggccgtgctgcccctgggcactggaaatgacctggcccgctgcctgcgctggggcggcggctatgagggcggcagcctgaccaagatcctgaaggacatcgagcagagccccctggtgatgctggaccgctggcacctggaggtgatcccccgggaggaggtggagaatggagaccaggtgccctacagcatcatgaacaactacttcagcattggagtggatgccagcatcgcccaccgcttccacgtgatgagggagaagcaccctgagaagttcaacagcaggatgaagaacaagctgtggtactttgaatttggcaccagcgagacctttgctgccacctgcaagaagctgcatgaccacatcgagctggagtgtgatggagtgggcgtggacctgagcaacatcttcctggagggcatcgccatcctgaacatccccagcatgtatggaggcaccaacctgtggggcgagaacaagaagaacagagctgtgatccgggagagcaggaagggcgtgacagaccccaaggagctgaagttctgtgtgcaggacctgagtgaccagctgctggaggtggtgggcctggagggcgccatggagatgggccagatctacacaggcctgaagtctgctggaagaaggctggcccagtgtgcctctgtgaccatccgcaccaacaagctgctgcccatgcaggtggatggagagccctggatgcagccctgctgcaccatcaagatcacccacaagaaccaggcccccatgatgatgggccccccccagaagagcagcttcttcagcctgcggaggaagagccgcagcaaggactag

SEQ ID NO: 149907 - DNA, 3198 bp, synthetic construct
  misc_feature 1..3198: note = Description of Artificial Sequence: Synthetic coding sequence
  source 1..3198: mol_type = other DNA
atggatgctgctggccggggctgccacctgctgcccctgcctgctgcccggggccctgcccgggccccagctgctgctgctgctgctgctgccagccccccaggcccctgcagcggggccgcctgtgcccccagcgctgctgctggggccggggccatgaaccccagcagcagcgctggggaggagaagggggccaccggcggcagcagcagcagcggcagcggggccggcagctgctgcctgggcgctgagggcggcgctgaccccaggggggccggcagcgctgctgctgctggagctgctgccctggatgagcctgctgctgctggccagaaggagaaggatgaggccctggaggagaagctgaggaacctgaccttcaggaagcaggtgtcctacaggaaggccatcagccgggccggcctgcagcacctggccccagcccaccccctgagcctgcctgtggccaatggacctgccaaggagccccgggccaccctggactggagcgaaaatgctgtgaatggagagcacctgtggctggagaccaacgtgtctggggacctgtgctacctgggggaggagaactgccaggtgcgctttgccaagagcgccctgcggaggaaatgtgctgtgtgcaagatcgtggtgcacacagcctgcatcgagcagctggagaagatcaacttccgctgcaagcccaccttccgggagggcggcagccgcagcccccgggagaactttgtgcgccaccactgggtgcacagaagacggcaggagggcaagtgcaagcagtgtgggaagggcttccagcagaagttctccttccacagcaaggagatcgtggccatcagctgctcctggtgcaagcaggccttccacaacaaggtgacctgcttcatgctgcaccacatcgaggagccctgcagcctgggcgcccatgctgctgtgattgtgccccccacctggatcatcaaggtgaagaagccccagaacagcctgaaggccagcaacaggaagaagaagaggaccagcttcaagaggaaggccagcaagaggggcatggagcaggagaacaagggccggcccttcgtcatcaagcccatcagcagccccctgatgaagcccctgctggtgtttgtgaaccccaagagcggcggcaaccagggcaccaaggtgctgcagatgttcatgtggtacctgaacccccggcaggtgtttgacctgagccaggagggccccaaggatgccctggagctgtacaggaaggtgcccaacctgcgcatcctggcctgtggaggagatggcaccgtgggctggatcctgagcatcctggatgagctgcagctgagcccccagccccctgtgggcgtgctgcccctgggcactggaaatgacctggcccggaccctgaactggggcggcggctacacagatgagcctgtgtccaagatcctgtgccaggtggaggatggcaccgtggtgcagctggaccgctggaacctgcacgtggagaggaacccagacctgcccccagaggagctggaggatggagtgtgcaagctgcccctgaatgtgttcaacaactacttcagcctgggctttgatgcccacgtgaccctggagttccacgagagccgggaggccaaccctgagaagttcaacagccgcttcaggaacaagatgttttatgctggggccgccttcagtgacttcctgcagaggagcagccgggacctgagcaagcacgtgaaggtggtgtgtgatggaacagacctgacccccaagatccaggagctgaagttccagtgcatcgtgttcctgaacatcccccgctactgtgccggcaccatgccctggggcaaccctggggaccaccacgactttgagccccagagacatgatgatggctacattgaagtcatcggcttcaccatggccagcctggccgccctgcaggtgggcggccatggagagcggctgcaccagtgccgggaggtgatgctgctgacctacaagagcatccccatgcaggtggatggagagccctgccgcctggccccagccatgatccgcatcagcctgaggaaccaggccaacatggtgcagaagagcaagaggaggacctccatgcccctgctgaatgacccccagagcgtgcctgaccggctgcgcatccgggtgaacaagatcagcctgcaggactatgagggcttccactatgacaaggagaagctgcgggaggccagcatcagtgactggctgcggaccatcgccggggagctggtgcagagctttggagccatccccctgggcatcctggtggtgcggggggactgtgacctggagacctgcaggatgtacatcgaccggctgcaggaggacctgcagagcgtgagcagcggcagccagagggtgcactaccaggaccacgagaccagcttcccccgggccctgagcgcccagaggctgagcccccgctggtgcttcctggatgacaggagccaggagcacctgcactttgtgatggagatcagccaggatgagatcttcatcctggaccctgacatggtggtgtcccagcctgctggcaccccacctggcatgccagacctggtggtggagcaggccagcggcatcagtgactggtggaacccagccctgaggaagaggatgctgagtgacagcggcctgggcatgattgccccctactatgaggacagcgacctgaaggacctgagccacagccgggtgctgcagagccctgtgtcctctgaggaccacgccatcctgcaggccgtgattgctggggacctgatgaagctgattgagagctacaagaatggaggcagcctgctgatccagggccctgaccactgcagcctgctgcactacgccgccaagacaggaaatggagagatcgtgaagtacatcctggaccacggccccagcgagctgctggacatggctgacagcgagaccggggagacagccctgcacaaggccgcctgccagaggaacagagctgtgtgccagctgctggtggatgctggggccagcctgaggaagacagacagcaagggcaagaccccccaggagcgggcccagcaggccggggaccctgacctggccgcctacctggagagccggcagaactacaaggtgattggacatgaggacctggagacagctgtgtag

SEQ ID NO: 149908 - DNA, 3207 bp, synthetic construct
  misc_feature 1..3207: note = Description of Artificial Sequence: Synthetic coding sequence
  source 1..3207: mol_type = other DNA
atggatgctgctggccggggctgccacctgctgcccctgcctgctgcccggggccctgcccgggccccagctgctgctgctgctgctgctgccagccccccaggcccctgcagcggggccgcctgtgcccccagcgctgctgctggggccggggccatgaaccccagcagcagcgctggggaggagaagggggccaccggcggcagcagcagcagcggcagcggggccggcagctgctgcctgggcgctgagggcggcgctgaccccaggggggccggcagcgctgctgctgctggagctgctgccctggatgagcctgctgctgctggccagaaggagaaggatgaggccctggaggagaagctgaggaacctgaccttcaggaagcaggtgtcctacaggaaggccatcagccgggccggcctgcagcacctggccccagcccaccccctgagcctgcctgtggccaatggacctgccaaggagccccgggccaccctggactggagcgaaaatgctgtgaatggagagcacctgtggctggagaccaacgtgtctggggacctgtgctacctgggggaggagaactgccaggtgcgctttgccaagagcgccctgcggaggaaatgtgctgtgtgcaagatcgtggtgcacacagcctgcatcgagcagctggagaagatcaacttccgctgcaagcccaccttccgggagggcggcagccgcagcccccgggagaactttgtgcgccaccactgggtgcacagaagacggcaggagggcaagtgcaagcagtgtgggaagggcttccagcagaagttctccttccacagcaaggagatcgtggccatcagctgctcctggtgcaagcaggccttccacaacaaggtgacctgcttcatgctgcaccacatcgaggagccctgcagcctgggcgcccatgctgctgtgattgtgccccccacctggatcatcaaggtgaagaagccccagaacagcctgaaggccagcaacaggaagaagaagaggaccagcttcaagaggaaggccagcaagaggggcatggagcaggagaacaagggccggcccttcgtcatcaagcccatcagcagccccctgatgaagcccctgctggtgtttgtgaaccccaagagcggcggcaaccagggcaccaaggtgctgcagatgttcatgtggtacctgaacccccggcaggtgtttgacctgagccaggagggccccaaggatgccctggagctgtacaggaaggtgcccaacctgcgcatcctggcctgtggaggagatggcaccgtgggctggatcctgagcatcctggatgagctgcagctgagcccccagccccctgtgggcgtgctgcccctgggcactggaaatgacctggcccggaccctgaactggggcggcggctacacagatgagcctgtgtccaagatcctgtgccaggtggaggatggcaccgtggtgcagctggaccgctggaacctgcacgtggagaggaacccagacctgcccccagaggagctggaggatggagtgtgcaagctgcccctgaatgtgttcaacaactacttcagcctgggctttgatgcccacgtgaccctggagttccacgagagccgggaggccaaccctgagaagttcaacagccgcttcaggaacaagatgttttatgctggggccgccttcagtgacttcctgcagaggagcagccgggacctgagcaagcacgtgaaggtggtgtgtgatggaacagacctgacccccaagatccaggagctgaagttccagtgcatcgtgttcctgaacatcccccgctactgtgccggcaccatgccctggggcaaccctggggaccaccacgactttgagccccagagacatgatgatggctacattgaagtcatcggcttcaccatggccagcctggccgccctgcaggtgggcggccatggagagcggctgcaccagtgccgggaggtgatgctgctgacctacaagagcatccccatgcaggtggatggagagccctgccgcctggccccagccatgatccgcatcagcctgaggaaccaggccaacatggtgcagaagagcaagaggaggacctccatgcccctgctgaatgacatccaccaggtgcagacagctgacctgcggcgggtgtctgcccctcctggcagcttcaccatcccccagagcgtgcctgaccggctgcgcatccgggtgaacaagatcagcctgcaggactatgagggcttccactatgacaaggagaagctgcgggaggccagcatccccctgggcatcctggtggtgcggggggactgtgacctggagacctgcaggatgtacatcgaccggctgcaggaggacctgcagagcgtgagcagcggcagccagagggtgcactaccaggaccacgagaccagcttcccccgggccctgagcgcccagaggctgagcccccgctggtgcttcctggatgacaggagccaggagcacctgcactttgtgatggagatcagccaggatgagatcttcatcctggaccctgacatggtggtgtcccagcctgctggcaccccacctggcatgccagacctggtggtggagcaggccagcggcatcagtgactggtggaacccagccctgaggaagaggatgctgagtgacagcggcctgggcatgattgccccctactatgaagattctgacctgaaggacctgagccacagccgggtgctgcagagccctgtgtccagtgaagatcatgccatcctgcaggccgtgattgctggggacctgatgaagctgattgagagctacaagaatggaggcagcctgctgatccagggccctgaccactgcagcctgctgcactatgctgccaagacaggaaatggagaaattgtgaagtacatcctggaccacggccccagcgagctgctggacatggctgacagcgagactggagaaacagccctgcacaaggccgcctgccagaggaacagagctgtgtgccagctgctggtggatgctggggccagcctgaggaagacagacagcaagggcaagaccccccaggagcgggcccagcaggccggggaccctgacctggccgcctacctggagagccggcagaactacaaggtgattggacatgaggacctggagacagctgtgtag

SEQ ID NO: 149909 - DNA, 2949 bp, synthetic construct
  misc_feature 1..2949: note = Description of Artificial Sequence: Synthetic coding sequence
  source 1..2949: mol_type = other DNA
atgaaccccagcagcagcgctggggaggagaagggggccaccggcggcagcagcagcagcggcagcggggccggcagctgctgcctgggcgctgagggcggcgctgaccccaggggggccggcagcgctgctgctgctggagctgctgccctggatgagcctgctgctgctggccagaaggagaaggatgaggccctggaggagaagctgaggaacctgaccttcaggaagcaggtgtcctacaggaaggccatcagccgggccggcctgcagcacctggccccagcccaccccctgagcctgcctgtggccaatggacctgccaaggagccccgggccaccctggactggagcgaaaatgctgtgaatggagagcacctgtggctggagaccaacgtgtctggggacctgtgctacctgggggaggagaactgccaggtgcgctttgccaagagcgccctgcggaggaaatgtgctgtgtgcaagatcgtggtgcacacagcctgcatcgagcagctggagaagatcaacttccgctgcaagcccaccttccgggagggcggcagccgcagcccccgggagaactttgtgcgccaccactgggtgcacagaagacggcaggagggcaagtgcaagcagtgtgggaagggcttccagcagaagttctccttccacagcaaggagatcgtggccatcagctgctcctggtgcaagcaggccttccacaacaaggtgacctgcttcatgctgcaccacatcgaggagccctgcagcctgggcgcccatgctgctgtgattgtgccccccacctggatcatcaaggtgaagaagccccagaacagcctgaaggccagcaacaggaagaagaagaggaccagcttcaagaggaaggccagcaagaggggcatggagcaggagaacaagggccggcccttcgtcatcaagcccatcagcagccccctgatgaagcccctgctggtgtttgtgaaccccaagagcggcggcaaccagggcaccaaggtgctgcagatgttcatgtggtacctgaacccccggcaggtgtttgacctgagccaggagggccccaaggatgccctggagctgtacaggaaggtgcccaacctgcgcatcctggcctgtggaggagatggcaccgtgggctggatcctgagcatcctggatgagctgcagctgagcccccagccccctgtgggcgtgctgcccctgggcactggaaatgacctggcccggaccctgaactggggcggcggctacacagatgagcctgtgtccaagatcctgtgccaggtggaggatggcaccgtggtgcagctggaccgctggaacctgcacgtggagaggaacccagacctgcccccagaggagctggaggatggagtgtgcaagctgcccctgaatgtgttcaacaactacttcagcctgggctttgatgcccacgtgaccctggagttccacgagagccgggaggccaaccctgagaagttcaacagccgcttcaggaacaagatgttttatgctggggccgccttcagtgacttcctgcagaggagcagccgggacctgagcaagcacgtgaaggtggtgtgtgatggaacagacctgacccccaagatccaggagctgaagttccagtgcatcgtgttcctgaacatcccccgctactgtgccggcaccatgccctggggcaaccctggggaccaccacgactttgagccccagagacatgatgatggctacattgaagtcatcggcttcaccatggccagcctggccgccctgcaggtgggcggccatggagagcggctgcaccagtgccgggaggtgatgctgctgacctacaagagcatccccatgcaggtggatggagagccctgccgcctggccccagccatgatccgcatcagcctgaggaaccaggccaacatggtgcagaagagcaagaggaggacctccatgcccctgctgaatgacccccagagcgtgcctgaccggctgcgcatccgggtgaacaagatcagcctgcaggactatgagggcttccactatgacaaggagaagctgcgggaggccagcatcagtgactggctgcggaccatcgccggggagctggtgcagagctttggagccatccccctgggcatcctggtggtgcggggggactgtgacctggagacctgcaggatgtacatcgaccggctgcaggaggacctgcagagcgtgagcagcggcagccagagggtgcactaccaggaccacgagaccagcttcccccgggccctgagcgcccagaggctgagcccccgctggtgcttcctggatgccaccagcgctgaccgcttctacagaattgacaggagccaggagcacctgcactttgtgatggagatcagccaggatgagatcttcatcctggaccctgacatggtggtgtcccagcctgctggcaccccacctggcatgccagacctggtggtggagcaggccagcggcagccctgtgtccagtgaagatcatgccatcctgcaggccgtgattgctggggacctgatgaagctgattgagagctacaagaatggaggcagcctgctgatccagggccctgaccactgcagcctgctgcactatgctgccaagacaggaaatggagaaattgtgaagtacatcctggaccacggccccagcgagctgctggacatggctgacagcgagactggagaaacagccctgcacaaggccgcctgccagaggaacagagctgtgtgccagctgctggtggatgctggggccagcctgaggaagacagacagcaagggcaagaccccccaggagcgggcccagcaggccggggaccctgacctggccgcctacctggagagccggcagaactacaaggtgattggacatgaggacctggagacagctgtgtag

SEQ ID NO: 149910 - DNA, 2829 bp, synthetic construct
  misc_feature 1..2829: note = Description of Artificial Sequence: Synthetic coding sequence
  source 1..2829: mol_type = other DNA
atggctgctgctgctgagcccggggcccgggcctggctgggcggcggcagcccccggcccggcagccctgcctgcagccctgtgctgggcagcggcggccgggcccggcccggccctggccctggccctggccctgagcgggccggcgtgcgggcccctggccctgctgctgcccctggccacagcttcaggaaggtgaccctgaccaagcccaccttctgccacctgtgcagcgacttcatctggggcctggccggcttcctgtgtgatgtgtgcaacttcatgagccatgagaagtgcctgaagcacgtgcgcatcccctgcacctctgtggcccccagcctggtgcgggtgcctgtggcccactgcttcggcccccggggcctgcacaagaggaagttctgtgctgtgtgcaggaaggtgctggaggccccagccctgcactgtgaggtgtgtgagctgcacctgcacccagactgtgtgccctttgcctgcagcgactgccggcagtgccaccaggacggccaccaggaccatgacacccaccaccaccactggagggagggcaacctgcccagcggggcccgctgtgaggtgtgcaggaagacctgtggcagcagtgatgtgctggccggcgtgcgctgtgagtggtgtggggtgcaggcccacagcctgtgcagcgctgccctggccccagaatgtggcttcggccgcctgcggagcctggtgctgcccccagcctgtgtgcggctgctgcccggcggcttcagcaagacccagagcttccgcatcgtggaggccgctgagcccggggagggcggagatggagcagatggcagcgctgctgtgggccctggccgggagacccaggccaccccagagagcggcaagcagaccctgaagatctttgatggagatgatgctgtgcggcgcagccagttccggctggtgacagtgtcccggctggccggggctgaggaggtgctggaggccgccctgcgggcccaccacatccctgaggaccccggccacctggagctgtgccgcctgccccccagcagccaggcctgtgatgcctgggccggcggcaaggccggcagcgctgtgatcagcgaggagggccgcagccctggcagcggggaggccaccccagaggcctgggtgatccgggccctgccccgggcccaggaggtgctgaagatctacccaggctggctgaaggtgggcgtggcctacgtgtctgtgcgggtgacccccaagagcacagcccggtctgtggtgctggaggtgctgcccctgctgggccggcaggccgagagccctgagagcttccagctggtggaggtggccatgggctgcagacatgtgcagaggaccatgctgatggatgagcagcccctgctggaccggctgcaggacatccggcagatgtctgtgcggcaggtgtcccagacccgcttctacgtggccgagagcagagatgtggccccccacgtgtccctgtttgtgggcggcctgcccccaggcctgagccctgaggagtacagcagcctgctgcacgaggccggggccaccaaggccaccgtggtgtctgtgagccacatctacagcagccagggcgctgtggtgctggatgtggcctgctttgctgaggccgagcggctgtacatgctgctgaaggacatggctgtgcggggccgcctgctgacagccctggtgctgcctgacctgctgcacgccaagctgcccccagacagctgccccctgctggtgtttgtgaaccccaagagcggcggcctgaagggccgggacctgctgtgcagcttcaggaagctgctgaacccccaccaggtgtttgacctgaccaatggaggccccctgcccggcctgcacctgttcagccaggtgccctgcttccgggtgctggtgtgtggaggagatggcaccgtgggctgggtgctgggcgccctggaggagacccgctaccgcctggcctgcccagagcccagcgtggccatcctgcccctgggcactggaaatgacctgggccgggtgctgcgctggggcgccggctacagcggggaggaccccttctctgtgctgctgtctgtggatgaagcagatgctgtgctgatggaccgctggaccatcctgctggatgcccacgaggccggcagcgcagaaaatgacacagcagatgctgagccccccaagatcgtgcagatgagcaactactgcggcatcggcattgatgctgagctgagcctggacttccaccaggcccgggaggaggagcccgggaagttcaccagccggctgcacaacaagggcgtgtatgtgcgggtgggcctgcagaagatcagccacagccgcagcctgcacaagcagatccggctgcaggtggagcggcaggaggtggagctgcccagcattgagggcctcatcttcatcaacatccccagctggggcagcggggctgacctgtggggcagtgacagcgacaccaggtttgagaagcccaggatggatgatggcctgctggaggtggtgggcgtgactggagtggtgcacatgggccaggtgcagggcggcctgcggagcggcatcagaattgcccagggcagctacttccgggtgaccctgctgaaggccacccctgtgcaggtggatggagagccctgggtgcaggcccctggccacatgatcatctctgctgctggccccaaggtgcacatgctgaggaaggccaagcagaagcccaggagagctggcaccaccagagatgcccgggcagatgctgccccagcccctgagagtgaccccaggtag

SEQ ID NO: 149911 - DNA, 1632 bp, synthetic construct
  misc_feature 1..1632: note = Description of Artificial Sequence: Synthetic coding sequence
  source 1..1632: mol_type = other DNA
atgcctggcatggtgctgtttggaagacgctgggccatcgccagtgatgacctggtgtttcctggcttctttgagctggtggtgcgggtgctgtggtggattggcatcctgaccctgtacctgatgcaccggggcaagctggactgtgccggcggggccctgctgagcagctacctgattgtgctgatgatcctgctggccgtggtgatctgcaccgtgtctgccatcatgtgtgtgtccatgaggggcaccatctgcaaccctggccccaggaagtccatgagcaagctgctgtacatccggctggccctcttcttccctgagatggtgtgggccagcctgggcgccgcctgggtggctgatggagtgcagtgtgacagaacagtggtgaatggcatcatcgccaccgtggtggtgaggacccagatctggtgcccagccaccctgcggcgggccagcccctgcttcatcagcaacagaaccatcagcggcaccaccaagagcctgccccgctggagcgccatgccccagggcgcccccagctgccgcagcaggaccacagattatgacctggtgggcggggaccagctgaactgccacttcggcagcatcctgcacaccaccggcctgcagtacagagacttcatccacgtgtccttccatgacaaggtgtatgagctgcccttcctggtggccctggaccacaggaaggagagcgtggtggtggccgtgcggggcaccatgagcctgcaggatgtgctgacagacctgtctgctgagagcgaggtgctggatgtggagtgtgaggtgcaggaccggctggcccacaagggcatcagccaggccgcccgctacgtgtaccagaggctcatcaatgatggcatcctgagccaggccttcagcatcgcccctgagtaccgcctggtgattgtgggccacagcctgggcggcggggccgccgccctgctggccaccatgctgcgggccgcctacccccaggtgcgctgctacgccttcagccccccccggggcctgtggagcaaggccctgcaggagtacagccagagcttcatcgtgtccctggtgctgggcaaggatgtgatcccccggctgtctgtgaccaacctggaggacctgaagaggcgcatcctgcgggtggtggcccactgcaacaagcccaagtacaagatcctgctgcacggcctgtggtatgagctgtttggaggcaaccccaacaacctgcccacagagctggatggaggagaccaggaggtgctgacccagcccctgctgggggagcagagcctgctgacccgctggagccctgcctacagcttcagcagtgacagccccctggacagcagccccaagtacccacccctgtacccacctggccgcatcatccacctgcaggaggagggcgccagcggccgcttcggctgctgcagcgctgcccactacagcgccaagtggagccatgaagctgagttcagcaagatcctgattggccccaagatgctgacagaccacatgccagacatcctgatgagggccctggacagcgtggtgtctgacagagctgcctgtgtgtcctgcccagcccagggcgtgtcctctgtggatgtggcctag

SEQ ID NO: 149912 - DNA, 3129 bp, synthetic construct
  misc_feature 1..3129: note = Description of Artificial Sequence: Synthetic coding sequence
  source 1..3129: mol_type = other DNA
atgcctggcatcgtggtgttcagaagacgctggagcgtgggcagtgatgacctggtgctgcctgccatcttcctgttcctgctgcacaccacctggtttgtgatcctgtctgtggtgctgtttggcctggtgtacaacccccatgaggcctgcagcctgaacctggtggaccacggccggggctacctgggcatcctgctgagctgcatgattgctgagatggccatcatctggctgtccatgagaggaggcatcctgtacacagagccccgggacagcatgcagtatgtgctgtatgtgcggctggccatcctggtgattgagttcatctatgccatcgtgggcatcgtgtggctgacccagtactacaccagctgcaatgacctgacagccaagaatgtgaccctgggcatggtggtgtgcaactgggtggtgatcctgtctgtgtgcatcaccgtgctgtgtgtgtttgaccccaccggccgcacctttgtgaagctgcgggccaccaagaggcggcagaggaacctgcggacctacaacctgcggcaccggctggaggagggccaggccacctcctggagccggcggctgaaggtgttcctgtgctgcaccaggaccaaggacagccagagtgatgcctacagcgagatcgcctacctgtttgctgagttcttccgggacctggacatcgtgcccagcgacatcatcgccggcctggtgctgctgcggcagaggcagagggccaagagaaatgctgtgctggatgaggccaacaatgacatcctggccttcctgagcggcatgcctgtgaccaggaacaccaagtacctggacctgaagaacagccaggagatgctgcgctacaaggaggtgtgctactacatgctgtttgccctggccgcctacggctggcccatgtacctgatgaggaagccagcctgtggcctgtgccagctggcccggagctgcagctgctgcctgtgcccagcccggcccaggtttgcccctggggtgaccatcgaggaggacaactgctgcggctgcaatgccatcgccatcagaagacacttcctggatgagaacatgacagctgtggacatcgtgtacaccagctgccatgatgctgtgtatgagacccccttctacgtggccgtggaccatgacaagaagaaggtggtgatcagcatccggggcaccctgagccccaaggatgccctgacagacctgactggagatgctgagcggctgcctgtggagggccaccacggcacctggctgggccacaagggcatggtgctgtctgctgagtacatcaagaagaagctggagcaggagatggtgctgagccaggccttcggccgggacctgggccggggcaccaagcactacggcctgattgtggtgggccacagcctgggcgccggcacagctgccatcctgtccttcctgctgcggccccagtaccccaccctgaagtgctttgcctacagccccccaggcggcctgctgtctgaagatgccatggagtacagcaaggagtttgtgacagctgtggtgctgggcaaggacctggtgcccagaattggcctgagccagctggagggcttccggcggcagctgctggatgtgctgcagaggagcaccaagcccaagtggaggatcatcgtgggcgccaccaagtgcatccccaagtctgagctgcctgaggaggtggaggtgaccaccctggccagcacccggctgtggacccaccccagcgacctgaccatcgccctgagcgccagcacccccctgtacccacctggccgcatcatccacgtggtgcacaaccaccctgctgagcagtgctgctgctgtgagcaggaggagcccacctactttgccatctggggagacaacaaggccttcaatgaggtgatcatcagccctgccatgctgcacgagcacctgccctacgtggtgatggagggcctgaacaaggtgctggagaactacaacaagggcaagacagccctgctgtctgctgccaaggtgatggtgagccccacagaggtggacctgaccccagagctgatcttccagcagcagcccctgcccactggaccacccatgcccaccggcctggccctggagctgcccacagctgaccacaggaacagctctgtgcgcagcaagagccagagcgagatgagcctggagggcttcagcgagggccgcctgctgagccctgtggtggccgctgctgcccggcaggaccctgtggagctgctgctgctgagcacccaggagcggctggccgctgagctgcaggcccggcgggcccccctggccaccatggagagcctgagtgacacagagagcctgtacagctttgacagcagaagaagcagcggcttccgcagcatccggggcagccccagcctgcatgctgtgctggagagagatgagggccacctgttctacattgatcctgccatccctgaggagaaccccagcctgagcagcaggacagagctgctggccgctgacagcctgagcaagcacagccaggacacccagcccctggaggccgccctgggcagcggcggcgtgaccccagagcggccccccagcgctgctgccaatgatgaggaggaggaggtgggcggcggcggcggcggccctgccagcagaggagagctggccctgcacaacggccgcctgggggacagccccagcccccaggtgctggagtttgctgagttcatcgacagcctcttcaacctggacagcaagagcagcagcttccaggacctgtactgcatggtggtgcctgagagccccaccagtgactatgcagagggccccaagagccccagccagcaggagatcctgctgcgggcccagtttgagcccaacctggtgcccaagccaccccggctgtttgctggcagcgctgaccccagcagcggcatcagcctgagccccagcttccccctgagcagcagtggagagctgatggacctgacccccaccggcctgagcagccaggagtgcctggccgctgacaagatccgcaccagcacccccactggacatggagccagccctgccaagcaggatgagctggtgatcagcgccaggtag

SEQ ID NO: 149913 - DNA, 2019 bp, synthetic construct
  misc_feature 1..2019: note = Description of Artificial Sequence: Synthetic coding sequence
  source 1..2019: mol_type = other DNA
atgcctggcatggtgctgtttggaagacgctgggccatcgccagtgatgacctggtgtttcctggcttctttgagctggtggtgcgggtgctgtggtggattggcatcctgaccctgtacctgatgcaccggggcaagctggactgtgccggcggggccctgctgagcagctacctgattgtgctgatgatcctgctggccgtggtgatctgcaccgtgtctgccatcatgtgtgtgtccatgaggggcaccatctgcaaccctggccccaggaagtccatgagcaagctgctgtacatccggctggccctcttcttccctgagatggtgtgggccagcctgggcgccgcctgggtggctgatggagtgcagtgtgacagaacagtggtgaatggcatcatcgccaccgtggtggtgtcctggatcatcatcgccgccaccgtggtgtccatcatcatcgtgtttgaccccctgggcggcaagatggccccctacagcagcgctggccccagccacctggacagccatgacagcagccagctgctgaatggcctgaagacagctgccacctctgtgtgggagacccgcatcaagctgctgtgctgctgcatcggcaaggatgaccacaccagggtggccttcagcagcacagctgagctgttcagcacctacttcagtgacacagacctggtgcccagcgacattgctgctggcctggccctgctgcaccagcagcaggacaacatccggaacaaccaggagcccgcccaggtggtgtgccacgcccctggcagcagccaggaggccgacctggatgctgagctggagaactgccaccactacatgcagtttgctgctgctgcctacggctggcccctgtacatctacagaaaccccctgaccggcctgtgccgcatcggcggggactgctgccgcagcaggaccacagattatgacctggtgggcggggaccagctgaactgccacttcggcagcatcctgcacaccaccggcctgcagtacagagacttcatccacgtgtccttccatgacaaggtgtatgagctgcccttcctggtggccctggaccacaggaaggagagcgtggtggtggccgtgcggggcaccatgagcctgcaggatgtgctgacagacctgtctgctgagagcgaggtgctggatgtggagtgtgaggtgcaggaccggctggcccacaagggcatcagccaggccgcccgctacgtgtaccagaggctcatcaatgatggcatcctgagccaggccttcagcatcgcccctgagtaccgcctggtgattgtgggccacagcctgggcggcggcgctgctgccctgctggccaccatgctgcgggccgcctacccccaggtgcgctgctacgccttcagccccccccggggcctgtggagcaaggccctgcaggagtacagccagagcttcatcgtgtccctggtgctgggcaaggatgtgatcccccggctgtctgtgaccaacctggaggacctgaagaggcgcatcctgcgggtggtggcccactgcaacaagcccaagtacaagatcctgctgcacggcctgtggtatgagctgtttggaggcaaccccaacaacctgcccacagagctggatggaggagaccaggaggtgctgacccagcccctgctgggggagcagagcctgctgacccgctggagccctgcctacagcttcagcagtgacagccccctggacagcagccccaagtacccacccctgtacccacctggccgcatcatccacctgcaggaggagggcgccagcggccgcttcggctgctgcagcgctgcccactacagcgccaagtggagccatgaggccgagttcagcaagatcctgattggccccaagatgctgacagaccacatgccagacatcctgatgagggccctggacagcgtggtgtctgaccgggccgcctgtgtgtcctgcccagcccagggcgtgtcctctgtggatgtggcctag

SEQ ID NO: 149914 - DNA, 663 bp, synthetic construct
  misc_feature 1..663: note = Description of Artificial Sequence: Synthetic coding sequence
  source 1..663: mol_type = other DNA
atgtactgtgtgagccaccacgtgtgccagcacgagaggacccagatctggtgcccagccaccctgcggcgggccagcccctgcttcatcagcaacagaaccatcagcggcaccaccaagagcctgccccgctggagcgccatgccccagggcgcccccagctgccgcagcaggaccacagattatgacctggtgggcggggaccagctgaactgccacttcggcagcatcctgcacaccaccggcctgcagtacagagacttcatccacgtgtccttccatgacaaggtgtatgagctgcccttcctggtggccctggaccacaggaaggagagcgtggtggtggccgtgcggggcaccatgagcctgcaggatgtgctgacagacctgtctgctgagagcgaggtgctggatgtggagtgtgaggtgcaggaccggctggcccacaagggcatcagccaggccgcccgctacgtgtaccagaggctcatcaatgatggcatcctgagccaggccttcagcatcgcccctgagtaccgcctggtgattgtgggccacagcctgggcggcggcgctgctgccctgctggccaccatgctgcgggccgcctacccccaggtgcgctgctacgccttcagccccccccggggcctgtggaggtag

SEQ ID NO: 149915 - DNA, 1140 bp, synthetic construct
  misc_feature 1..1140: note = Description of Artificial Sequence: Synthetic coding sequence
  source 1..1140: mol_type = other DNA
atgtactgtgtgagccaccacgtgtgccagcacgagagctggatcatcatcgccgccaccgtggtgtccatcatcatcgtgtttgaccccctgggcggcaagatggccccctacagcagcgctggccccagccacctggacagccatgacagcagccagctgctgaatggcctgaagacagctgccacctctgtgtgggagacccgcatcaagctgctgtgctgctgcatcggcaaggatgaccacaccagggtggccttcagcagcacagctgagctgttcagcacctacttcagtgacacagacctggtgcccagcgacattgctgctggcctggccctgctgcaccagcagcaggacaacatccggaacaaccaggagcccgcccaggtggtgtgccacgcccctggcagcagccaggaggccgacctggatgctgagctggagaactgccaccactacatgcagtttgctgctgctgcctacggctggcccctgtacatctacagaaaccccctgaccggcctgtgcagaattggaggagactgctgccgcagcaggaccacagattatgacctggtgggcggggaccagctgaactgccacttcggcagcatcctgcacaccaccggcctgcagtacagagacttcatccacgtgtccttccatgacaaggtgtatgagctgcccttcctggtggccctggaccacaggaaggagagcgtggtggtggccgtgcggggcaccatgagcctgcaggatgtgctgacagacctgtctgctgagagcgaggtgctggatgtggagtgtgaggtgcaggaccggctggcccacaagggcatcagccaggccgcccgctacgtgtaccagaggctcatcaatgatggcatcctgagccaggccttcagcatcgcccctgagtaccgcctggtgattgtgggccacagcctgggcggcggggccgccgccctgctggccaccatgctgcgggccgcctacccccagcagagcagcgctggcatcttcagcgagctgcaccgggtgaccaggcctggagagggctgtgacagccaggcccagtgtgaccagctgggccgctctgaggagaagaacctggccagcggccgggccctgcagtag

SEQ ID NO: 149916 - DNA, 804 bp, synthetic construct
  misc_feature 1..804: note = Description of Artificial Sequence: Synthetic coding sequence
  source 1..804: mol_type = other DNA
atgcctggcatggtgctgtttggaagacgctgggccatcgccagtgatgacctggtgtttcctggcttctttgagctggtggtgcgggtgctgtggtggattggcatcctgaccctgtacctgatgcaccggggcaagctggactgtgccggcggggccctgctgagcagctacctgattgtgctgatgatcctgctggccgtggtgatctgcaccgtgtctgccatcatgtgtgtgtccatgaggggcaccatctgcaaccctggccccaggaagtccatgagcaagctgctgtacatccggctggccctcttcttccctgagatggtgtgggccagcctgggcgccgcctgggtggctgatggagtgcagtgtgacagaacagtggtgaatggcatcatcgccaccgtggtggtgtcctggatcatcatcgccgccaccgtggtgtccatcatcatcgtgtttgaccccctgggcggcaagatggccccctacagcagcgctggccccagccacctggacagccatgacagcagccagctgctgaatggcctgaagacagctgccacctctgtgtgggagacccgcatcaagctgctgtgctgctgcatcggcaaggatgaccacaccagggtggccttcagcagcacagctgagctgttcagcacctacttcagtgacacagacctggtgcccagcgacattgctgctggcctggccctgctgcaccagcagcaggacaacacccgggccaccggcaactgccccagaaatgatggcctgaccctgctgagcctgaactag

SEQ ID NO: 149917 - DNA, 1467 bp, synthetic construct
  misc_feature 1..1467: note = Description of Artificial Sequence: Synthetic coding sequence
  source 1..1467: mol_type = other DNA
atgggagaccggggcagcagcagaagaagaagaacaggcagccggcccagcagccatggaggcggcggccctgctgctgctgaggaggaggtgagagatgctgctgctggcccagatgtgggcgctgctggagatgccccagccccagcccccaacaaggatggagatgctggggtgggcagcggccactgggagctgcgctgccaccggctgcaggacagcctcttcagcagtgacagcggcttcagcaactaccggggcatcctgaactggtgtgtggtgatgctgatcctgagcaatgcccggctcttcctggagaacctgatcaagtatggcatcctggtggaccccatccaggtggtgtccctcttcctgaaggacccctacagctggccagccccctgcctggtgattgctgccaacgtgtttgctgtggccgccttccaggtggagaagaggctggccgtgggcgccctgacagagcaggccggcctgctgctgcacgtggccaacctggccaccatcctgtgcttccctgctgctgtggtgctgctggtggagagcatcacccctgtgggcagcctgctggccctgatggcccacaccatcctcttcctgaagctgttctcctacagagatgtgaacagctggtgcagaagagcccgggccaaggccgccagcgctgggaagaaggccagcagcgctgctgccccccacacagtgtcctacccagacaacctgacctacagagacctgtactacttcctgtttgcccccaccctgtgctatgagctgaacttccccaggagcccccgcatcaggaagcgcttcctgctgcggcgcatcctggagatgctgttcttcacccagctgcaggtgggcctcatccagcagtggatggtgcccaccatccagaacagcatgaagcccttcaaggacatggactacagccgcatcatcgagcggctgctgaagctggccgtgcccaaccacctgatctggctgatcttcttctactggctgttccacagctgcctgaatgctgtggccgagctgatgcagtttggagaccgggagttctacagagactggtggaacagcgagagcgtgacctacttctggcagaactggaacatccctgtgcacaagtggtgcatccgccacttctacaagcccatgctgcggcggggcagcagcaagtggatggccaggactggagtcttcctggccagcgccttcttccacgagtacctggtgtctgtgcccctgaggatgttccggctgtgggccttcaccggcatgatggcccagatccccctggcctggtttgtgggccgcttcttccagggcaactatggaaatgctgctgtgtggctgagcctcatcatcggccagcccatcgctgtgctgatgtatgtgcatgactactacgtgctgaactatgaggccccagctgctgaggcctag

SEQ ID NO: 149918 - DNA, 282 bp, synthetic construct
  misc_feature 1..282: note = Description of Artificial Sequence: Synthetic coding sequence
  source 1..282: mol_type = other DNA
atgaagctgctgatggtgctgatgctggccgccctgagccagcactgctacgccggcagcggctgccccctgctggagaatgtcatcagcaagaccatcaacccccaggtgtccaagacagagtacaaggagctgctgcaggagttcattgatgacaatgccaccaccaatgccattgatgagctgaaggagtgcttcctgaaccagacagatgagaccctgagcaatgtggaggtgttcatgcagctgatctatgacagcagcctgtgtgacctcttctag

SEQ ID NO: 149919 - DNA, 1038 bp, synthetic construct
  misc_feature 1..1038: note = Description of Artificial Sequence: Synthetic coding sequence
  source 1..1038: mol_type = other DNA
atgaagaccctgattgctgcctacagcggcgtgctgcggggggagcggcaggccgaggccgacaggagccagaggagccatggaggccctgccctgagccgggagggcagcggccgctggggcgtggcctgcagcgccatcctgatgtacatcttctgcacagactgctggctgattgctgtgctgtacttcacctggctggtgtttgactggaacacccccaagaagggcggcagaagaagccagtgggtgaggaactgggccgtgtggagatacttccgggactacttccccatccagctggtgaagacccacaacctgctgaccaccaggaactacatcttcggctaccacccccacggcatcatgggcctgggcgccttctgcaacttcagcacagaggccacagaggtgtccaagaagtttcctggcatccggccctacctggccaccctggccggcaacttcaggatgcctgtgctgcgggagtacctgatgtctgggggcatctgccctgtgtcccgggacaccatcgactacctgctgagcaagaatggaagtggaaatgccatcatcatcgtggtgggcggcgctgctgagagcctgagctccatgcctgggaagaatgctgtgaccctgaggaacagaaaaggatttgtgaagctggccctgcggcacggggctgacctggtgcccatctacagctttggagaaaatgaggtgtacaagcaggtgatctttgaggagggctcctggggccgctgggtgcagaagaagttccagaagtacatcggctttgccccctgcatcttccacggccggggcctcttcagcagtgacacctggggcctggtgccctacagcaagcccatcaccaccgtggtgggggagcccatcaccatccccaagctggagcaccccacccagcaggacatcgacctgtaccacaccatgtacatggaggccctggtgaagctgtttgacaagcacaagaccaagtttggcctgcctgagacagaggtgctggaggtgaactag

SEQ ID NO: 149920 - DNA, 3306 bp, synthetic construct
  misc_feature 1..3306: note = Description of Artificial Sequence: Synthetic coding sequence
  source 1..3306: mol_type = other DNA
atggagcagcccggggctgctgccagcggggccggcggcggcagcgaggagcccggcggcggccgcagcaacaagaggtctgctggcaacagagctgccaatgaggaggagaccaagaacaagcccaagctgaacatccagatcaagaccctggctgatgatgtgcgggaccgcatcaccagcttcaggaagagcacagtgaagaaggagaagcccctcatccagcaccccatcgacagccaggtggccatgtctgagttccctgctgcccagcccctgtatgatgagaggagcctgaacctgtctgagaaggaggtgctggacctgtttgagaagatgatggaggacatgaacctgaatgaggagaagaaggcccccctgaggaacaaggacttcaccaccaagcgggagatggtggtgcagtacatcagcgccacagccaagagcggcggcctgaagaacagcaagcatgagtgcaccctgagcagccaggagtatgtgcatgagctgcggagcggcatcagtgatgagaagctgctgaactgcctggagagcctgcgggtgtccctgaccagcaaccctgtgtcctgggtgaacaactttggacatgagggcctgggcctgctgctggatgagctggagaagctgctggacaagaagcagcaggagaacatcgacaagaagaaccagtacaagctgatccagtgcctgaaggccttcatgaacaacaagtttggcctgcagaggatcctgggagatgagaggagcctgctgctgctggcccgggccatcgaccccaagcagcccaacatgatgacagaaattgtgaagatcctgagcgccatctgcatcgtgggggaggagaacatcctggacaagctgctgggcgccatcaccacagctgctgagaggaacaaccgggagcgcttcagccccatcgtggagggcctggagaaccaggaggccctgcagctgcaggtggcctgcatgcagttcatcaatgccctggtgaccagcccctatgagctggacttccgcatccacctgagaaatgagttcctgcggagcggcctgaagaccatgctgcctgacctgaaggagaaggaaaatgatgagctggacatccagctgaaggtgtttgatgagaacaaggaggatgacctgacagagctgagccaccggctgaatgacatccgggcagagatggatgacatgaatgaggtgtaccacctgctgtacaacatgctgaaggacacagctgctgagaactacttcctgagcatcctgcagcacttcctgctgatcagaaatgactactacatccggccccagtactacaagatcattgaagaatgtgtgtcccagatcgtgctgcactgcagcggcatggaccctgacttcaagtaccggcagaggctggacatcgacctgacccacctgattgacagctgtgtgaacaaggccaaggtggaggagagcgagcagaaggctgctgagttcagcaagaagtttgatgaggagttcaccgcccggcaggaggcccaggccgagctgcagaagagagatgagaagatcaaggagctggaggccgagatccagcagctgcggacccaggcccaggtgctgagcagcagcagcggcatccctggccccccagctgccccacccctgcccggggtgggccccccacctcctcctccagccccacccctgcccggcggggcccccctgcccccacctcctccacccctgcccggcatgatgggcatccccccacctcctcctccacccctgctgtttggaggccccccacctcctccacccctgggcggcgtgcccccacctcctggcatcagcctgaacctgccctacggcatgaagcagaagaagatgtacaagccagaggtgtccatgaagaggatcaactggagcaagattgagcccacagagctgtctgagaactgcttctggctgcgggtgaaggaggacaagtttgagaacccagacctgtttgccaagctggccctgaactttgccacccagatcaaggtgcagaagaatgctgaggccctggaggagaagaagacaggccccaccaagaagaaggtgaaggagctgcgcatcctggaccccaagacagcccagaacctgagcatcttcctgggcagctacaggatgccctatgaggacatcagaaatgtcatcctggaggtgaatgaagacatgctgtctgaggccctgatccagaacctggtgaagcacctgcctgagcagaagatcctgaatgagctggccgagctgaagaatgaatatgatgacctgtgtgagcctgagcagtttggagtggtgatgagctctgtgaagatgctgcagccccggctgagcagcatcctcttcaagctgacctttgaggagcacatcaacaacatcaagcccagcatcatcgctgtgaccctggcctgtgaggagctgaagaagtctgagagcttcaaccggctgctggagctggtgctgctggtgggcaactacatgaacagcggcagcagaaatgcccagagcctgggcttcaagatcaacttcctgtgcaagatccgggacaccaagtctgctgaccagaagaccaccctgctgcacttcatcgctgacatctgtgaggagaagtacagagacatcctgaagtttcctgaggagctggagcacgtggagagcgccagcaaggtgtctgcccagatcctgaagagcaacctggcctccatggagcagcagatcgtgcacctggagcgggacatcaagaagttcccccaggccgagaaccagcacgacaagtttgtggagaagatgaccagcttcaccaagacagcccgggagcagtatgagaagctgagcaccatgcacaacaacatgatgaagctgtatgagaacctgggggagtacttcatctttgacagcaagacagtgtccattgaggagttcttcggggacctgaacaacttccgcaccctcttcctggaggccgtgcgggagaacaacaagaggcgggagatggaggagaagacccggcgggccaagctggccaaggagaaggccgagcaggagaagctggagcggcagaagaagaagaagcagctgattgacatcaacaaggagggagatgaaacaggagtgatggacaacctgctggaggccctgcagagcggggccgccttccgggacaggaggaagaggatccccaggaacccagacaacagaagagtgcccctggagaggagccgcagccgccacaatggagccatcagcagcaagtag

SEQ ID NO: 149921 - DNA, 3291 bp, synthetic construct
  misc_feature 1..3291: note = Description of Artificial Sequence: Synthetic coding sequence
  source 1..3291: mol_type = other DNA
atggagcagcccggggctgctgccagcggggccggcggcggcagcgaggagcccggcggcggccgcagcaacaagaggtctgctggcaacagagctgccaatgaggaggagaccaagaacaagcccaagctgaacatccagatcaagaccctggctgatgatgtgcgggaccgcatcaccagcttcaggaagagcacagtgaagaaggagaagcccctcatccagcaccccatcgacagccaggtggccatgtctgagttccctgctgcccagcccctgtatgatgagaggagcctgaacctgtctgagaaggaggtgctggacctgtttgagaagatgatggaggacatgaacctgaatgaggagaagaaggcccccctgaggaacaaggacttcaccaccaagcgggagatggtggtgcagtacatcagcgccacagccaagagcggcggcctgaagaacagcaagcatgagtgcaccctgagcagccaggagtatgtgcatgagctgcggagcggcatcagtgatgagaagctgctgaactgcctggagagcctgcgggtgtccctgaccagcaaccctgtgtcctgggtgaacaactttggacatgagggcctgggcctgctgctggatgagctggagaagctgctggacaagaagcagcaggagaacatcgacaagaagaaccagtacaagctgatccagtgcctgaaggccttcatgaacaacaagtttggcctgcagaggatcctgggagatgagaggagcctgctgctgctggcccgggccatcgaccccaagcagcccaacatgatgacagaaattgtgaagatcctgagcgccatctgcatcgtgggggaggagaacatcctggacaagctgctgggcgccatcaccacagctgctgagaggaacaaccgggagcgcttcagccccatcgtggagggcctggagaaccaggaggccctgcagctgcaggtggcctgcatgcagttcatcaatgccctggtgaccagcccctatgagctggacttccgcatccacctgagaaatgagttcctgcggagcggcctgaagaccatgctgcctgacctgaaggagaaggaaaatgatgagctggacatccagctgaaggtgtttgatgagaacaaggaggatgacctgacagagctgagccaccggctgaatgacatccgggcagagatggatgacatgaatgaggtgtaccacctgctgtacaacatgctgaaggacacagctgctgagaactacttcctgagcatcctgcagcacttcctgctgatcagaaatgactactacatccggccccagtactacaagatcattgaagaatgtgtgtcccagatcgtgctgcactgcagcggcatggaccctgacttcaagtaccggcagaggctggacatcgacctgacccacctgattgacagctgtgtgaacaaggccaaggtggaggagagcgagcagaaggctgctgagttcagcaagaagtttgatgaggagttcaccgcccggcaggaggcccaggccgagctgcagaagagagatgagaagatcaaggagctggaggccgagatccagcagctgcggacccaggcccaggtgctgagcagcagcagcggcatccctggccccccagctgccccacccctgcccggggtgggccccccacctcctcctccagccccacccctgcccggcggggcccccctgcccccacctcctccacccctgcccggcatgatgggcatccccccacctcctcctccacccctgctgtttggaggccccccacctcctccacccctgggcggcgtgcccccacctcctggcatcagcctgaacctgccctacggcatgaagcagaagaagatgtacaagccagaggtgtccatgaagaggatcaactggagcaagattgagcccacagagctgtctgagaactgcttctggctgcgggtgaaggaggacaagtttgagaacccagacctgtttgccaagctggccctgaactttgccacccagatcaaggtgcagaagaatgctgaggccctggaggagaagaagacaggccccaccaagaagaaggtgaaggagctgcgcatcctggaccccaagacagcccagaacctgagcatcttcctgggcagctacaggatgccctatgaggacatcagaaatgtcatcctggaggtgaatgaagacatgctgtctgaggccctgatccagaacctggtgaagcacctgcctgagcagaagatcctgaatgagctggccgagctgaagaatgaatatgatgacctgtgtgagcctgagcagtttggagtggtgatgagctctgtgaagatgctgcagccccggctgagcagcatcctcttcaagctgacctttgaggagcacatcaacaacatcaagcccagcatcatcgctgtgaccctggcctgtgaggagctgaagaagtctgagagcttcaaccggctgctggagctggtgctgctggtgggcaactacatgaacagcggcagcagaaatgcccagagcctgggcttcaagatcaacttcctgtgcaagatccgggacaccaagtctgctgaccagaagaccaccctgctgcacttcatcgctgacatctgtgaggagaagtacagagacatcctgaagtttcctgaggagctggagcacgtggagagcgccagcaaggtgtctgcccagatcctgaagagcaacctggcctccatggagcagcagatcgtgcacctggagcgggacatcaagaagttcccccaggccgagaaccagcacgacaagtttgtggagaagatgaccatcttcaccaagacagcccgggagcagtatgagaagctgagcaccatgcacaacaacatgatgaagctgtatgagaacctgggggagtacttcatctttgacagcaagacagtgtccattgaggagttcttcggggacctgaacaacttccgcaccctcttcctggaggccgtgcgggagaacaacaagaggcgggagatggaggagaagacccggcgggccaagctggccaaggagaaggccgagcaggagaagctggagcggcagaagaagaagaagcagctgattgacatcaacaaggagggagatgaaacaggagtgatggacaacctgctggaggccctgcagagcggggccgccttccgggacaggaggaagaggatccccaggaaccctgtggtgaaccacccctgtgccacccgggccaaccccaggtctgccacctag

SEQ ID NO: 149922 - DNA, 3291 bp, synthetic construct
  misc_feature 1..3291: note = Description of Artificial Sequence: Synthetic coding sequence
  source 1..3291: mol_type = other DNA
atggagcagcccggggctgctgccagcggggccggcggcggcagcgaggagcccggcggcggccgcagcaacaagaggtctgctggcaacagagctgccaatgaggaggagaccaagaacaagcccaagctgaacatccagatcaagaccctggctgatgatgtgcgggaccgcatcaccagcttcaggaagagcacagtgaagaaggagaagcccctcatccagcaccccatcgacagccaggtggccatgtctgagttccctgctgcccagcccctgtatgatgagaggagcctgaacctgtctgagaaggaggtgctggacctgtttgagaagatgatggaggacatgaacctgaatgaggagaagaaggcccccctgaggaacaaggacttcaccaccaagcgggagatggtggtgcagtacatcagcgccacagccaagagcggcggcctgaagaacagcaagcatgagtgcaccctgagcagccaggagtatgtgcatgagctgcggagcggcatcagtgatgagaagctgctgaactgcctggagagcctgcgggtgtccctgaccagcaaccctgtgtcctgggtgaacaactttggacatgagggcctgggcctgctgctggatgagctggagaagctgctggacaagaagcagcaggagaacatcgacaagaagaaccagtacaagctgatccagtgcctgaaggccttcatgaacaacaagtttggcctgcagaggatcctgggagatgagaggagcctgctgctgctggcccgggccatcgaccccaagcagcccaacatgatgacagaaattgtgaagatcctgagcgccatctgcatcgtgggggaggagaacatcctggacaagctgctgggcgccatcaccacagctgctgagaggaacaaccgggagcgcttcagccccatcgtggagggcctggagaaccaggaggccctgcagctgcaggtggcctgcatgcagttcatcaatgccctggtgaccagcccctatgagctggacttccgcatccacctgagaaatgagttcctgcggagcggcctgaagaccatgctgcctgacctgaaggagaaggaaaatgatgagctggacatccagctgaaggtgtttgatgagaacaaggaggatgacctgacagagctgagccaccggctgaatgacatccgggcagagatggatgacatgaatgaggtgtaccacctgctgtacaacatgctgaaggacacagctgctgagaactacttcctgagcatcctgcagcacttcctgctgatcagaaatgactactacatccggccccagtactacaagatcattgaagaatgtgtgtcccagatcgtgctgcactgcagcggcatggaccctgacttcaagtaccggcagaggctggacatcgacctgacccacctgattgacagctgtgtgaacaaggccaaggtggaggagagcgagcagaaggctgctgagttcagcaagaagtttgatgaggagttcaccgcccggcaggaggcccaggccgagctgcagaagagagatgagaagatcaaggagctggaggccgagatccagcagctgcggacccaggcccaggtgctgagcagcagcagcggcatccctggccccccagctgccccacccctgcccggggtgggccccccacctcctcctccagccccacccctgcccggcggggcccccctgcccccacctcctccacccctgcccggcatgatgggcatccccccacctcctcctccacccctgctgtttggaggccccccacctcctccacccctgggcggcgtgcccccacctcctggcatcagcctgaacctgccctacggcatgaagcagaagaagatgtacaagccagaggtgtccatgaagaggatcaactggagcaagattgagcccacagagctgtctgagaactgcttctggctgcgggtgaaggaggacaagtttgagaacccagacctgtttgccaagctggccctgaactttgccacccagatcaaggtgcagaagaatgctgaggccctggaggagaagaagacaggccccaccaagaagaaggtgaaggagctgcgcatcctggaccccaagacagcccagaacctgagcatcttcctgggcagctacaggatgccctatgaggacatcagaaatgtcatcctggaggtgaatgaagacatgctgtctgaggccctgatccagaacctggtgaagcacctgcctgagcagaagatcctgaatgagctggccgagctgaagaatgaatatgatgacctgtgtgagcctgagcagtttggagtggtgatgagctctgtgaagatgctgcagccccggctgagcagcatcctcttcaagctgacctttgaggagcacatcaacaacatcaagcccagcatcatcgctgtgaccctggcctgtgaggagctgaagaagtctgagagcttcaaccggctgctggagctggtgctgctggtgggcaactacatgaacagcggcagcagaaatgcccagagcctgggcttcaagatcaacttcctgtgcaagatccgggacaccaagtctgctgaccagaagaccaccctgctgcacttcatcgctgacatctgtgaggagaagtacagagacatcctgaagtttcctgaggagctggagcacgtggagagcgccagcaaggtgtctgcccagatcctgaagagcaacctggcctccatggagcagcagatcgtgcacctggagcgggacatcaagaagttcccccaggccgagaaccagcacgacaagtttgtggagaagatgaccagcttcaccaagacagcccgggagcagtatgagaagctgagcaccatgcacaacaacatgatgaagctgtatgagaacctgggggagtacttcatctttgacagcaagacagtgtccattgaggagttcttcggggacctgaacaacttccgcaccctcttcctggaggccgtgcgggagaacaacaagaggcgggagatggaggagaagacccggcgggccaagctggccaaggagaaggccgagcaggagaagctggagcggcagaagaagaagaagcagctgattgacatcaacaaggagggagatgaaacaggagtgatggacaacctgctggaggccctgcagagcggggccgccttccgggacaggaggaagaggatccccaggaaccctgtggtgaaccacccctgtgccacccgggccaaccccaggtctgccacctag

SEQ ID NO: 149923 - DNA, 3294 bp, synthetic construct
  misc_feature 1..3294: note = Description of Artificial Sequence: Synthetic coding sequence
  source 1..3294: mol_type = other DNA
atggagcagcccggggctgctgccagcggggccggcggcggcagcgaggagcccggcggcggccgcagcaacaagaggtctgctggcaacagagctgccaatgaggaggagaccaagaacaagcccaagctgcgggaccgcatcaccagcttcaggaagagcacagtgaagaaggagaagcccctcatccagcaccccatcgacagccaggtggccatgtctgagttccctgctgcccagcccctgtatgatgagaggagcctgaacctgtctgagaaggaggtgctggacctgtttgagaagatgatggaggacatgaacctgaatgaggagaagaaggcccccctgaggaacaaggacttcaccaccaagcgggagatggtggtgcagtacatcagcgccacagccaagagcgtcatcagcagccacatcaagggcggcctgaagaacagcaagcatgagtgcaccctgagcagccaggagtatgtgcatgagctgcggagcggcatcagtgatgagaagctgctgaactgcctggagagcctgcgggtgtccctgaccagcaaccctgtgtcctgggtgaacaactttggacatgagggcctgggcctgctgctggatgagctggagaagctgctggacaagaagcagcaggagaacatcgacaagaagaaccagtacaagctgatccagtgcctgaaggccttcatgaacaacaagtttggcctgcagaggatcctgggagatgagaggagcctgctgctgctggcccgggccatcgaccccaagcagcccaacatgatgacagaaattgtgaagatcctgagcgccatctgcatcgtgggggaggagaacatcctggacaagctgctgggcgccatcaccacagctgctgagaggaacaaccgggagcgcttcagccccatcgtggagggcctggagaaccaggaggccctgcagctgcaggtggcctgcatgcagttcatcaatgccctggtgaccagcccctatgagctggacttccgcatccacctgagaaatgagttcctgcggagcggcctgaagaccatgctgcctgacctgaaggagaaggaaaatgatgagctggacatccagctgaaggtgtttgatgagaacaaggaggatgacctgacagagctgagccaccggctgaatgacatccgggcagagatggatgacatgaatgaggtgtaccacctgctgtacaacatgctgaaggacacagctgctgagaactacttcctgagcatcctgcagcacttcctgctgatcagaaatgactactacatccggccccagtactacaagatcattgaagaatgtgtgtcccagatcgtgctgcactgcagcggcatggaccctgacttcaagtaccggcagaggctggacatcgacctgacccacctgattgacagctgtgtgaacaaggccaaggtggaggagagcgagcagaaggctgctgagttcagcaagaagtttgatgaggagttcaccgcccggcaggaggcccaggccgagctgcagaagagagatgagaagatcaaggagctggaggccgagatccagcagctgcggacccaggcccaggtgctgagcagcagcagcggcatccctggccccccagctgccccacccctgcccggggtgggccccccacctcctcctccagccccacccctgcccggcggggcccccctgcccccacctcctccacccctgcccggcatgatgggcatccccccacctcctcctccacccctgctgtttggaggccccccacctcctccacccctgggcggcgtgcccccacctcctggcatcagcctgaacctgccctacggcatgaagcagaagaagatgtacaagccagaggtgtccatgaagaggatcaactggagcaagattgagcccacagagctgtctgagaactgcttctggctgcgggtgaaggaggacaagtttgagaacccagacctgtttgccaagctggccctgaactttgccacccagatcaaggtgcagaagaatgctgaggccctggaggagaagaagacaggccccaccaagaagaaggtgaaggagctgcgcatcctggaccccaagacagcccagaacctgagcatcttcctgggcagctacaggatgccctatgaggacatcagaaatgtcatcctggaggtgaatgaagacatgctgtctgaggccctgatccagaacctggtgaagcacctgcctgagcagaagatcctgaatgagctggccgagctgaagaatgaatatgatgacctgtgtgagcctgagcagtttggagtggtgatgagctctgtgaagatgctgcagccccggctgagcagcatcctcttcaagctgacctttgaggagcacatcaacaacatcaagcccagcatcatcgctgtgaccctggcctgtgaggagctgaagaagtctgagagcttcaaccggctgctggagctggtgctgctggtgggcaactacatgaacagcggcagcagaaatgcccagagcctgggcttcaagatcaacttcctgtgcaagatccgggacaccaagtctgctgaccagaagaccaccctgctgcacttcatcgctgacatctgtgaggagaagtacagagacatcctgaagtttcctgaggagctggagcacgtggagagcgccagcaaggtgtctgcccagatcctgaagagcaacctggcctccatggagcagcagatcgtgcacctggagcgggacatcaagaagttcccccaggccgagaaccagcacgacaagtttgtggagaagatgaccatcttcaccaagacagcccgggagcagtatgagaagctgagcaccatgcacaacaacatgatgaagctgtatgagaacctgggggagtacttcatctttgacagcaagacagtgtccattgaggagttcttcggggacctgaacaacttccgcaccctcttcctggaggccgtgcgggagaacaacaagaggcgggagatggaggagaagacccggcgggccaagctggccaaggagaaggccgagcaggagaagctggagcggcagaagaagaagaagcagctgattgacatcaacaaggagggagatgaaacaggagtgatggacaacctgctggaggccctgcagagcggggccgccttccgggacaggaggaagaggatccccaggaacccagacaacagaagagtgcccctggagaggagccgcagccgccacaatggagccatcagcagcaagtag

SEQ ID NO: 149924 - DNA, 3306 bp, synthetic construct
  misc_feature 1..3306: note = Description of Artificial Sequence: Synthetic coding sequence
  source 1..3306: mol_type = other DNA
atggagcagcccggggctgctgccagcggggccggcggcggcagcgaggagcccggcggcggccgcagcaacaagaggtctgctggcaacagagctgccaatgaggaggagaccaagaacaagcccaagctgaacatccagatcaagaccctggctgatgatgtgcgggaccgcatcaccagcttcaggaagagcacagtgaagaaggagaagcccctcatccagcaccccatcgacagccaggtggccatgtctgagttccctgctgcccagcccctgtatgatgagaggagcctgaacctgtctgagaaggaggtgctggacctgtttgagaagatgatggaggacatgaacctgaatgaggagaagaaggcccccctgaggaacaaggacttcaccaccaagcgggagatggtggtgcagtacatcagcgccacagccaagagcggcggcctgaagaacagcaagcatgagtgcaccctgagcagccaggagtatgtgcatgagctgcggagcggcatcagtgatgagaagctgctgaactgcctggagagcctgcgggtgtccctgaccagcaaccctgtgtcctgggtgaacaactttggacatgagggcctgggcctgctgctggatgagctggagaagctgctggacaagaagcagcaggagaacatcgacaagaagaaccagtacaagctgatccagtgcctgaaggccttcatgaacaacaagtttggcctgcagaggatcctgggagatgagaggagcctgctgctgctggcccgggccatcgaccccaagcagcccaacatgatgacagaaattgtgaagatcctgagcgccatctgcatcgtgggggaggagaacatcctggacaagctgctgggcgccatcaccacagctgctgagaggaacaaccgggagcgcttcagccccatcgtggagggcctggagaaccaggaggccctgcagctgcaggtggcctgcatgcagttcatcaatgccctggtgaccagcccctatgagctggacttccgcatccacctgagaaatgagttcctgcggagcggcctgaagaccatgctgcctgacctgaaggagaaggaaaatgatgagctggacatccagctgaaggtgtttgatgagaacaaggaggatgacctgacagagctgagccaccggctgaatgacatccgggcagagatggatgacatgaatgaggtgtaccacctgctgtacaacatgctgaaggacacagctgctgagaactacttcctgagcatcctgcagcacttcctgctgatcagaaatgactactacatccggccccagtactacaagatcattgaagaatgtgtgtcccagatcgtgctgcactgcagcggcatggaccctgacttcaagtaccggcagaggctggacatcgacctgacccacctgattgacagctgtgtgaacaaggccaaggtggaggagagcgagcagaaggctgctgagttcagcaagaagtttgatgaggagttcaccgcccggcaggaggcccaggccgagctgcagaagagagatgagaagatcaaggagctggaggccgagatccagcagctgcggacccaggcccaggtgctgagcagcagcagcggcatccctggccccccagctgccccacccctgcccggggtgggccccccacctcctcctccagccccacccctgcccggcggggcccccctgcccccacctcctccacccctgcccggcatgatgggcatccccccacctcctcctccacccctgctgtttggaggccccccacctcctccacccctgggcggcgtgcccccacctcctggcatcagcctgaacctgccctacggcatgaagcagaagaagatgtacaagccagaggtgtccatgaagaggatcaactggagcaagattgagcccacagagctgtctgagaactgcttctggctgcgggtgaaggaggacaagtttgagaacccagacctgtttgccaagctggccctgaactttgccacccagatcaaggtgcagaagaatgctgaggccctggaggagaagaagacaggccccaccaagaagaaggtgaaggagctgcgcatcctggaccccaagacagcccagaacctgagcatcttcctgggcagctacaggatgccctatgaggacatcagaaatgtcatcctggaggtgaatgaagacatgctgtctgaggccctgatccagaacctggtgaagcacctgcctgagcagaagatcctgaatgagctggccgagctgaagaatgaatatgatgacctgtgtgagcctgagcagtttggagtggtgatgagctctgtgaagatgctgcagccccggctgagcagcatcctcttcaagctgacctttgaggagcacatcaacaacatcaagcccagcatcatcgctgtgaccctggcctgtgaggagctgaagaagtctgagagcttcaaccggctgctggagctggtgctgctggtgggcaactacatgaacagcggcagcagaaatgcccagagcctgggcttcaagatcaacttcctgtgcaagatccgggacaccaagtctgctgaccagaagaccaccctgctgcacttcatcgctgacatctgtgaggagaagtacagagacatcctgaagtttcctgaggagctggagcacgtggagagcgccagcaaggtgtctgcccagatcctgaagagcaacctggcctccatggagcagcagatcgtgcacctggagcgggacatcaagaagttcccccaggccgagaaccagcacgacaagtttgtggagaagatgaccatcttcaccaagacagcccgggagcagtatgagaagctgagcaccatgcacaacaacatgatgaagctgtatgagaacctgggggagtacttcatctttgacagcaagacagtgtccattgaggagttcttcggggacctgaacaacttccgcaccctcttcctggaggccgtgcgggagaacaacaagaggcgggagatggaggagaagacccggcgggccaagctggccaaggagaaggccgagcaggagaagctggagcggcagaagaagaagaagcagctgattgacatcaacaaggagggagatgaaacaggagtgatggacaacctgctggaggccctgcagagcggggccgccttccgggacaggaggaagaggatccccaggaacccagacaacagaagagtgcccctggagaggagccgcagccgccacaatggagccatcagcagcaagtag

SEQ ID NO: 149925 - DNA, 3312 bp, synthetic construct
  misc_feature 1..3312: note = Description of Artificial Sequence: Synthetic coding sequence
  source 1..3312: mol_type = other DNA
atggagcagcccggggctgctgccagcggggccggcggcggcagcgaggagcccggcggcggccgcagcaacaagaggtctgctggcaacagagctgccaatgaggaggagaccaagaacaagcccaagctgaacatccagatcaagaccctggctgatgatgtgcgggaccgcatcaccagcttcaggaagagcacagtgaagaaggagaagcccctcatccagcaccccatcgacagccaggtggccatgtctgagttccctgctgcccagcccctgtatgatgagaggagcctgaacctgtctgagaaggaggtgctggacctgtttgagaagatgatggaggacatgaacctgaatgaggagaagaaggcccccctgaggaacaaggacttcaccaccaagcgggagatggtggtgcagtacatcagcgccacagccaagagcatcgtgggcagcaaggtgactggaggcctgaagaacagcaagcatgaatgtaccctgagcagccaggagtatgtgcatgagctgcggagcggcatcagtgatgagaagctgctgaactgcctggagagcctgcgggtgtccctgaccagcaaccctgtgtcctgggtgaacaactttggccacgagggcctgggcctgctgctggatgagctggagaagctgctggacaagaagcagcaggagaacatcgacaagaagaaccagtacaagctgatccagtgcctgaaggccttcatgaacaacaagtttggcctgcagaggatcctgggagatgagaggagcctgctgctgctggcccgggccatcgaccccaagcagcccaacatgatgacagagatcgtgaagatcctgagcgccatctgcatcgtgggggaggagaacatcctggacaagctgctgggcgccatcaccacagctgctgagaggaacaaccgggagcgcttcagccccatcgtggagggcctggagaaccaggaggccctgcagctgcaggtggcctgcatgcagttcatcaatgccctggtgaccagcccctatgagctggacttccgcatccacctgagaaatgagttcctgcggagcggcctgaagaccatgctgcctgacctgaaggagaaggaaaatgatgagctggacatccagctgaaggtgtttgatgagaacaaggaggatgacctgacagagctgagccaccggctgaatgacatccgggcagagatggatgacatgaatgaggtgtaccacctgctgtacaacatgctgaaggacacagctgctgagaactacttcctgagcatcctgcagcacttcctgctgatcagaaatgactactacatccggccccagtactacaagatcatcgaggagtgtgtgtcccagatcgtgctgcactgcagcggcatggaccctgacttcaagtaccggcagaggctggacatcgacctgacccacctgattgacagctgtgtgaacaaggccaaggtggaggagagcgagcagaaggctgctgagttcagcaagaagtttgatgaggagttcaccgcccggcaggaggcccaggccgagctgcagaagagagatgagaagatcaaggagctggaggccgagatccagcagctgcggacccaggcccaggtgctgagcagcagcagcggcatccctggccccccagctgccccacccctgcccggggtgggccccccacctcctcctccagccccacccctgcctggaggagcccccctgcccccacctcctccacccctgcccggcatgatgggcatccccccacctcctcctccacccctgctgtttggaggccccccacctcctccacccctgggcggcgtgcccccacctcctggcatcagcctgaacctgccctacggcatgaagcagaagaagatgtacaagccagaggtgtccatgaagaggatcaactggagcaagattgagcccacagagctgtctgagaactgcttctggctgcgggtgaaggaggacaagtttgaaaatccagacctgtttgccaagctggccctgaactttgccacccagatcaaggtgcagaagaatgctgaggccctggaggagaagaagacaggccccaccaagaagaaggtgaaggagctgcgcatcctggaccccaagacagcccagaacctgagcatcttcctgggcagctacaggatgccctatgaggacatcagaaatgtcatcctggaggtgaatgaagacatgctgtctgaggccctgatccagaacctggtgaagcacctgcctgagcagaagatcctgaatgagctggccgagctgaagaatgaatatgatgacctgtgtgagcctgagcagtttggagtggtgatgagctctgtgaagatgctgcagccccggctgagcagcatcctcttcaagctgacctttgaggagcacatcaacaacatcaagcccagcatcatcgctgtgaccctggcctgtgaggagctgaagaagtctgagagcttcaaccggctgctggagctggtgctgctggtgggcaactacatgaacagcggcagcagaaatgcccagagcctgggcttcaagatcaacttcctgtgcaagatccgggacaccaagtctgctgaccagaagaccaccctgctgcacttcatcgctgacatctgtgaggagaagtacagagacatcctgaagtttcctgaggagctggagcacgtggagagcgccagcaaggtgtctgcccagatcctgaagagcaacctggcctccatggagcagcagatcgtgcacctggagcgggacatcaagaagttcccccaggccgagaaccagcacgacaagtttgtggagaagatgaccatcttcaccaagacagcccgggagcagtatgagaagctgagcaccatgcacaacaacatgatgaagctgtatgagaacctgggggagtacttcatctttgacagcaagacagtgtccattgaggagttctttggagacctgaacaacttccgcaccctcttcctggaggccgtgcgggagaacaacaagagaagagagatggaggagaagacccggcgggccaagctggccaaggagaaggccgagcaggagaagctggagcggcagaagaagaagaagcagctgattgacatcaacaaggagggagatgagaccggggtgatggacaacctgctggaggccctgcagagcggggccgccttccgggacaggaggaagaggatccccagaaatcctgtggtgaaccacccctgtgccacccgggccaaccccaggtctgccacctag

SEQ ID NO: 149926 - DNA, 735 bp, synthetic construct
  misc_feature 1..735: note = Description of Artificial Sequence: Synthetic coding sequence
  source 1..735: mol_type = other DNA
atggagctgttcctggccggccggcgggtgctggtgactggagctggaaaaggaattggccggggcaccgtgcaggccctgcacgccaccggggcccgggtggtggccgtgtccaggacccaggccgacctggacagcctggtgcgggagtgccccggcatcgagcctgtgtgtgtggacctgggggactgggaggccacagagcgggccctgggctctgtgggccctgtggacctgctggtgaacaatgctgctgtggccctgctgcagcccttcctggaggtgaccaaggaggcctttgacaggagctttgaggtgaacctgcgggccgtcatccaggtgtcccagatcgtggcccggggcctgattgcccggggcgtgcctggggccatcgtgaatgtgagcagccagtgcagccagagagctgtgaccaaccacagcgtgtactgcagcaccaagggggccctggacatgctgaccaaggtgatggccctggagctgggcccccacaagatccgggtgaatgctgtgaaccccaccgtggtgatgacctccatgggccaggccacctggagcgacccccacaaggccaagaccatgctgaaccgcatccccctgggcaagtttgctgaggtggagcacgtggtgaatgccatcctcttcctgctgagtgacagaagtggcatgaccaccggcagcaccctgcctgtggagggcggcttctgggcctgctag

SEQ ID NO: 149927 - DNA, 5769 bp, synthetic construct
  misc_feature 1..5769: note = Description of Artificial Sequence: Synthetic coding sequence
  source 1..5769: mol_type = other DNA
atgaagagccctgccctgcagcccctgtccatggccggcctgcagctgatgaccccagccagcagccccatgggccccttcttcggcctgccctggcagcaggaggccatccatgacaacatctacacccccaggaagtaccaggtggagctgctggaggccgccctggaccacaacaccatcgtgtgcctgaacacaggcagcggcaagaccttcatcgctgtgctgctgaccaaggagctgagctaccagatccggggggacttcagcagaaatggcaagaggacagtgttcctggtgaacagcgccaaccaggtggcccagcaggtgtctgctgtgaggacccacagcgacctgaaggtgggggagtacagcaacctggaggtgaatgcctcctggaccaaggagcgctggaaccaggagttcaccaagcaccaggtgctgatcatgacctgctacgtggccctgaatgtgctgaagaatggctacctgagcctgagtgacatcaacctgctggtgtttgatgagtgccacctggccatcctggaccacccctaccgggagatcatgaagctgtgtgagaactgccccagctgcccccgcatcctgggcctgacagccagcatcctgaatggaaaatgtgaccctgaggagctggaggagaagatccagaagctggagaagatcctgaagagcaatgctgagacagccacagacctggtggtgctggaccgctacaccagccagccctgtgaaattgtggtggactgtggccccttcacagacaggagcggcctgtatgagcggctgctgatggagctggaggaggccctgaacttcatcaatgactgcaacatctctgtgcacagcaaggagcgggacagcaccctcatcagcaagcagatcctgagtgactgcagagctgtgctggtggtgctgggcccctggtgtgccgacaaggtggccggcatgatggtgcgggagctgcagaagtacatcaagcatgagcaggaggagctgcacaggaagttcctgctcttcacagacaccttcctgaggaagatccacgccctgtgtgaggagcacttctccccagccagcctggacctgaagtttgtgacccccaaggtgatcaagctgctggagatcctgaggaagtacaagccctatgaaaggcagcagtttgaatctgtggagtggtacaacaacagaaaccaggacaactacgtgtcctggagcgacagtgaagatgatgatgaagatgaggagattgaggagaaggagaagccagagaccaacttccccagccccttcaccaacatcctgtgtggcatcatctttgtggagcggcgctacacagctgtggtgctgaacagactcatcaaggaggccggcaagcaggaccctgagctggcctacatcagcagcaacttcatcaccggccacggcatcggcaagaaccagcccaggaacaagcagatggaggccgagttcaggaagcaggaggaggtgctgaggaagttccgggcccacgagaccaacctgctgattgccaccagcatcgtggaggagggcgtggacatccccaagtgcaacctggtggtgcgctttgacctgcccacagagtaccgctcctatgtgcagagcaagggccgggcccgggcccccatcagcaactacatcatgctggccgacacagacaagatcaagagctttgaggaggacctgaagacctacaaggccatcgagaagatcctgaggaacaagtgcagcaagtctgtggacaccggggagacagacattgatcctgtgatggatgatgatgatgtgttccccccctacgtgctgcggccagatgatggcggcccccgggtgaccatcaacacagccatcggccacatcaaccgctactgtgcccggctgcccagcgaccccttcacccacctggcccccaagtgcaggacccgggagctgcctgatggcaccttctacagcaccctgtacctgcccatcaacagccccctgcgggccagcatcgtgggcccccccatgagctgtgtgcggctggccgagcgggtggtggccctgatctgctgtgagaagctgcacaagattggagagctggatgaccacctgatgcctgtgggcaaggagaccgtgaagtatgaggaggagctggacctgcatgatgaggaggagacctctgtgcccggccggcccggcagcaccaagaggcggcagtgctaccccaaggccatcccagaatgtctgcgggacagctaccccaggccagaccagccctgctacctgtatgtgattggcatggtgctgaccacccccctgcctgatgagctgaacttcagaagaaggaagctgtacccacctgaggacaccacccgctgcttcggcatcctgacagccaagcccatcccccagatcccccacttccctgtgtacaccaggtctggagaggtgaccatcagcattgagctgaagaagagcggcttcatgctgagcctgcagatgctggagctgatcacccggctgcaccagtacatcttcagccacatcctgcggctggagaagccagccctggagttcaagcccacagatgctgacagcgcctactgtgtgctgcccctgaatgtggtgaatgacagcagcaccctggacatcgacttcaagttcatggaggacatcgagaagtctgaggccagaattggcatccccagcaccaagtacaccaaggagaccccatttgtgttcaagctggaggactaccaggatgctgtgatcatcccccgctacagaaactttgaccagccccaccgcttctacgtggctgatgtgtacacagacctgacccccctgagcaagttccccagcccagaatatgagacctttgctgagtactacaagaccaagtacaacctggacctgaccaacctgaaccagcccctgctggatgtggaccacaccagcagccggctgaacctgctgacccccaggcacctgaaccagaagggcaaggccctgcccctgagcagcgctgagaagaggaaggccaagtgggagagcctgcagaacaagcagatcctggtgcctgagctgtgtgccatccaccccatcccagccagcctgtggaggaaggctgtgtgcctgcccagcatcctgtaccgcctgcactgcctgctgacagctgaggagctgcgggcccagacagccagtgatgctggggtgggcgtgcgcagcctgcctgctgacttccgctaccccaacctggactttggctggaagaagagcattgacagcaagagcttcatcagcatcagcaacagcagcagcgcagaaaatgacaactactgcaagcacagcaccatcgtgcctgaaaatgctgcccaccagggcgccaacagaaccagcagcctggagaaccacgaccagatgtctgtgaactgcaggaccctgctgtctgagagccctgggaagctgcacgtggaggtgtctgctgacctgacagccatcaatggcctgagctacaaccagaacctggccaacggcagctatgacctggccaacagagacttctgccagggcaaccagctgaactactacaagcaggagatccctgtgcagcccaccaccagctacagcatccagaacctgtacagctatgagaaccagccccagcccagtgatgagtgcaccctgctgagcaacaagtacctggatggaaatgccaacaagagcaccagtgatggcagccctgtgatggctgtgatgcctggcaccacagacaccatccaggtgctgaagggccgcatggattctgagcagagccccagcatcggctacagcagcaggaccctgggccccaaccctggcctcatcctgcaggccctgaccctgagcaatgccagtgatggcttcaacctggagcggctggagatgctgggggacagcttcctgaagcacgccatcaccacctacctgttctgcacctacccagatgcccacgagggccgcctgagctacatgaggagcaagaaggtgagcaactgcaacctgtaccgcctgggcaagaagaagggcctgcccagcaggatggtggtgtccatctttgacccccctgtgaactggctgcccccaggctacgtggtgaaccaggacaagagcaacacagacaagtgggagaaggatgagatgaccaaggactgcatgctggccaacgggaagctggatgaagattatgaggaggaggatgaggaggaggagagcctgatgtggagggcccccaaggaggaggccgactatgaagatgacttcctggagtatgaccaggagcacatccgcttcatcgacaacatgctgatgggcagcggggcctttgtgaagaagatcagcctgagccccttcagcaccacagattctgcctatgagtggaagatgcccaagaagagcagcctgggctccatgcccttcagcagtgactttgaagattttgactacagctcctgggatgccatgtgctacctggaccccagcaaggctgtggaggaggatgactttgtggtgggcttctggaaccccagcgaggagaactgtggggtggacaccgggaagcagagcatctcctatgacctgcacacagagcagtgcatcgctgacaagagcattgctgactgtgtggaggccctgctgggctgctacctgaccagctgtggggagcgggccgcccagctgttcctgtgcagcctgggcctgaaggtgctgcccgtcatcaagaggacagaccgggagaaggccctgtgccccacccgggagaacttcaacagccagcagaagaacctgtctgtgtcctgtgccgccgcctctgtggccagcagccgcagctctgtgctgaaggacagtgaatatggctgcctgaagatccccccacgctgcatgtttgaccacccagatgctgacaagaccctgaaccacctgatcagcggctttgaaaattttgagaagaagatcaactaccgcttcaagaacaaggcctacctgctgcaggccttcacccacgccagctaccactacaacaccatcacagactgctaccagaggctggagttcctgggagatgccatcctggactacctgatcaccaagcacctgtatgaggacccccggcagcacagccctggggtgctgacagacctgcggagcgccctggtgaacaacaccatctttgccagcctggccgtgaagtatgactaccacaagtacttcaaggctgtgtccccagagctgttccacgtgattgatgactttgtgcagttccagctggagaagaatgagatgcagggcatggattctgagctgcggcgctctgaggaggatgaggagaaggaggaggacatcgaggtgcccaaggccatgggagacatctttgagagcctggccggggccatctacatggattctggcatgagcctggagaccgtgtggcaggtgtactaccccatgatgaggcccctcatcgagaagttcagcgccaacgtgcccaggagccctgtgcgggagctgctggagatggagcctgagacagccaagttctccccagctgagaggacctatgatggcaaggtgcgggtgacagtggaggtggtgggcaagggcaagttcaagggcgtgggccgcagctacagaattgccaagtctgctgctgcccggcgggccctgcggagcctgaaggccaaccagccccaggtgcccaacagctag

SEQ ID NO: 149928 - DNA, 5769 bp, synthetic construct; identical to SEQ ID NO: 149927
  misc_feature 1..5769: note = Description of Artificial Sequence: Synthetic coding sequence
  source 1..5769: mol_type = other DNA

SEQ ID NO: 149929 - DNA, 5769 bp, synthetic construct; identical to SEQ ID NO: 149927
  misc_feature 1..5769: note = Description of Artificial Sequence: Synthetic coding sequence
  source 1..5769: mol_type = other DNA

SEQ ID NO: 149930 - DNA, 5769 bp, synthetic construct; identical to SEQ ID NO: 149927
  misc_feature 1..5769: note = Description of Artificial Sequence: Synthetic coding sequence
  source 1..5769: mol_type = other DNA

SEQ ID NO: 149931 - DNA, 213 bp, synthetic construct
  misc_feature 1..213: note = Description of Artificial Sequence: Synthetic coding sequence
  source 1..213: mol_type = other DNA
atgaagagccctgccctgcagcccctgtccatggccggcctgcagctgatgaccccagccagcagccccatgggccccttcttcggcctgccctggcagcaggaggccatccatgacaacatctacacccccaggaagtaccaggtggagctgctggaggccgccctggaccacaacaccatcgtgtgcctgaacacaggcagcggcaagtag

SEQ ID NO: 149932 - DNA, 213 bp, synthetic construct; identical to SEQ ID NO: 149931
  misc_feature 1..213: note = Description of Artificial Sequence: Synthetic coding sequence
  source 1..213: mol_type = other DNA

SEQ ID NO: 149933 - DNA, 5490 bp, synthetic construct
  misc_feature 1..5490: note = Description of Artificial Sequence: Synthetic coding sequence
  source 1..5490: mol_type = other DNA
atgaagagccctgccctgcagcccctgtccatggccggcctgcagctgatgaccccagccagcagccccatgggccccttcttcggcctgccctggcagcaggaggccatccatgacaacatctacacccccaggaagtaccaggtggagctgctggaggccgccctggaccacaacaccatcgtgtgcctgaacacaggcagcggcaagaccttcatcgctgtgctgctgaccaaggagctgagctaccagatccggggggacttcagcagaaatggcaagaggacagtgttcctggtgaacagcgccaaccaggtggcccagcaggtgtctgctgtgaggacccacagcgacctgaaggtgggggagtacagcaacctggaggtgaatgcctcctggaccaaggagcgctggaaccaggagttcaccaagcaccaggtgctgatcatgacctgctacgtggccctgaatgtgctgaagaatggctacctgagcctgagtgacatcaacctgctggtgtttgatgagtgccacctggccatcctggaccacccctaccgggagatcatgaagctgtgtgagaactgccccagctgcccccgcatcctgggcctgacagccagcatcctgaatggaaaatgtgaccctgaggagctggaggagaagatccagaagctggagaagatcctgaagagcaatgctgagacagccacagacctggtggtgctggaccgctacaccagccagccctgtgaaattgtggtggactgtggccccttcacagacaggagcggcctgtatgagcggctgctgatggagctggaggaggccctgaacttcatcaatgactgcaacatctctgtgcacagcaaggagcgggacagcaccctcatcagcaagcagatcctgagtgactgcagagctgtgctggtggtgctgggcccctggtgtgccgacaaggtggccggcatgatggtgcgggagctgcagaagtacatcaagcatgagcaggaggagctgcacaggaagttcctgctcttcacagacaccttcctgaggaagatccacgccctgtgtgaggagcacttctccccagccagcctggacctgaagtttgtgacccccaaggtgatcaagctgctggagatcctgaggaagtacaagccctatgaaaggcagcagtttgaatctgtggagtggtacaacaacagaaaccaggacaactacgtgtcctggagcgacagtgaagatgatgatgaagatgaggagattgaggagaaggagaagccagagaccaacttccccagccccttcaccaacatcctgtgtggcatcatctttgtggagcggcgctacacagctgtggtgctgaacagactcatcaaggaggccggcaagcaggaccctgagctggcctacatcagcagcaacttcatcaccggccacggcatcggcaagaaccagcccaggaacaagcagatggaggccgagttcaggaagcaggaggaggtgctgaggaagttccgggcccacgagaccaacctgctgattgccaccagcatcgtggaggagggcgtggacatccccaagtgcaacctggtggtgcgctttgacctgcccacagagtaccgctcctatgtgcagagcaagggccgggcccgggcccccatcagcaactacatcatgctggccgacacagacaagatcaagagctttgaggaggacctgaagacctacaaggccatcgagaagatcctgaggaacaagtgcagcaagtctgtggacaccggggagacagacattgatcctgtgatggatgatgatgatgtgttccccccctacgtgctgcggccagatgatggcggcccccgggtgaccatcaacacagccatcggccacatcaaccgctactgtgcccggctgcccagcgaccccttcacccacctggcccccaagtgcaggacccgggagctgcctgatggcaccttctacagcaccctgtacctgcccatcaacagccccctgcgggccagcatcgtgggcccccccatgagctgtgtgcggctggccgagcgggtggtggccctgatctgctgtgagaagctgcacaagattggagagctggatgaccacctgatgcctgtgggcaaggagaccgtgaagtatgaggaggagctggacctgcatgatgaggaggagacctctgtgcccggccggcccggcagcaccaagaggcggcagtgctaccccaaggccatcccagaatgtctgcgggacagctaccccaggccagaccagccctgctacctgtatgtgattggcatggtgctgaccacccccctgcctgatgagctgaacttcagaagaaggaagctgtacccacctgaggacaccacccgctgcttcggcatcctgacagccaagcccatcccccagatcccccacttccctgtgtacaccaggtctggagaggtgaccatcagcattgagctgaagaagagcggcttcatgctgagcctgcagatgctggagctgatcacccggctgcaccagtacatcttcagccacatcctgcggctggagaagccagccctggagttcaagcccacagatgctgacagcgcctactgtgtgctgcccctgaatgtggtgaatgacagcagcaccctggacatcgacttcaagttcatggaggacatcgagaagtctgaggccagaattggcatccccagcaccaagtacaccaaggagaccccatttgtgttcaagctggaggactaccaggatgctgtgatcatcccccgctacagaaactttgaccagccccaccgcttctacgtggctgatgtgtacacagacctgacccccctgagcaagttccccagcccagaatatgagacctttgctgagtactacaagaccaagtacaacctggacctgaccaacctgaaccagcccctgctggatgtggaccacaccagcagccggctgaacctgctgacccccaggcacctgaaccagaagggcaaggccctgcccctgagcagcgctgagaagaggaaggccaagtgggagagcctgcagaacaagcagatcctggtgcctgagctgtgtgccatccaccccatcccagccagcctgtggaggaaggctgtgtgcctgcccagcatcctgtaccgcctgcactgcctgctgacagctgaggagctgcgggcccagacagccagtgatgctggggtgggcgtgcgcagcctgcctgctgacttccgctaccccaacctggactttggctggaagaagagcattgacagcaagagcttcatcagcatcagcaacagcagcagcgcagaaaatgacaactactgcaagcacagcaccatcgtgcctgaaaatgctgcccaccagggcgccaacagaaccagcagcctggagaaccacgaccagatgtctgtgaactgcaggaccctgctgtctgagagccctgggaagctgcacgtggaggtgtctgctgacctgacagccatcaatggcctgagctacaaccagaacctggccaacggcagctatgacctggccaacagagacttctgccagggcaaccagctgaactactacaagcaggagatccctgtgcagcccaccaccagctacagcatccagaacctgtacagctatgagaaccagccccagcccagtgatgagtgcaccctgctgagcaacaagtacctggatggaaatgccaacaagagcaccagtgatggcagccctgtgatggctgtgatgcctggcaccacagacaccatccaggtgctgaagggccgcatggattctgagcagagccccagcatcggctacagcagcaggaccctgggccccaaccctggcctcatcctgcaggccctgaccctgagcaatgccagtgatggcttcaacctggagcggctggagatgctgggggacagcttcctgaagcacgccatcaccacctacctgttctgcacctacccagatgcccacgagggccgcctgagctacatgaggagcaagaaggtgagcaactgcaacctgtaccgcctgggcaagaagaagggcctgcccagcaggatggtggtgtccatctttgacccccctgtgaactggctgcccccaggctacgtggtgaaccaggacaagagcaacacagacaagtgggagaaggatgagatgaccaaggactgcatgctggccaacgggaagctggatgaagattatgaggaggaggatgaggaggaggagagcctgatgtggagggcccccaaggaggaggccgactatgaagatgacttcctggagtatgaccaggagcacatccgcttcatcgacaacatgctgatgggcagcggggcctttgtgaagaagatcagcctgagccccttcagcaccacagattctgcctatgagtggaagatgcccaagaagagcagcctgggctccatgcccttcagcagtgactttgaagattttgactacagctcctgggatgccatgtgctacctggaccccagcaaggctgtggaggaggatgactttgtggtgggcttctggaaccccagcgaggagaactgtggggtggacaccgggaagcagagcatctcctatgacctgcacacagagcagtgcatcgctgacaagagcattgctgactgtgtggaggccctgctgggctgctacctgaccagctgtggggagcgggccgcccagctgttcctgtgcagcctgggcctgaaggtgctgcccgtcatcaagaggacagaccgggagaaggccctgtgccccacccgggagaacttcaacagccagcagaagaacctgtctgtgtcctgtgccgccgcctctgtggccagcagccgcagctctgtgctgaaggacagtgaatatggctgcctgaagatccccccacgctgcatgtttgaccacccagatgctgacaagaccctgaaccacctgatcagcggctttgaaaattttgagaagaagatcaactaccgcttcaagaacaaggcctacctgctgcaggccttcacccacgccagctaccactacaacaccatcacagactgctaccagaggctggagttcctgggagatgccatcctggactacctgatcaccaagcacctgtatgaggacccccggcagcacagccctggggtgctgacagacctgcggagcgccctggtgaacaacaccatctttgccagcctggccgtgaagtatgactaccacaagtacttcaaggctgtgtccccagagctgttccacgtgattgatgactttgtgcagttccagctggagaagaatgagatgcagggcatggattctgagaagagcttcctgcagatgtaccctgtgcccctgtgtgagaactgcctgaagtggaaccagaagctgcccaacctggcccggctgcgggagctgaccaccggccgctctgagagcctgtggaagtag

SEQ ID NO: 149934 - DNA, 2463 bp, synthetic construct
  misc_feature 1..2463: note = Description of Artificial Sequence: Synthetic coding sequence
  source 1..2463: mol_type = other DNA
atgctggcctgggagagtgaccacttcctgcgcatcctggctgaaaatgacaactactgcaagcacagcaccatcgtgcctgaaaatgctgcccaccagggcgccaacagaaccagcagcctggagaaccacgaccagatgtctgtgaactgcaggaccctgctgtctgagagccctgggaagctgcacgtggaggtgtctgctgacctgacagccatcaatggcctgagctacaaccagaacctggccaacggcagctatgacctggccaacagagacttctgccagggcaaccagctgaactactacaagcaggagatccctgtgcagcccaccaccagctacagcatccagaacctgtacagctatgagaaccagccccagcccagtgatgagtgcaccctgctgagcaacaagtacctggatggaaatgccaacaagagcaccagtgatggcagccctgtgatggctgtgatgcctggcaccacagacaccatccaggtgctgaagggccgcatggattctgagcagagccccagcatcggctacagcagcaggaccctgggccccaaccctggcctcatcctgcaggccctgaccctgagcaatgccagtgatggcttcaacctggagcggctggagatgctgggggacagcttcctgaagcacgccatcaccacctacctgttctgcacctacccagatgcccacgagggccgcctgagctacatgaggagcaagaaggtgagcaactgcaacctgtaccgcctgggcaagaagaagggcctgcccagcaggatggtggtgtccatctttgacccccctgtgaactggctgcccccaggctacgtggtgaaccaggacaagagcaacacagacaagtgggagaaggatgagatgaccaaggactgcatgctggccaacgggaagctggatgaagattatgaggaggaggatgaggaggaggagagcctgatgtggagggcccccaaggaggaggccgactatgaagatgacttcctggagtatgaccaggagcacatccgcttcatcgacaacatgctgatgggcagcggggcctttgtgaagaagatcagcctgagccccttcagcaccacagattctgcctatgagtggaagatgcccaagaagagcagcctgggctccatgcccttcagcagtgactttgaagattttgactacagctcctgggatgccatgtgctacctggaccccagcaaggctgtggaggaggatgactttgtggtgggcttctggaaccccagcgaggagaactgtggggtggacaccgggaagcagagcatctcctatgacctgcacacagagcagtgcatcgctgacaagagcattgctgactgtgtggaggccctgctgggctgctacctgaccagctgtggggagcgggccgcccagctgttcctgtgcagcctgggcctgaaggtgctgcccgtcatcaagaggacagaccgggagaaggccctgtgccccacccgggagaacttcaacagccagcagaagaacctgtctgtgtcctgtgccgccgcctctgtggccagcagccgcagctctgtgctgaaggacagtgaatatggctgcctgaagatccccccacgctgcatgtttgaccacccagatgctgacaagaccctgaaccacctgatcagcggctttgaaaattttgagaagaagatcaactaccgcttcaagaacaaggcctacctgctgcaggccttcacccacgccagctaccactacaacaccatcacagactgctaccagaggctggagttcctgggagatgccatcctggactacctgatcaccaagcacctgtatgaggacccccggcagcacagccctggggtgctgacagacctgcggagcgccctggtgaacaacaccatctttgccagcctggccgtgaagtatgactaccacaagtacttcaaggctgtgtccccagagctgttccacgtgattgatgactttgtgcagttccagctggagaagaatgagatgcagggcatggattctgagctgcggcgctctgaggaggatgaggagaaggaggaggacatcgaggtgcccaaggccatgggagacatctttgagagcctggccggggccatctacatggattctggcatgagcctggagaccgtgtggcaggtgtactaccccatgatgaggcccctcatcgagaagttcagcgccaacgtgcccaggagccctgtgcgggagctgctggagatggagcctgagacagccaagttctccccagctgagaggacctatgatggcaaggtgcgggtgacagtggaggtggtgggcaagggcaagttcaagggcgtgggccgcagctacagaattgccaagtctgctgctgcccggcgggccctgcggagcctgaaggccaaccagccccaggtgcccaacagctag

SEQ ID NO: 149935 - DNA, 801 bp, synthetic construct
  misc_feature 1..801: note = Description of Artificial Sequence: Synthetic coding sequence
  source 1..801: mol_type = other DNA
atgatggccctgggcgctgctggggccaccagggtgtttgtggccatggtggccgccgccctgggcggccaccccctgctgggcgtgtctgccaccctgaacagcgtgctgaacagcaatgccatcaagaacctgcccccacccctgggcggcgctgctggccaccctggcagcgctgtgtctgctgcccctggcatcctgtacccaggcggcaacaagtaccagaccatcgacaactaccagccctacccctgtgctgaagatgaggagtgtggcacagatgagtactgtgccagccccaccagaggaggagatgctggggtgcagatctgcctggcctgcaggaagaggaggaagcgctgcatgagacatgccatgtgctgccccggcaactactgcaagaatggcatctgtgtgtccagtgaccagaaccacttccggggggagattgaggagaccatcacagagagctttggaaatgaccacagcaccctggatggctacagcaggaggaccaccctgagcagcaagatgtaccacaccaagggccaggagggctctgtgtgcctgcggagcagtgactgtgccagcggcctgtgctgtgcccggcacttctggagcaagatctgcaagcctgtgctgaaggagggccaggtgtgcaccaagcacaggaggaagggcagccacggcctggagatcttccagcgctgctactgtggggagggcctgagctgccgcatccagaaggaccaccaccaggccagcaacagcagccggctgcacacctgccagaggcactag

SEQ ID NO: 149936 - DNA, 1689 bp, synthetic construct
  misc_feature 1..1689: note = Description of Artificial Sequence: Synthetic coding sequence
  source 1..1689: mol_type = other DNA
atggatgccatgaagaggggcctgtgctgcgtgctgctgctgtgtggggctgtgtttgtgagccccagccaggagatccacgcccgcttcagaagaggagcccggagctaccaggtgatctgcagagatgagaagacccagatgatctaccagcagcaccagagctggctgcggcctgtgctgcggagcaacagagtggagtactgctggtgcaacagcggccgggcccagtgccacagcgtgcctgtgaagagctgcagcgagccccgctgcttcaatggaggcacctgccagcaggccctgtacttcagtgactttgtgtgccagtgcccagagggctttgctgggaagtgctgtgaaattgacacccgggccacctgctatgaggaccagggcatctcctaccggggcacctggagcacagctgagagcggggctgaatgtaccaactggaacagcagcgccctggcccagaagccctacagcggccggcggccagatgccatccggctgggcctgggcaaccacaactactgcaggaacccagaccgggacagcaagccctggtgctacgtgttcaaggccggcaagtacagcagcgagttctgcagcaccccagcctgcagcgagggcaacagcgactgctactttggaaatggaagtgcctaccggggcacccacagcctgacagagagcggggccagctgcctgccctggaacagcatgatcctgattggcaaggtgtacacagcccagaaccccagcgcccaggccctgggcctgggcaagcacaactactgcaggaacccagatggagatgccaagccctggtgccacgtgctgaagaacagaaggctgacctgggagtactgtgatgtgcccagctgcagcacctgtggcctgcggcagtacagccagccccagttccgcatcaagggcggcctgtttgctgacatcgccagccacccctggcaggccgccatctttgccaagcacagaagaagccctggagagcgcttcctgtgtggcggcatcctgatcagcagctgctggatcctgtctgctgcccactgcttccaggagcgcttccccccccaccacctgaccgtcatcctgggccgcacctacagagtggtgcctggagaggaggagcagaagtttgaggtggagaagtacatcgtgcacaaggagtttgatgatgacacctatgacaatgacatcgccctgctgcagctgaagagtgacagcagccgctgtgcccaggagagctctgtggtgaggacagtgtgcctgcccccagctgacctgcagctgcctgactggacagaatgtgagctgagcggctacggcaagcatgaggccctgagccccttctacagcgagcggctgaaggaggcccacgtgcggctgtaccccagcagccgctgcaccagccagcacctgctgaacagaacagtgacagacaacatgctgtgtgccggggacaccaggtctgggggcccccaggccaacctgcatgatgcctgccagggcgacagcggcggccccctggtgtgcctgaatgatggccgcatgaccctggtgggcatcatctcctggggcctgggctgcggccagaaggatgtgcctggggtgtacaccaaggtgaccaactacctggactggatccgggacaacatgaggccctag

SEQ ID NO: 149937 - DNA, 420 bp, synthetic construct
  misc_feature 1..420: note = Description of Artificial Sequence: Synthetic coding sequence
  source 1..420: mol_type = other DNA
atggtggccgctgtgctgctgggcctgtcctggctgtgcagccccctgggcgccctggtgctggacttcaacaacatccgcagcagcgctgacctgcatggagccaggaagggcagccagtgcctgagtgacacagactgcaacaccaggaagttctgcctgcagcccagagatgagaagcccttctgtgccacctgccggggcctgcggcggcgctgccagagagatgccatgtgctgccccggcaccctgtgtgtgaatgatgtgtgcaccaccatggaggatgccacccccatcctggagcggcagctggatgagcaggacggcacccacgccgagggcaccaccggccaccctgtgcaggagaaccagcccaagaggaagcccagcatcaagaagagcagctccatgctggactag

SEQ ID NO: 149938 - DNA, 1683 bp, synthetic construct
  misc_feature 1..1683: note = Description of Artificial Sequence: Synthetic coding sequence
  source 1..1683: mol_type = other DNA
atgagggacctgcccctgaccagcctggccctggtgctgagcgccctgggcgccctgctgggcacagaggccctgcgggcagaggagcctgctgtgggcaccagcggcctcatcttccgggaggacctggactggcccccaggcagcccccaggagcccctgtgcctggtggccctgggcggggacagcaatggcagcagcagccccctgcgggtggtgggcgccctgagcgcctatgagcaggccttcctgggcgctgtgcagagggcccgctggggcccccgggacctggccaccttcggcgtgtgcaacacaggagaccggcaggccgccctgcccagcctgcggcggctgggcgcctggctgcgggaccccggcggccagaggctggtggtgctgcacctggaggaggtgacctgggagcccacccccagcctgcgcttccaggagcccccacctggaggagctggccccccagagctggccctgctggtgctgtacccaggccctggccctgaggtgacagtgaccagggctggcctgcccggggcccagagcctgtgccccagccgggacacccgctacctggtgctggccgtggacaggcctgctggggcctggaggggcagcggcctggccctgaccctgcagcccagaggagaggacagccggctgagcacagcccggctgcaggccctgctgtttggagatgaccaccgctgcttcaccaggatgaccccagccctgctgctgctgcccaggtctgagcccgcccccctgcctgcccacggccagctggacacagtgcccttccccccaccccggcccagcgctgagctggaggagagcccccccagcgctgaccccttcctggagaccctgacccggctggtgcgggccctgcgggtgcccccagcccgggccagcgccccccggctggccctggaccctgatgccctggccggcttcccccagggcctggtgaacctgagtgaccctgctgccctggagcggctgctggatggagaggagcccctgctgctgctgctgcggcccacagctgccaccactggagaccctgcccccctgcatgaccccaccagcgccccctgggccacagccctggccaggagagtggccgctgagctgcaggccgctgctgctgagctgcggagcctgcccggcctgcccccagccacagcccccctgctggcccggctgctggccctgtgccctgggggccctgggggcctgggggaccccctgcgggccctgctgctgctgaaggccctgcagggcctgcgggtggagtggaggggccgggacccccggggccctggccgggcccagaggtctgctggggccacagctgctgatggcccctgtgccctgcgggagctgtctgtggacctgcgggcagagaggtctgtgctgatccctgagacctaccaggccaacaactgccagggcgtgtgtggctggccccagagcgacaggaaccccaggtatggcaaccacgtggtgctgctgctgaagatgcaggtgcggggggccgccctggcccggcccccctgctgcgtgcccacagcctatgctgggaagctgctgatcagcctgtctgaggagcgcatcagcgcccaccacgtgcccaacatggtggccacagaatgtggctgcaggtag

SEQ ID NO: 149939 - DNA, 600 bp, synthetic construct
  misc_feature 1..600: note = Description of Artificial Sequence: Synthetic coding sequence
  source 1..600: mol_type = other DNA
atgggagaggccagccccccagccccagcccggcggcacctgctggtgctgctgctgctgctgagcaccctggtgatccccagcgctgctgcccccatccatgatgctgatgcccaggagagcagcctgggcctgaccggcctgcagagcctgctgcagggcttcagccgcctcttcctgaagggcaacctgctgcggggcatcgacagcctcttcagcgcccccatggacttccggggcctgcccggcaactaccacaaggaggagaaccaggagcaccagctgggcaacaacaccctgagcagccacctgcagattgacaaggtgcccaggatggaggagaaggaggccctggtgcccatccagaaggccacagacagcttccacacagagctgcacccccgggtggccttctggatcatcaagctgccccggcggcgcagccaccaggatgccctggagggcggccactggctgtctgagaagaggcaccggctgcaggccatcagagatggcctgaggaagggcacccacaaggatgtgctggaggagggcacagagagcagcagccacagccggctgagccccaggaagacctag

SEQ ID NO: 149940 - DNA, 1896 bp, synthetic construct
  misc_feature 1..1896: note = Description of Artificial Sequence: Synthetic coding sequence
  source 1..1896: mol_type = other DNA
atggccctgaggaaggagctgctgaagagcatctggtacgccttcaccgccctggatgtggagaagagcggcaaggtgtccaagagccagctgaaggtgctgagccacaacctgtacacagtgctgcacatcccccatgaccctgtggccctggaggagcacttcagagatgatgatgatggccctgtgagcagccagggctacatgccctacctgaacaagtacatcctggacaaggtggaggagggcgcctttgtgaaggagcactttgatgagctgtgctggaccctgacagccaagaagaactacagagctgacagcaatggaaacagcatgctgagcaaccaggatgccttccggctgtggtgcctcttcaacttcctgtctgaggacaagtaccccctcatcatggtgcctgatgaggtggagtacctgctgaagaaggtgctgagctccatgagcctggaggtgtccctgggggagctggaggagctgctggcccaggaggcccaggtggcccagaccaccggcggcctgtctgtgtggcagttcctggagctgttcaacagcggccgctgcctgcggggcgtgggccgggacaccctgtccatggccatccacgaggtgtaccaggagctgatccaggatgtgctgaagcagggctacctgtggaagaggggccacctgcggaggaactgggccgagcgctggttccagctgcagcccagctgcctgtgctacttcggcagcgaggagtgcaaggagaagaggggcatcatccccctggatgcccactgctgcgtggaggtgctgcctgacagagatggcaagcgctgcatgttctgtgtgaagacagccaacagaacctatgagatgtctgccagtgacacccggcagaggcaggagtggacagctgccatccagatggccatccggctgcaggccgagggcaagaccagcctgcacaaggacctgaagcagaagagaagagagcagcgggagcagcgggagaggagaagagctgccaaggaggaggagctgctgcggctgcagcagctgcaggaggagaaggagaggaagctgcaggagctggagctgctgcaggaggcccagaggcaggccgagcggctgctgcaggaggaggaggagaggagaagaagccagcaccgggagctgcagcaggccctggagggccagctgcgggaggccgagcaggcccgggcctccatgcaggccgagatggagctgaaggaggaggaggccgcccggcagaggcagaggatcaaggagctggaggagatgcagcagaggctgcaggaggccctgcagctggaggtgaaggccaggagagatgaggagagcgtgagaattgcccagacccggctgctggaggaggaggaggagaagctgaagcagctgatgcagctgaaggaggagcaggagcgctacatcgagcgggcccagcaggagaaggaggagctgcagcaggagatggcccagcagagccgcagcctgcagcaggcccagcagcagctggaggaggtgcggcagaaccggcagagagcagatgaagatgtggaggccgcccagaggaagctgcggcaggccagcaccaacgtgaagcactggaatgtgcagatgaaccggctgatgcaccccatcgagcccggggacaagaggcctgtgaccagcagcagcttcagcggcttccagccccccctgctggcccaccgggacagcagcctgaagaggctgacccgctggggcagccagggcaacagaacacccagccccaacagcaatgagcagcagaagagcctgaatggaggagatgaggccccagccccagccagcaccccccaggaggacaagctggaccctgcccctgagaactag

SEQ ID NO: 149941 - DNA, 555 bp, synthetic construct
  misc_feature 1..555: note = Description of Artificial Sequence: Synthetic coding sequence
  source 1..555: mol_type = other DNA
atggccctgaggaaggagctgctgaagagcatctggtacgccttcaccgccctggatgtggagaagagcggcaaggtgtccaagagccagctgaaggtgctgagccacaacctgtacacagtgctgcacatcccccatgaccctgtggccctggaggagcacttcagagatgatgatgatggccctgtgagcagccagggctacatgccctacctgaacaagtacatcctggacaaggatgccttccggctgtggtgcctcttcaacttcctgtctgaggacaagtaccccctcatcatggtgcctgatgaggtggagtacctgctgaagaaggtgctgagctccatgagcctggaggtgtccctgggggagctggaggagctgctggcccaggaggcccaggtggcccagaccactggaggcctgtctgtgtggcagttcctggagctgttcaacagcggccgctgcctgcggggcgtgggccgggacaccctgtccatggccatccacgaggtgtaccaggagctgatccaggatgtgctgaagcagggctag

SEQ ID NO: 149942 - DNA, 393 bp, synthetic construct
  misc_feature 1..393: note = Description of Artificial Sequence: Synthetic coding sequence
  source 1..393: mol_type = other DNA
tgaagagatgatgatgatggccctgtgagcagccagggctacatgccctacctgaacaagtacatcctggacaaggatgccttccggctgtggtgcctcttcaacttcctgtctgaggacaagtaccccctcatcatggtgcctgatgaggtggagtacctgctgaagaaggtgctgagctccatgagcctggaggtgtccctgggggagctggaggagctgctggcccaggaggcccaggtggcccagaccactggaggcctgtctgtgtggcagttcctggagctgttcaacagcggccgctgcctgcggggcgtgggccgggacaccctgtccatggccatccacgaggtgtaccaggagctgatccaggatgtgctgaagcagggctag

SEQ ID NO: 149943 - DNA, 1131 bp, synthetic construct
  misc_feature 1..1131: note = Description of Artificial Sequence: Synthetic coding sequence
  source 1..1131: mol_type = other DNA
atgatctgcccccccaggcctcccaaggtgctgggcctgcaggtgctgcctgacagagatggcaagcgctgcatgttctgtgtgaagacagccaacagaacctatgagatgtctgccagtgacacccggcagaggcaggagtggacagctgccatccagatggccatccggctgcaggccgagggcaagaccagcctgcacaaggacctgaagcagaagaggcgggagcagcgggagcagcgggagcggcggcgggccgccaaggaggaggagctgctgcggctgcagcagctgcaggaggagaaggagaggaagctgcaggagctggagctgctgcaggaggcccagaggcaggccgagcggctgctgcaggaggaggaggagcggcggcgcagccagcaccgggagctgcagcaggccctggagggccagctgcgggaggccgagcaggcccgggcctccatgcaggccgagatggagctgaaggaggaggaggccgcccggcagaggcagaggatcaaggagctggaggagatgcagcagaggctgcaggaggccctgcagctggaggtgaaggccaggagagatgaggagagcgtgcgcatcgcccagacccggctgctggaggaggaggaggagaagctgaagcagctgatgcagctgaaggaggagcaggagcgctacatcgagcgggcccagcaggagaaggaggagctgcagcaggagatggcccagcagagccgcagcctgcagcaggcccagcagcagctggaggaggtgcggcagaaccggcagagagcagatgaagatgtggaggccgcccagaggaagctgcggcaggccagcaccaacgtgaagcactggaatgtgcagatgaaccggctgatgcaccccatcgagcccggggacaagaggcctgtgaccagcagcagcttcagcggcttccagccccccctgctggcccaccgggacagcagcctgaagaggctgacccgctggggcagccagggcaacagaacacccagccccaacagcaatgagcagcagaagagcctgaatggaggagatgaggccccagccccagccagcaccccccaggaggacaagctggaccctgccccagaaaattag

SEQ ID NO: 149944 - DNA, 708 bp, synthetic construct
  misc_feature 1..708: note = Description of Artificial Sequence: Synthetic coding sequence
  source 1..708: mol_type = other DNA
atgacccaggtgacagagaagagcacagagcaccctgagaagaccaccagcaccacagagaagaccaccaggaccccagagaagcccaccctgtacagcgagaagaccatctgcaccaagggcaagaacacccctgtgcctgagaagcccacagagaacctgggcaacaccaccctgaccacagagaccatcaaggcccctgtgaagagcacagagaaccctgagaagacagctgctgtgaccaagaccatcaagcccagcgtgaaggtgactggagacaagagcctgaccaccaccagcagccacctgaacaagacagaggtgacccaccaggtgcccaccggcagcttcaccctcatcaccagcaggaccaagctgagcagcatcaccagcgaggccactggaaatgaaagccacccctacctgaacaaggatggcagccagaagggcatccatgctggccagatgggagaaaatgacagcttccctgcctgggccatcgtgattgtggtgctggtggccgtcatcctgctgctggtgttcctgggcctcatcttcctggtgtcctacatgatgaggaccaggaggaccctgacccagaacacccagtacaatgatgctgaagatgaaggaggccccaacagctaccctgtgtacctgatggagcagcagaacctgggcatgggccagatccccagccccaggtag

SEQ ID NO: 149945 - DNA, 1524 bp, synthetic construct
  misc_feature 1..1524: note = Description of Artificial Sequence: Synthetic coding sequence
  source 1..1524: mol_type = other DNA
cccctggccaatgagaagaccaccctgagccctgctgagcccacagaaaatggagagaggacccccttcaccaatgagaagaccacccccagcagcgctgagcccacagagcacggggagaggacccccctggccaatgagatcaccacccccagcagagctgagcccacagaacatggagagagaattgccaatgagaaggccacccccagccctgccaagcccacagagcacggggagaccaccgtgaatgaagacaccacccccagcagcgctgagcccacagaaaatggagagaggacccccctggccaatgaaaacaccaccaccagccccacagagagcacagagcacggggagaggacagccaatgagaagaccacccccagccctgctgagcccacagaacatggagagaggaccccatctgccaatgagaagaccatccccagccctgccaagcccacagagcacgaggagatgacccccagcgccaatgaaaacaccacccccagccctgtgaagcccacagaacatggagagaagaccaccctggccaatgagaagatcaccctgagccctgagggccccacagagcacggggccaagaccaccagcgccaatgagaagatcacccccagcctggccaagcccacagaacatggagagaggaccaccagccccaatgacaagatcaccagcagcgctgctgagagcacagagcaccgggaccgggccaccagcgccaacgtcatcaccccagccccagctgagcccatcaagcacgccaagaggaccaccctggcccacgagaagatgacccaggtgacagagaagagcacagagcaccctgagaagaccaccagcaccacagagaagaccaccaggaccccagagaagcccaccctgtacagcgagaagaccatctgcaccaagggcaagaacacccctgtgcctgagaagcccacagagaacctgggcaacaccaccctgaccacagagaccatcaaggcccctgtgaagagcacagagaaccctgagaagacagctgctgtgaccaagaccatcaagcccagcgtgaaggtgactggagacaagagcctgaccaccaccagcagccacctgaacaagacagaggtgacccaccaggtgcccaccggcagcttcaccctcatcaccagcaggaccaagctgagcagcatcaccagcgaggccactggaaatgaaagccacccctacctgaacaaggatggcagccagaagggcatccatgctggccagatgggagaaaatgacagcttccctgcctgggccatcgtgattgtggtgctggtggccgtcatcctgctgctggtgttcctgggcctcatcttcctggtgtcctacatgatgaggaccaggaggaccctgacccagaacacccagtacaatgatgctgaagatgaaggaggccccaacagctaccctgtgtacctgatggagcagcagaacctgggcatgggccagatccccagccccaggtag

SEQ ID NO: 149946 - DNA, 1524 bp, synthetic construct
  misc_feature 1..1524: note = Description of Artificial Sequence: Synthetic coding sequence
  source 1..1524: mol_type = other DNA
cccctggccaatgagaagaccaccctgagccctgctgagcccacagaaaatggagagaggacccccttcaccaatgagaagaccacccccagcagcgctgagcccacagagcacggggagaggacccccctggccaatgagatcaccacccccagcagagctgagcccacagaacatggagagagaattgccaatgagaaggccacccccagccctgccaagcccacagagcacggggagaccaccgtgaatgaagacaccacccccagcagcgctgagcccacagaaaatggagagaggacccccctggccaatgaaaacaccaccaccagccccacagagagcacagagcacggggagaggacagccaatgagaagaccacccccagccctgctgagcccacagaacatggagagaggaccccatctgccaatgagaagaccatccccagccctgccaagcccacagagcacgaggagatgacccccagcgccaatgaaaacaccacccccagccctgtgaagcccacagaacatggagagaagaccaccctggccaatgagaagatcaccctgagccctgagggccccacagagcacggggccaagaccaccagcgccaatgagaagatcacccccagcctggccaagcccacagaacatggagagaggaccaccagccccaatgacaagatcaccagcagcgctgctgagagcacagagcaccgggaccgggccaccagcgccaacgtcatcaccccagccccagctgagcccatcaagcacgccaagaggaccaccctggcccacgagaagatgacccaggtgacagagaagagcacagagcaccctgagaagaccaccagcaccacagagaagaccaccaggaccccagagaagcccaccctgtacagcgagaagaccatctgcaccaagggcaagaacacccctgtgcctgagaagcccacagagaacctgggcaacaccaccctgaccacagagaccatcaaggcccctgtgaagagcacagagaaccctgagaagacagctgctgtgaccaagaccatcaagcccagcgtgaaggtgactggagacaagagcctgaccaccaccagcagccacctgaacaagacagaggtgacccaccaggtgcccaccggcagcttcaccctcatcaccagcaggaccaagctgagcagcatcaccagcgaggccaccggcaacaagagccacccctacctgaacaaggatggcagccagaagggcatccatgctggccagatgggagaaaatgacagcttccctgcctgggccatcgtgattgtggtgctggtggccgtcatcctgctgctggtgttcctgggcctcatcttcctggtgtcctacatgatgaggaccaggaggaccctgacccagaacacccagtacaatgatgctgaagatgaaggaggccccaacagctaccctgtgtacctgatggagcagcagaacctgggcatgggccagatccccagccccaggtag

SEQ ID NO: 149947 - DNA, 1524 bp, synthetic construct; identical to SEQ ID NO: 149945
  misc_feature 1..1524: note = Description of Artificial Sequence: Synthetic coding sequence
  source 1..1524: mol_type = other DNA

SEQ ID NO: 149948 - DNA, 1554 bp, synthetic construct
  misc_feature 1..1554: note = Description of Artificial Sequence: Synthetic coding sequence
  source 1..1554: mol_type = other DNA
atggcccagcctgtgcacagcctgtgcagcgccttcggcctgcagtgctgcctgctcttcctgctggcctcctggggcgctggggccaccaccttccaggagtaccagaagacaggagagctgagcaccagtgaccacatcttccccctgaccccaggcctggtgtacagcatcccctttgaccacatcgtgctgcacagcggccagaggcctcctgagctgcccaagagcacagagatccacgagcagaagaggcactgcaacaccaccaggcacagcaagcccacagacaagcccaccggcaacagcaagaccatcgaccacaagagcagcacagacaaccacgaggccccacccaccagcgaggagaacagcagcaaccagggcaaggaccccatgatccggaaccagaggtctgtggaccctgctgacagcaccaccacccacaaggagagcgctgggaagaagcacatcaccccagcccccaagagcaagatcaactgcaggaagagcaccaccgggaagagcacagtgaccaggaagagtgacaagacaggccggcccctggagaagtccatgagcaccctggacaagaccagcaccagcagccacaagaccaccaccagcttccacaacagcggcaacagccagaccaagcagaagagcaccagcttccctgagaagatcacagctgccagcaagaccacctacaagaccaccggcaccccagaggagagcgagaagacagaggacagcaggaccaccgtggccagtgacaagctgctgaccaagaccaccaagaacatccaggagaccatcagcgccaatgagctgacccagagcctggccgagcccacagagcacggcggccgcacagccaatgaaaacaacacccccagccctgctgagcccacagagaaccgggagaggacagccaatgaaaacaagaagaccatctgcaccaagggcaagaacacccctgtgcctgagaagcccacagagaacctgggcaacaccaccctgaccacagagaccatcaaggcccctgtgaagagcacagagaaccctgagaagacagctgctgtgaccaagaccatcaagcccagcgtgaaggtgactggagacaagagcctgaccaccaccagcagccacctgaacaagacagaggtgacccaccaggtgcccaccggcagcttcaccctcatcaccagcaggaccaagctgagcagcatcaccagcgaggccactggaaatgaaagccacccctacctgaacaaggatggcagccagaagggcatccatgctggccagatgggagaaaatgacagcttccctgcctgggccatcgtgattgtggtgctggtggccgtcatcctgctgctggtgttcctgggcctcatcttcctggtgtcctacatgatgaggaccaggaggaccctgacccagaacacccagtacaatgatgctgaagatgaaggaggccccaacagctaccctgtgtacctgatggagcagcagaacctgggcatgggccagatccccagccccaggtag

SEQ ID NO: 149949 - DNA, 1554 bp, synthetic construct; identical to SEQ ID NO: 149948
  misc_feature 1..1554: note = Description of Artificial Sequence: Synthetic coding sequence
  source 1..1554: mol_type = other DNA

SEQ ID NO: 149950 - DNA, 1554 bp, synthetic construct; identical to SEQ ID NO: 149948
  misc_feature 1..1554: note = Description of Artificial Sequence: Synthetic coding sequence
  source 1..1554: mol_type = other DNA

SEQ ID NO: 149951 - DNA, 4182 bp, synthetic construct
  misc_feature 1..4182: note = Description of Artificial Sequence: Synthetic coding sequence
  source 1..4182: mol_type = other DNA
atggcccagcctgtgcacagcctgtgcagcgccttcggcctgcagtgctgcctgctcttcctgctggcctcctggggcgctggggccaccaccttccaggagtaccagaagacaggagagctgagcaccagtgaccacatcttccccctgaccccaggcctggtgtacagcatcccctttgaccacatcgtgctgcacagcggccagaggcctcctgagctgcccaagagcacagagatccacgagcagaagaggcactgcaacaccaccaggcacagcaagcccacagacaagcccaccggcaacagcaagaccatcgaccacaagagcagcacagacaaccacgaggccccacccaccagcgaggagaacagcagcaaccagggcaaggaccccatgatccggaaccagaggtctgtggaccctgctgacagcaccaccacccacaaggagagcgctgggaagaagcacatcaccccagcccccaagagcaagatcaactgcaggaagagcaccaccgggaagagcacagtgaccaggaagagtgacaagacaggccggcccctggagaagtccatgagcaccctggacaagaccagcaccagcagccacaagaccaccaccagcttccacaacagcggcaacagccagaccaagcagaagagcaccagcttccctgagaagatcacagctgccagcaagaccacctacaagaccaccggcaccccagaggagagcgagaagacagaggacagcaggaccaccgtggccagtgacaagctgctgaccaagaccaccaagaacatccaggagaccatcagcgccaatgagctgacccagagcctggccgagcccacagagcacggcggccgcacagccaatgaaaacaacacccccagccctgctgagcccacagagaaccgggagaggacagccaatgaaaacaccaccctgagccctgctgagcccacagaaaatcgggagaggacagccaatgaaaatacagcccccttccctgctggccccacagagaaccgggagatgacagccaatgaaaacaccaccctcttccctgctgagcccacagagcacggggagaggacagccaatgaaaacaccacccccagccctgctgagcccacagaacatggagagaggacagccaatgaaaacaccacccccagccctgctgagcccacagagcacggggagaggaccccatttgccaatgacaagaccaccagcagcagcgctgagagcacagaacatggagagaggacccccctggccaatgaaaacaccacccccagccctgctgagcccacagaaaatcgggagaggacagccaatgaaaacaccacccccagccctgctggccccacagagaaccgggagaccacagccaatgagaagaccaccctgagccctgtggagcccacagaaaatcgggagaccacagccaatgagaagaccacccccagccctgctgagcccacagaaaatggccagaggaccccatttgccaatgagaagaccaccagcagcagcgctgagcccacagagcacggggagaggacccccctggccaatgaaaacaccacccccagccctgctgagcccacagagaaccgggagaggacagccaatgagaagaccacccccagccctgctgagcccacagaaaatggagacaggacccccctggccaatgagaagaccacccccagcctggccgagcccacagaaaatggccagaggaccccatttgccaatgagaagaccaccagcagcagcgctgagcccacagagcacgaggagaggacccccctggccaatgaaaacaccacccccagccctgctgagcccacagagaaccgggagaggacagccaatgaaaacaccacccccagccctgctggccccacagaaaatcgggagatgacagccaatgagaagaccaccctcttccctgctgagcccacagagaaccgggagaggacagccaatgagaagaccaccagcagccctgctgagcccacagaaaatggccagaggaccccatttgccaatgagaagaccaccagcagcagcgctgagcccacagaacatggagagaggacccccctggccaatgaaaacaccaccctgagccctgctgagcccacagaaaatcgggagaggacagccaatgagaagaccacccccttccctgctgagcccacagagaaccgggagaggacagccaatgaaaacaccacccccagccctgcccagcccacagaaaatggagacaggacccccctggccaatgagaagaccacccccagcctggccgagcccacagaaaatggcaagaggaccccatttgccaatgagaagaccaccagcagcagcgctgagcccacagagcacgccgagaggacccccctggccaatgaaaacaccaccagcagccctgctgagcccacagagaaccgggagaggacagccaatgagaagaccacccagtttcctgctgagcccacagaaaatcgggagagcacagccaatgagaagaccacccccttccctgctgagcccacagagaaccgggagtggacagccaatgaaaacaccaccctgagccctgctgagcccacagagcacgaggagatgacccccctggccaatgagaagaccaccctgagccctgctgagcccacagaaaatggagagaggacccccttcaccaatgagaagaccacccccagcagcgctgagcccacagagcacggggagaggacccccctggccaatgagatcaccacccccagcagagctgagcccacagaacatggagagagaattgccaatgagaaggccacccccagccctgccaagcccacagagcacggggagaccaccgtgaatgaagacaccacccccagcagcgctgagcccacagaaaatggagagaggacccccctggccaatgaaaacaccaccaccagccccacagagagcacagagcacggggagaggacagccaatgagaagaccacccccagccctgctgagcccacagaacatggagagaggaccccatctgccaatgagaagaccatccccagccctgccaagcccacagagcacgaggagatgacccccagcgccaatgaaaacaccacccccagccctgtgaagcccacagaacatggagagaagaccaccctggccaatgagaagatcaccctgagccctgagggccccacagagcacggggccaagaccaccagcgccaatgagaagatcacccccagcctggccaagcccacagaacatggagagaggaccaccagccccaatgacaagatcaccagcagcgctgctgagagcacagagcaccgggaccgggccaccagcgccaacgtcatcaccccagccccagctgagcccatcaagcacgccaagaggaccaccctggcccacgagaagatgacccaggtgacagagaagagcacagagcaccctgagaagaccaccagcaccacagagaagaccaccaggaccccagagaagcccaccctgtacagcgagaagaccatctgcaccaagggcaagaacacccctgtgcctgagaagcccacagagaacctgggcaacaccaccctgaccacagagaccatcaaggcccctgtgaagagcacagagaaccctgagaagacagctgctgtgaccaagaccatcaagcccagcgtgaaggtgactggagacaagagcctgaccaccaccagcagccacctgaacaagacagaggtgacccaccaggtgcccaccggcagcttcaccctcatcaccagcaggaccaagctgagcagcatcaccagcgaggccactggaaatgaaagccacccctacctgaacaaggatggcagccagaagggcatccatgctggccagatgggagaaaatgacagcttccctgcctgggccatcgtgattgtggtgctggtggccgtcatcctgctgctggtgttcctgggcctcatcttcctggtgtcctacatgatgaggaccaggaggaccctgacccagaacacccagtacaatgatgctgaagatgaaggaggccccaacagctaccctgtgtacctgatggagcagcagaacctgggcatgggccagatccccagccccaggtag

SEQ ID NO: 149952 - DNA, 2670 bp, synthetic construct
  misc_feature 1..2670: note = Description of Artificial Sequence: Synthetic coding sequence
  source 1..2670: mol_type = other DNA
atggcccagcctgtgcacagcctgtgcagcgccttcggcctgcagtgctgcctgctcttcctgctggcctcctggggcgctggggccaccaccttccaggagtaccagaagacaggagagctgagcaccagtgaccacatcttccccctgaccccaggcctggtgtacagcatcccctttgaccacatcgtgctgcacagcggccagaggcctcctgagctgcccaagagcacagagatccacgagcagaagaggcactgcaacaccaccaggcacagcaagcccacagacaagcccaccggcaacagcaagaccatcgaccacaagagcagcacagacaaccacgaggccccacccaccagcgaggagaacagcagcaaccagggcaaggaccccatgatccggaaccagaggtctgtggaccctgctgacagcaccaccacccacaaggagagcgctgggaagaagcacatcaccccagcccccaagagcaagatcaactgcaggaagagcaccaccgggaagagcacagtgaccaggaagagtgacaagacaggccggcccctggagaagtccatgagcaccctggacaagaccagcaccagcagccacaagaccaccaccagcttccacaacagcggcaacagccagaccaagcagaagagcaccagcttccctgagaagatcacagctgccagcaagaccacctacaagaccaccggcaccccagaggagagcgagaagacagaggacagcaggaccaccgtggccagtgacaagctgctgaccaagaccaccaagaacatccaggagaccatcagcgccaatgagctgacccagagcctggccgagcccacagagcacggcggccgcacagccaatgaaaacaacacccccagccctgctgagcccacagagaaccgggagaggacagccaatgaaaacaccaccctgagccctgctgagcccacagaaaatcgggagaggacagccaatgaaaatacagcccccttccctgctggccccacagagaaccgggagatgacagccaatgaaaacaccaccctcttccctgctgagcccacagagcacggggagaggacagccaatgaaaacaccacccccagccctgctgagcccacagaacatggagagaggacagccaatgaaaacaccacccccagccctgctgagcccacagagcacggggagaggaccccatttgccaatgacaagaccaccagcagcagcgctgagagcacagaacatggagagaggacccccctggccaatgaaaacaccacccccagccctgctgagcccacagaaaatcgggagaggacagccaatgaaaacaccacccccagccctgctggccccacagagaaccgggagaccacagccaatgagaagaccaccctgagccctgtggagcccacagaaaatcgggagaccacagccaatgagaagaccacccccagccctgctgagcccacagaaaatggccagaggaccccatttgccaatgagaagaccaccagcagcagcgctgagcccacagagcacggggagaggacccccctggccaatgaaaacaccacccccagccctgctgagcccacagagaaccgggagaggacagccaatgagaagaccacccccagccctgctgagcccacagaaaatggagacaggacccccctggccaatgagaagaccacccccagcctggccgagcccacagaaaatggccagaggaccccatttgccaatgagaagaccaccagcagcagcgctgagcccacagagcacgaggagaggacccccctggccaatgaaaacaccacccccagccctgctgagcccacagagaaccgggagaggacagccaatgaaaacaccacccccagccctgctggccccacagaaaatcgggagatgacagccaatgagaagaccaccctcttccctgctgagcccacagagaaccgggagaggacagccaatgagaagaccaccagcagccctgctgagcccacagaaaatggccagaggaccccatttgccaatgagaagaccaccagcagcagcgctgagcccacagaacatggagagaggacccccctggccaatgaaaacaccaccctgagccctgctggccccacagaaaatcgggagaggacagccaatgagaagaccacccccttccctgctgagcccacagagaaccgggagaggacagccaatgaaaacaccacccccagccctgcccagcccacagaaaatggagacaggacccccctggccaatgagaagaccacccccagcctggccgagcccacagaaaatggcaagaggaccccatttgccaatgagaagaccaccagcagcagcgctgagcccacagagcacgccgagaggacccccctggccaatgaaaacaccaccagcagccctgctgagcccacagagaaccgggagaggacagccaatgagaagaccacccagtttcctgctgagcccacagaaaatcgggagagcacagccaatgagaagaccacccccttccctgctgagcccacagagaaccgggagtggacagccaatgaaaacaccaccctgagccctgctgagcccacagagcacgaggagatgacccccctggcctag

SEQ ID NO: 149953 - DNA, 1653 bp, synthetic construct
  misc_feature 1..1653: note = Description of Artificial Sequence: Synthetic coding sequence
  source 1..1653: mol_type = other DNA
atggtgcccaaggctgacagcggggccttcctgctgctcttcctgctggtgctgactgtgacagagcccctgcggcctgagctgcgctgcaaccctggccagtttgcctgccgcagcggcaccatccagtgcatccccctgccctggcagtgtgatggctgggccacctgtgaagatgaaagtgatgaggccaactgcccagaggtgactggagaggtgcggccccaccacggcaaggaggccgtggacccccggcagggccgggcccggggcggggaccccagccacttccacgctgtgaatgtggcccagcctgtgcgcttcagcagcttcctgggcaagtgccccaccggctggcaccactatgagggcacagccagctgctacagagtgtacctgagcggggagaactactgggatgctgcccagacctgccagaggctgaatggcagcctggccaccttcagcacagaccaggagctgcgctttgtgctggcccaggagtgggaccagcctgagaggagctttggctggaaggaccagaggaagctgtgggtgggctaccagtatgtgatcactggaagaaacagaagcctggagggccgctgggaggtggccttcaagggcagcagcgaggtgttcctgcccccagaccccatctttgccagcgccatgtctgaaaatgacaacgtgttctgtgcccagctgcagtgcttccacttccccaccctgcggcaccacgacctgcacagctggcacgccgagagctgctatgagaagagcagcttcctgtgcaagaggagccagacctgtgtggacatcaaggacaacgtggtggatgagggcttctacttcacccccaagggagatgacccctgcctgagctgcacctgccacggcggggagcctgagatgtgtgtggccgccctgtgtgagcggccccagggctgccagcagtacaggaaggaccccaaggagtgctgcaagttcatgtgcctggaccctgatggcaacagcctgtttgacagcatggccagcggcatgaggctggtggtgtcctgcatcagcagcttcctgatcctgagcctgctgctcttcatggtgcaccggctgcggcagaggagaagagaaagaattgagagcctgattggagccaacctgcaccacttcaacctgggccgccgcatccctggctttgattatggcccagatggcttcggcaccggcctgacccccctgcacctgagtgatgatggagagggcggcaccttccacttccatgaccccccaccaccctacacagcctacaagtacccagacatcggccagccagatgatcctcctccaccctatgaggccagcatccacccagattctgtgttctatgaccctgcagatgatgatgcctttgagcctgtggaggtgtccctgcctgcccctggagatggcggcagcgagggcgccctgctgcggcggctggagcagcccctgcccacagctggggccagcctggccgacctggaggacagcgctgacagcagcagcgccctgctggtgcccccagaccctgcccagagcggcagcaccccagctgctgaggccctgcccggcggcggccgccacagccgcagcagcctgaacacagtggtgtag

SEQ ID NO: 149954 - DNA, 984 bp, synthetic construct
  misc_feature 1..984: note = Description of Artificial Sequence: Synthetic coding sequence
  source 1..984: mol_type = other DNA
atggtgcccaaggctgacagcggggccttcctgctgctcttcctgctggtgctgactgtgacagagcccctgcggcctgagctgcgctgcaaccctggccagtttgcctgccgcagcggcaccatccagtgcatccccctgccctggcagtgtgatggctgggccacctgtgaagatgaaagtgatgaggccaactgcccagaggtgactggagaggtgcggccccaccacggcaaggaggccgtggacccccggcagggccgggcccggggcggggaccccagccacttccacgctgtgaatgtggcccagcctgtgcgcttcagcagcttcctgggcaagtgccccaccggctggcaccactatgagggcacagccagctgctacagagtgtacctgagcggggagaactactgggatgctgcccagacctgccagaggctgaatggcagcctggccaccttcagcacagaccaggagctgcgctttgtgctggcccaggagtgggaccagcctgagaggagctttggctggaaggaccagaggaagctgtgggtgggctaccagtatgtgatcactggaagaaacagaagcctggagggccgctgggaggtggccttcaagggcagcagcgaggtgttcctgcccccagaccccatctttgccagcgccatgtctgaaaatgacaacgtgttctgtgcccagctgcagtgcttccacttccccaccctgcggcaccacgacctgcacagctggcacgccgagagctgctatgagaagagcagcttcctgtgcaagaggagccagacctgtgtggacatcaaggacaacgtggtggatgagggcttctacttcacccccaagggagatgacccctgcctgagctgcacctgccacggcggggagcctgagatgtgtgtggccgccctgtgtgagcggccccagggctgcagccccctgagctgcacagcccgggccacctag

SEQ ID NO: 149955 - DNA, 1530 bp, synthetic construct
  misc_feature 1..1530: note = Description of Artificial Sequence: Synthetic coding sequence
  source 1..1530: mol_type = other DNA
atggtgcccaaggctgacagcggggccttcctgctgctcttcctgctggtgctgactgtgacagagcccctgcggcctgaggtgactggagaggtgcggccccaccacggcaaggaggccgtggacccccggcagggccgggcccggggcggggaccccagccacttccacgctgtgaatgtggcccagcctgtgcgcttcagcagcttcctgggcaaatgtcccaccggctggcaccactatgagggcacagccagctgctacagagtgtacctgtctggagagaactactgggatgctgcccagacctgccagaggctgaatggcagcctggccaccttcagcacagaccaggagctgcgctttgtgctggcccaggagtgggaccagcctgagaggagctttggctggaaggaccagaggaagctgtgggtgggctaccagtatgtgatcaccggcaggaacagaagcctggagggccgctgggaggtggccttcaagggcagcagcgaggtgttcctgcccccagaccccatctttgccagcgccatgtctgaaaatgacaacgtgttctgtgcccagctgcagtgcttccacttccccaccctgcggcaccacgacctgcacagctggcatgctgagagctgctatgagaagagcagcttcctgtgcaagaggagccagacctgtgtggacatcaaggacaacgtggtggatgagggcttctacttcacccccaagggagatgacccctgcctgagctgcacctgccacggcggggagcctgagatgtgtgtggccgccctgtgtgagcggccccagggctgccagcagtacaggaaggaccccaaggagtgctgcaagttcatgtgcctggaccctgatggcaacagcctgtttgacagcatggccagcggcatgaggctggtggtgtcctgcatcagcagcttcctgatcctgagcctgctgctcttcatggtgcaccggctgcggcagaggcggcgggagcgcatcgagagcctcatcggggccaacctgcaccacttcaacctgggccgccgcatccctggctttgattatggcccagatggctttggaacaggcctgacccccctgcacctgagtgatgatggagagggcggcaccttccacttccatgaccccccaccaccctacacagcctacaagtacccagacatcggccagccagatgaccccccaccaccctatgaggccagcatccacccagacagcgtcttctatgaccctgcagatgatgatgcctttgagcctgtggaggtgtccctgcctgcccctggagatggcggcagcgagggcgccctgctgcggcggctggagcagcccctgcccacagctggggccagcctggccgacctggaggacagcgctgacagcagcagcgccctgctggtgcccccagaccctgcccagagcggcagcaccccagctgctgaggccctgcccggcggcggccgccacagccgcagcagcctgaacacagtggtgtag

SEQ ID NO: 149956 - DNA, 810 bp, synthetic construct
  misc_feature 1..810: note = Description of Artificial Sequence: Synthetic coding sequence
  source 1..810: mol_type = other DNA
atggtgcccaaggctgacagcggggccttcctgctgctcttcctgctggtgctgactgtgacagagcccctgcggcctgagctgcgctgcaaccctggccagtttgcctgccgcagcggcaccatccagtgcatccccctgccctggcagtgtgatggctgggccacctgtgaagatgaaagtgatgaggccaactgcccagaggtgactggagaggtgcggccccaccacggcaaggaggccgtggacccccggcagggccgggcccggggcggggaccccagccacttccacgctgtgaatgtggcccagcctgtgcgcttcagcaggaaatgtcccaccggctggcaccactatgagggcacagccagctgctacagagtgtacctgtctggagagaactactgggatgctgcccagacctgccagaggctgaatggcagcctggccaccttcagcacagaccaggagctgcgctttgtgctggcccaggagtgggaccagcctgagaggagctttggctggaaggaccagaggaagctgtgggtgggctaccagtatgtgatcaccggcaggaacagaagcctggagggccgctgggaggtggccttcaaggactggggcgtgtctgacaccatggtgcaccggcggctgctgtgcccctgtgtgggcaccctgcacacccacctgaagctgggcgcccgcttcagaagagtgcctgtgcggctgggcggggccctgagcagaagaagcccccggcccaccccagcctgtgagccccggctgggcgccaagaccctgcaggtgtag

SEQ ID NO: 149957 - DNA, 663 bp, synthetic construct
  misc_feature 1..663: note = Description of Artificial Sequence: Synthetic coding sequence
  source 1..663: mol_type = other DNA
atggagagatatgctggggccctggaggaggtggctgatggagcccggcagcaggagcggcactaccagctgctgagcgccctgcagagcctggtgaaggagctgcccagcagcttccagcagaggctgagctacaccaccctgagtgacctggccctggccctgctggatggcaccgtgtttgaaattgtgcagggcctgctggagatccagcacctgacagagaagagcctgtacaaccagaggctgcggctgcagaatgagcaccgggtgctgcggcaggccctgcggcagaagcaccaggaggcccagcaggcctgccggccccacaacctgcctgtgctgcaggccgcccagcagcgggagctggaggccgtggagcaccgcatccgggaggagcagagggccatggaccagaagatcgtgctggagctggacaggaaggtggccgaccagcagagcaccctggagaaggccggcgtggccggcttctacgtgaccaccaacccccaggagctgatgctgcagatgaacctgctggagctgatcaggaagctgcagcagaggggctgctgggccggcaaggccgccctgggcctgggcggcccctggcagctgcctgctgcccagtgtgaccagaagggcagccctgtgcccccatag

SEQ ID NO: 149958 - DNA, 663 bp, synthetic construct
  misc_feature 1..663: note = Description of Artificial Sequence: Synthetic coding sequence
  source 1..663: mol_type = other DNA
atggagagatatgctgctgccctggaggaggtggctgatggagcccggcagcaggagcggcactaccagctgctgagcgccctgcagagcctggtgaaggagctgcccagcagcttccagcagaggctgagctacaccaccctgagtgacctggccctggccctgctggatggcaccgtgtttgaaattgtgcagggcctgctggagatccagcacctgacagagaagagcctgtacaaccagaggctgcggctgcagaatgagcaccgggtgctgcggcaggccctgcggcagaagcaccaggaggcccagcaggcctgccggccccacaacctgcctgtggtgcaggccgcccagcagcgggagctggaggccgtggagcaccgcatccgggaggagcagagggccatggaccagaagatcatcctggagctggacaggaaggtggccgaccagcagagcaccctggagaaggccggcgtggccggcttctacgtgaccaccaacccccaggagctgatgctgcagatgaacctgctggagctgatcaggaagctgcagcagaggggctgcagagctggaaatgctgccctgggcctgggcggcccctggcagagccctgctgcccagtgtgaccagaagggcagccctgtgcccccatag

SEQ ID NO: 149959 - DNA, 2322 bp, synthetic construct
  misc_feature 1..2322: note = Description of Artificial Sequence: Synthetic coding sequence
  source 1..2322: mol_type = other DNA
atggagacagatgagagccccagccccctgccctgtggccctgctggggaggccgtgatggagagccgggcccggcccttccaggccctgccccgggagcagagccccccaccacccctgcagaccagcagcggggctgaggtgatggatgtgggcagcggaggagatggccagagcgagctgcctgctgaggaccccttcaacttctacggggccagcctgctgagcaagggcagcttcagcaagggccgcctgctgattgaccccaactgcagcggccacagccccaggacagcccggcatgccccagctgtgaggaagttctccccagacctgaagctgctgaaggatgtgaagatctctgtgtccttcacagagagctgccgcagcaaggacaggaaggtgctgtacaccggggctgagagagatgtgcgggcagaatgtggcctgctgctgagccctgtgtctggagatgtgcacgcctgcccctttggaggctctgtgggagatggagtgggcatcggcggggagagcgctgacaagaaggatgaagaaaatgagctggaccaggagaagagggtggagtatgctgtgctggatgagctggaggacttcacagacaacctggagctggatgaggagggcgctgggggcttcaccgccaaggccatcgtgcagagggacagagtggatgaggaggccctgaacttcccctatgaagatgactttgacaatgatgtggatgccctgctggaggagggcctgtgtgcccccaagaagagaagaacagaggagaagtatggaggagacagcgaccaccccagtgatggagagacctctgtgcagcccatgatgaccaagatcaagacagtgctgaagagccggggccggcccccaacagagcccctgcctgatggctggatcatgaccttccacaacagcggcgtgcctgtgtacctgcaccgggagagccgggtggtgacctggagccggccctacttcctgggcaccggcagcatcaggaagcatgacccccccctgagcagcatcccctgcctgcactacaagaagatgaaggacaatgaggagcgggagcagagcagtgacctgaccccatctggagatgtgtcccctgtgaagcccctgagccgctctgctgagctggagttccccctggatgagccagacagcatgggcgctgaccccggccccccagatgagaaggaccccctgggcgctgaggccgcccctggggccctgggccaggtgaaggccaaggtggaggtgtgcaaggatgagagcgtggacctggaggagttccgcagctacctggagaagagatttgattttgagcaggtgacagtgaagaagttccgcacctgggccgagcggcggcagttcaaccgggagatgaagaggaagcaggccgagagcgagcggcccatcctgcctgccaaccagaagctgatcaccctgtctgtgcaggatgcccccaccaagaaggagtttgtgatcaaccccaacgggaagtctgaggtgtgcatcctgcacgagtacatgcagagggtgctgaaggtgcggcctgtgtacaacttctttgaatgtgagaaccccagcgagccctttggagcctctgtgaccattgatggagtgacctacggcagcggcacagccagcagcaagaagctggccaagaacaaggccgcccgggccaccctggagatcctgatcccagactttgtgaagcagaccagcgaggagaagcccaaggacagcgaggagctggagtacttcaaccacatcagcattgaggacagccgggtgtatgagctgaccagcaaggccggcctgctgagcccctaccagatcctgcacgagtgcctgaagaggaaccacggcatgggagacaccagcatcaagtttgaggtggtgcctgggaagaaccagaagtcagaatatgtgatggcctgtgggaagcacacagtgcggggctggtgcaagaacaagagggtgggcaagcagctggccagccagaagatcctgcagctgctgcacccccacgtgaagaactggggcagcctgctgaggatgtatggccgggagagcagcaagatggtgaagcaggagaccagtgacaagagcgtcatcgagctgcagcagtatgccaagaagaacaagcccaacctgcacatcctgagcaagctgcaggaggagatgaagaggctggccgaggagcgggaggagaccaggaagaagcccaagatgagcatcgtggccagcgcccagcctggaggagagcccctgtgcaccgtggatgtgtag

SEQ ID NO: 149960 - DNA, 2223 bp, synthetic construct
  misc_feature 1..2223: note = Description of Artificial Sequence: Synthetic coding sequence
  source 1..2223: mol_type = other DNA
atggagacagatgagagccccagccccctgccctgtggccctgctggggaggccgtgatggagagccgggcccggcccttccaggccctgccccgggagcagagccccccaccacccctgcagaccagcagcggggctgaggtgatggatgtgggcagcggaggagatggccagagcgagctgcctgctgaggaccccttcaacttctacggggccagcctgctgagcaagggcagcttcagcaagggccgcctgctgattgaccccaactgcagcggccacagccccaggacagcccggcatgccccagctgtgaggaagttctccccagacctgaagctgctgaaggatgtgaagatctctgtgtccttcacagagagctgccgcagcaaggacaggaaggtgctgtacaccggggctgagagagatgtgcgggcagaatgtggcctgctgctgagccctgtgtctggagatgtgcacgcctgcccctttggaggctctgtgggagatggagtgggcatcggcggggagagcgctgacaagaaggatgaagaaaatgagctggaccaggagaagagggtggagtatgctgtgctggatgagctggaggacttcacagacaacctggagctggatgaggagggcgctgggggcttcaccgccaaggccatcgtgcagagggacagagtggatgaggaggccctgaacttcccctatgaagatgactttgacaatgatgtggatgccctgctggaggagggcctgtgtgcccccaagaagagaagaacagaggagaagtatggaggagacagcgaccaccccagtgatggagagacctctgtgcagcccatgatgaccaagatcaagacagtgctgaagagccggggccggcccccaacagagcccctgcctgatggctggatcatgaccttccacaacagcggcgtgcctgtgtacctgcaccgggagagccgggtggtgacctggagccggccctacttcctgggcaccggcagcatcaggaagcatgacccccccctgagcagcatcccctgcctgcactacaagaagatgaaggacaatgaggagcgggagcagagcagtgacctgaccccatctggagatgtgtcccctgtgaagcccctgagccgctctgctgagctggagttccccctggatgagccagacagcatgggcgctgaccccggccccccagatgagaaggaccccctgggcgctgaggccgcccctggggccctgggccaggtgaaggccaaggtggaggtgtgcaaggatgagagcgtggacctggaggagttccgcagctacctggagaagagatttgattttgagcaggtgacagtgaagaagttccgcacctgggccgagcggcggcagttcaaccgggagatgaagaggaagcaggccgagagcgagcggcccatcctgcctgccaaccagaagctgatcaccctgtctgtgcaggatgcccccaccaagaaggagtttgtgatcaaccccaacgggaagtctgaggtgtgcatcctgcacgagtacatgcagagggtgctgaaggtgcggcctgtgtacaacttctttgaatgtgcccgggccaccctggagatcctgatcccagactttgtgaagcagaccagcgaggagaagcccaaggacagcgaggagctggagtacttcaaccacatcagcattgaggacagccgggtgtatgagctgaccagcaaggccggcctgctgagcccctaccagatcctgcatgaatgtctgaagagaaatcatggcatgggagacaccagcatcaagtttgaggtggtgcctgggaagaaccagaagtcagaatatgtgatggcctgtgggaagcacacagtgcggggctggtgcaagaacaagagggtgggcaagcagctggccagccagaagatcctgcagctgctgcacccccacgtgaagaactggggcagcctgctgaggatgtatggccgggagagcagcaagatggtgaagcaggagaccagtgacaagtctgtgattgagctgcagcagtatgccaagaagaacaagcccaacctgcacatcctgagcaagctgcaggaggagatgaagaggctggccgaggagcgggaggagaccaggaagaagcccaagatgagcatcgtggccagcgcccagcccggcggggagcccctgtgcaccgtggatgtgtag

SEQ ID NO: 149961 - DNA, 2223 bp, synthetic construct; identical to SEQ ID NO: 149960
  misc_feature 1..2223: note = Description of Artificial Sequence: Synthetic coding sequence
  source 1..2223: mol_type = other DNA

SEQ ID NO: 149962 - DNA, 378 bp, synthetic construct
  misc_feature 1..378: note = Description of Artificial Sequence: Synthetic coding sequence
  source 1..378: mol_type = other DNA
atggagacagatgagagccccagccccctgccctgtggccctgctggggaggccgtgatggagagccgggcccggcccttccaggccctgccccgggagcagagccccccaccacccctgcagaccagcagcggggctgaggtgatggatgtgggcagcggaggagatggccagagcgagctgcctgctgaggaccccttcaacttctacggggccagcctgctgagcaagggcagcttcagcaagggccgcctgctgattgaccccaactgcagcggccacagccccaggacagcccggcatgccccagctgtgaggaagttctccccagacctgaagctgctgaaggatgtgaagatctctgtgtccttcacctag

SEQ ID NO: 149963 - DNA, 564 bp, synthetic construct
  misc_feature 1..564: note = Description of Artificial Sequence: Synthetic coding sequence
  source 1..564: mol_type = other DNA
atggtgggcagcctgaactgcatcgtggccgtgtcccagaacatgggcatcggcaagaatggagacctgccctggccacccctgagaaatgagttccgctacttccagaggatgaccaccaccagctctgtggagggcaagcagaacctggtgatcatgggcaagaagacctggttcagcatccctgagaagaaccggcccctgaagggccgcatcaacctggtgctgagccgggagctgaaggagcccccccagggcgcccacttcctgagccgcagcctggatgatgccctgaagctgacagagcagcctgagctggccaacaaggtggacatggtgtggatcgtgggcggcagctctgtgtacaaggaggccatgaaccaccctggccacctgaagctgtttgtgacccgcatcatgcaggactttgaaagtgacaccttcttccctgagattgacctggagaagtacaagctgctgcctgagtacccaggagtgctgagtgatgtgcaggaggagaagggcatcaagtacaagtttgaggtgtatgagaagaatgactag

SEQ ID NO: 149964 - DNA, 564 bp, synthetic construct; identical to SEQ ID NO: 149963
  misc_feature 1..564: note = Description of Artificial Sequence: Synthetic coding sequence
  source 1..564: mol_type = other DNA

SEQ ID NO: 149965 - DNA, 963 bp, synthetic construct
  misc_feature 1..963: note = Description of Artificial Sequence: Synthetic coding sequence
  source 1..963: mol_type = other DNA
atggctgctgtgaggatgctgcggacctggagcagaaatgctgggaagctgatctgtgtgcgctacttccagacctgtggaaatgtgcacgtgctgaagcccaactacgtgtgcttcttcggctaccccagcttcaagtacagccacccccaccacttcctgaagaccacagctgccctgcggggccaggtggtgcagttcaagctgagtgacatcggggagggcatccgggaggtgacagtgaaggagtggtacgtgaaggagggggacacagtgtcccagtttgacagcatctgtgaggtgcagagcgacaaggcctctgtgaccatcaccagccgctatgatggagtcatcaagaagctgtactacaacctggatgacatcgcctacgtgggcaagcccctggtggacatcgagacagaggccctgaaggacagcgaggaggatgtggtggagaccccagctgtgtcccatgatgagcacacccaccaggagatcaagggcaggaagaccctggccaccccagctgtgcggcggctggccatggagaacaacatcaagctgtctgaggtggtgggcagcggcaaggatggccgcatcctgaaggaggacatcctgaactacctggagaagcagacaggagccatcctgccccccagccccaaggtggagatcatgcctcctccacccaagcccaaggacatgacagtgcccatcctggtgtccaagccccctgtgttcaccgggaaggacaagacagagcccatcaagggcttccagaaggccatggtgaagaccatgtctgctgccctgaagatcccccacttcggctactgtgatgaaattgacctgacagagctggtgaagctgcgggaggagctgaagcccatcgcctttgcccggggcatcaagctgtccttcatgcccttcttcctgaagtactacttctcctggaagagctag

SEQ ID NO: 149966 - DNA, 1449 bp, synthetic construct
  misc_feature 1..1449: note = Description of Artificial Sequence: Synthetic coding sequence
  source 1..1449: mol_type = other DNA
atggctgctgtgaggatgctgcggacctggagcagaaatgctgggaagctgatctgtgtgcgctacttccagacctgtggaaatgtgcacgtgctgaagcccaactacgtgtgcttcttcggctaccccagcttcaagtacagccacccccaccacttcctgaagaccacagctgccctgcggggccaggtggtgcagttcaagctgagtgacatcggggagggcatccgggaggtgacagtgaaggagtggtacgtgaaggagggggacacagtgtcccagtttgacagcatctgtgaggtgcagagcgacaaggcctctgtgaccatcaccagccgctatgatggagtcatcaagaagctgtactacaacctggatgacatcgcctacgtgggcaagcccctggtggacatcgagacagaggccctgaaggacagcgaggaggatgtggtggagaccccagctgtgtcccatgatgagcacacccaccaggagatcaagggcaggaagaccctggccaccccagctgtgcggcggctggccatggagaacaacatcaagctgtctgaggtggtgggcagcggcaaggatggccgcatcctgaaggaggacatcctgaactacctggagaagcagacaggagccatcctgccccccagccccaaggtggagatcatgcctcctccacccaagcccaaggacatgacagtgcccatcctggtgtccaagccccctgtgttcaccgggaaggacaagacagagcccatcaagggcttccagaaggccatggtgaagaccatgtctgctgccctgaagatcccccacttcggctactgtgatgaaattgacctgacagagctggtgaagctgcgggaggagctgaagcccatcgcctttgcccggggcatcaagctgtccttcatgcccttcttcctgaaggccgccagcctgggcctgctgcagttccccatcctgaatgcctctgtggatgagaactgccagaacatcacctacaaggccagccacaacatcggcatcgccatggacacagagcagggcctgattgtgcccaacgtgaagaatgtgcagatctgcagcatctttgacatcgccacagagctgaaccggctgcagaagctgggctctgtgtcccagctgagcaccacagacctgaccggcggcaccttcaccctgagcaacatcggcagcatcggcggcacctttgccaagcctgtgatcatgcctcctgaggtggccatcggggccctgggcagcatcaaggccatcccccgcttcaaccagaagggggaggtgtacaaggcccagatcatgaatgtgtcctggagcgctgaccaccgggtgattgatggagccaccatgagccgcttcagcaacctgtggaagagctacctggagaacccagccttcatgctgctggacctgaagtag

SEQ ID NO: 149967 - DNA, 906 bp, synthetic construct
  misc_feature 1..906: note = Description of Artificial Sequence: Synthetic coding sequence
  source 1..906: mol_type = other DNA
atggagaacaacatcaagctgtctgaggtggtgggcagcggcaaggatggccgcatcctgaaggaggacatcctgaactacctggagaagcagacaggagccatcctgccccccagccccaaggtggagatcatgcctcctccacccaagcccaaggacatgacagtgcccatcctggtgtccaagccccctgtgttcaccgggaaggacaagacagagcccatcaagggcttccagaaggccatggtgaagaccatgtctgctgccctgaagatcccccacttcggctactgtgatgaaattgacctgacagagctggtgaagctgcgggaggagctgaagcccatcgcctttgcccggggcatcaagctgtccttcatgcccttcttcctgaaggccgccagcctgggcctgctgcagttccccatcctgaatgcctctgtggatgagaactgccagaacatcacctacaaggccagccacaacattggaattgccatggacacagagcagggcctcatcgtgcccaacgtgaagaatgtgcagatctgcagcatctttgatattgccacagagctgaaccggctgcagaagctgggctctgtgtcccagctgagcaccacagacctgactggaggcaccttcaccctgagcaacatcggcagcattggaggcacctttgccaagcctgtgatcatgcctcctgaggtggccatcggggccctgggcagcatcaaggccatcccccgcttcaaccagaagggggaggtgtacaaggcccagatcatgaatgtgtcctggagcgctgaccaccgggtgattgatggagccaccatgagccgcttcagcaacctgtggaagagctacctggagaacccagccttcatgctgctggacctgaagtag

SEQ ID NO: 149968 - DNA, 5286 bp, synthetic construct
  misc_feature 1..5286: note = Description of Artificial Sequence: Synthetic coding sequence
  source 1..5286: mol_type = other DNA
atgcagttccagctgaccctcttcctgcacctgggctggctgagctacagcaaggcccaggatgactgcaacagaggagcctgccaccccaccaccggggacctgctggtgggcaggaacacccagctgatggccagcagcacctgtggcctgagccgggcccagaagtactgcatcctgagctacctggagggggagcagaagtgcttcatctgtgacagccgcttcccctatgacccctatgaccagcccaacagccacaccattgaaaatgtgattgtgtcctttgagccagaccgggagaagaagtggtggcagagtgaaaatggcctggaccacgtgtccatccggctggacctggaggccctcttccgcttcagccacctgatcctgaccttcaagaccttccggcctgctgccatgctggtggagaggagcacagattatggccacaactggaaggtgttcaagtactttgccaaggactgtgccaccagcttccccaacatcaccagcggccaggcccagggcgtgggggacatcgtgtgtgacagcaagtacagcgacatcgagcccagcactggaggagaggtggtgctgaaggtgctggaccccagctttgaaattgagaacccctacagcccctacatccaggacctggtgaccctgaccaacctgcgcatcaacttcaccaagctgcacaccctgggagatgccctgctgggccggcggcagaatgacagcctggacaagtactactatgccctgtatgagatgattgtgcggggcagctgcttctgcaatggccacgcctctgaatgtcggcccatgcagaagatgagaggagatgtgttcagccccccaggcatggtgcacggccagtgtgtgtgccagcacaacacagatggccccaactgtgagcgctgcaaggacttcttccaggatgccccctggaggcctgctgctgacctgcaggacaatgcctgccgcagctgcagctgcaacagccacagcagccgctgccactttgacatgaccacctacctggccagcggcggcctgtctggaggagtgtgtgaggactgccagcacaacacagagggccagcactgtgaccgctgccggcccctcttctacagagaccccctgaagaccatcagtgacccctatgcctgcatcccctgtgaatgtgaccctgatggcaccatcagcggcggcatctgtgtgagccacagcgaccctgccctgggctctgtggccggccagtgcctgtgcaaggaaaatgtggagggcgccaagtgtgaccagtgcaagcccaaccactacggcctgagcgccacagaccccctgggctgccagccctgtgactgcaaccccctgggcagcctgcccttcctgacctgtgatgtggacaccggccagtgcctgtgcctgtcctatgtgactggagcccactgtgaggagtgcaccgtgggctactggggcctgggcaaccacctgcacggctgcagcccctgtgactgtgacatcggcggggcctacagcaatgtgtgcagccccaagaatggccagtgtgagtgccggccccacgtgacaggccgcagctgcagcgagcccgcccctggctacttctttgcccccctgaacttctacctgtatgaagctgaggaggccaccaccctgcagggcctggcccccctgggcagcgagaccttcggccagagccctgctgtgcacgtggtgctgggggagcctgtgcccggcaaccctgtgacctggacaggccctggctttgcccgggtgctgcctggagctggcctgcgctttgctgtgaacaacatccccttccctgtggacttcaccatcgccatccactatgagacccagagcgctgctgactggacagtgcagatcgtggtgaaccccccaggcggcagcgagcactgcatccccaagaccctgcagagcaagccccagagctttgccctgcctgctgccacccgcatcatgctgctgcccacccccatctgcctggagccagatgtgcagtacagcattgatgtgtacttcagccagcccctgcagggcgagagccacgcccacagccacgtgctggtggacagcctgggcctcatcccccagatcaacagcctggagaacttctgcagcaagcaggacctggatgagtaccagctgcacaactgtgtggagatcgccagcgccatgggcccccaggtgctgcccggggcctgtgagcggctcatcatctccatgtctgccaagctgcatgatggagctgtggcctgcaagtgccacccccagggctctgtgggcagcagctgcagccggctgggcggccagtgccagtgcaagcccctggtggtgggccgctgctgtgaccgctgcagcacaggcagctatgacctgggccaccacggctgccacccctgccactgccacccccagggcagcaaggacacagtgtgtgaccaggtgacaggccagtgcccctgccacggggaggtgtctggaagaagatgtgaccgctgcctggccggctacttcggcttccccagctgccacccctgcccctgcaacagatttgctgagctgtgtgaccctgagaccggcagctgcttcaactgtggcggcttcaccactggaagaaactgtgagcgctgcattgatggctactacggcaaccccagcagcggccagccctgccggccctgcctgtgcccagatgaccccagcagcaaccagtactttgcccacagctgctaccagaacctgtggagcagtgatgtgatctgcaactgcctgcagggctacacaggcacccagtgtggagaatgttccacaggcttctacggcaacccccgcatcagcggggccccctgccagccctgtgcctgcaacaacaacattgatgtgacagatcctgagagctgcagccgggtgactggagagtgcctgcgctgcctgcacaacacccagggcgccaactgccagctgtgcaagccaggccactacggcagcgccctgaaccagacctgccgccgctgcagctgccacgccagcggcgtgagccccatggagtgccccccaggcggcggggcctgcctgtgtgaccctgtgactggagcctgcccctgcctgcccaacgtgacaggcctggcctgtgacagatgtgctgatggctactggaacctggtgcccggccggggctgccagagctgtgactgtgaccccaggaccagccagagcagccactgtgaccagctgaccggccagtgcccctgcaagctgggctatggaggcaagcgctgcagcgagtgccaggagaactactacggggaccccccaggccgctgcatcccctgtgactgcaacagagctggcacccagaagcccatctgtgaccctgacaccggcatgtgccgctgccgggagggcgtgtctggccagagatgtgacagatgtgcccggggccacagccaggagttccccacctgcctgcagtgccacctgtgctttgaccagtgggaccacaccatcagcagcctgagcaaggctgtgcagggcctgatgaggctggccgccaacatggaggacaagcgggagaccctgcctgtgtgtgaggccgacttcaaggacctgcggggaaatgtgtctgaaattgagcgcatcctgaagcaccctgtgttccccagcggcaagttcctgaaggtgaaggactaccatgacagcgtgcggcggcagatcatgcagctgaatgagcagctgaaggctgtgtatgagttccaggacctgaaggacaccatcgagcgggccaagaatgaggccgacctgctgctggaggacctgcaggaggagattgacctgcagagctctgtgctgaatgccagcattgctgacagcagcgagaacatcaagaagtactaccacatcagcagcagcgctgagaagaagatcaatgagaccagcagcaccatcaacaccagcgccaacaccagaaatgacctgctgaccatcctggacaccctgaccagcaagggcaacctgagcctggagcggctgaagcagatcaagatcccagacatccagatcctgaatgagaaggtgtgtggggaccctggaaatgtgccctgtgtgcccctgccctgtggcggggccctgtgcaccggcaggaagggccacaggaagtgccggggccctggctgccacggcagcctgaccctgagcaccaatgccctgcagaaggcccaggaggccaagagcatcatccggaacctggacaagcaggtgcggggcctgaagaaccagatcgagagcatcagcgagcaggccgaggtgtccaagaacaatgccctgcagctgcgggagaagctgggcaacatccggaaccagagcgacagcgaggaggagaacatcaacctcttcatcaagaaggtgaagaacttcctgctggaggagaatgtgcccccagaagatattgagaaggtggccaacggggtgctggacatccacctgcccatccccagccagaacctgacagatgagctggtgaagatccagaagcacatgcagctgtgtgaggactacagaacagatgaaaatcggctgaatgaggaggctgatggagcccagaagctgctggtgaaggccaaggctgctgagaaggccgccaacatcctgctgaacctggacaagaccctgaaccagctgcagcaggcccagatcacccagggccgggccaacagcaccatcacccagctgacagccaacatcaccaagatcaagaagaatgtgctgcaggccgagaaccagacccgggagatgaagtctgagctggagctggccaagcagaggagcggcctggaggatggcctgagcctgctgcagaccaagctgcagaggcaccaggaccatgctgtgaatgccaaggtgcaggccgagagcgcccagcaccaggccggcagcctggagaaggagtttgtggagctgaagaagcagtatgccatcctgcagaggaagaccagcaccaccggcctgaccaaggagaccctgggcaaggtgaagcagctgaaggatgctgctgagaagctggccggggacacagaggccaagatccgccgcatcacagacctggagaggaagatccaggacctgaacctgagccggcaggccaaggctgaccagctgcgcatcctggaggaccaggtggtggccatcaagaatgaaattgtggagcaggagaagaagtatgcccgctgctacagctag

SEQ ID NO: 149969 - DNA, 1530 bp, synthetic construct; identical to SEQ ID NO: 144630
  misc_feature 1..1530: note = Description of Artificial Sequence: Synthetic coding sequence
  source 1..1530: mol_type = other DNA

SEQ ID NO: 149970 - DNA, 1386 bp, synthetic construct
  misc_feature 1..1386: note = Description of Artificial Sequence: Synthetic coding sequence
  source 1..1386: mol_type = other DNA
atgcagagctggagccgggtgtactgcagcctggccaagaggggccacttcaaccgcatcagccacggcctgcagggcctgtctgctgtgcccctgcggacctacgccgaccagcccattgatgctgatgtgacagtgattggcagcggccctgggggctacgtggccgccatcaaggccgcccagctgggcttcaagacagtgtgcatcgagaagaatgagaccctgggcggcacctgcctgaatgtgggctgcatccccagcaaggccctgctgaacaacagccactactaccacatggcccacggcaaggactttgccagccggggcatcgagatgtctgaggtgcggctgaacctggacaagatgatggagcagaagagcacagctgtgaaggccctgactggaggcatcgcccacctgttcaagcagaacaagattgatgaggacaccatcgtgagcagcactggagccctgagcctgaagaaggtgcctgagaagatggtggtgattggagctggggtcatcggcgtggagctgggctctgtgtggcagaggctgggcgcagatgtgacagctgtggagttcctgggccacgtgggcggcgtgggcatcgacatggagatcagcaagaacttccagaggatcctgcagaagcagggcttcaagttcaagctgaacaccaaggtgactggagccaccaagaagagtgatggcaagattgatgtgtccattgaagctgccagcggcggcaaggccgaggtgatcacctgtgatgtgctgctggtgtgcattggaagaagacccttcaccaagaacctgggcctggaggagctgggcatcgagctggacccccggggccgcatccctgtgaacacccgcttccagaccaagatccccaacatctatgccatcggagatgtggtggccggccccatgctggcccacaaggcagaagatgagggcatcatctgtgtggagggcatggccggcggcgctgtgcacatcgactacaactgtgtgcccagcgtcatctacacccaccctgaggtggcctgggtgggcaagtctgaggagcagctgaaggaggagggcatcgagtacaaggtgggcaagttcccctttgctgccaacagccgggccaagaccaatgctgacacagatggcatggtgaagatcctgggccagaagagcacagacagagtgctgggcgcccacatcctgggccctggggccggggagatggtgaatgaagctgccctggccctggagtatggagccagctgtgaggacatcgcccgggtgtgccacgcccaccccaccctgtctgaggccttccgggaggccaacctggccgccagctttgggaagagcatcaacttctag

SEQ ID NO: 149971 - DNA, 1461 bp, synthetic construct
  misc_feature 1..1461: note = Description of Artificial Sequence: Synthetic coding sequence
  source 1..1461: mol_type = other DNA
atgcagagctggagccgggtgtactgcagcctggccaagaggggccacttcaaccgcatcagccacggcctgcagggcctgtctgctgtgcccctgcggacctacgccgaccagcccattgatgctgatgtgacagtgattggcagcggccctgggggctacgtggccgccatcaaggccgcccagctgggcttcaaggccctgctgaacaacagccactactaccacatggcccacggcaaggactttgccagccggggcatcgagatgtctgaggtgcggctgaacctggacaagatgatggagcagaagagcacagctgtgaaggccctgaccggcggcatcgcccacctgttcaagcagaacaaggtggtgcacgtgaatggctacggcaagatcaccgggaagaaccaggtgacagccaccaaggcagatggcggcacccaggtgattgacaccaagaacatcctgattgccaccggcagcgaggtgacccccttccctggcatcaccattgatgaggacaccatcgtgagcagcactggagccctgagcctgaagaaggtgcctgagaagatggtggtgattggagctggggtgattggagtggagctgggctctgtgtggcagaggctgggcgcagatgtgacagctgtggagttcctgggccacgtgggcggcgtgggcatcgacatggagatcagcaagaacttccagaggatcctgcagaagcagggcttcaagttcaagctgaacaccaaggtgactggagccaccaagaagagtgatggcaagattgatgtgtccattgaggccgccagcggcggcaaggccgaggtgatcacctgtgatgtgctgctggtgtgcatcggccggcggcccttcaccaagaacctgggcctggaggagctgggcatcgagctggacccccggggccgcatccctgtgaacacccgcttccagaccaagatccccaacatctatgccatcggagatgtggtggccggccccatgctggcccacaaggccgaggatgagggcatcatctgtgtggagggcatggccggcggcgctgtgcacatcgactacaactgtgtgcccagcgtcatctacacccaccctgaggtggcctgggtgggcaagtctgaggagcagctgaaggaggagggcatcgagtacaaggtgggcaagttcccctttgctgccaacagccgggccaagaccaatgctgacacagatggcatggtgaagatcctgggccagaagagcacagacagagtgctgggcgcccacatcctgggccctggagctggggagatggtgaatgaggccgccctggccctggagtatggagccagctgtgaagatattgcccgggtgtgccacgcccaccccaccctgtctgaggccttccgggaggccaacctggccgccagctttgggaagagcatcaacttctag

SEQ ID NO: 149972 - DNA, 1233 bp, synthetic construct
  misc_feature 1..1233: note = Description of Artificial Sequence: Synthetic coding sequence
  source 1..1233: mol_type = other DNA
atggcccacggcaaggactttgccagccggggcatcgagatgtctgaggtgcggctgaacctggacaagatgatggagcagaagagcacagctgtgaaggccctgaccggcggcatcgcccacctgttcaagcagaacaaggtggtgcacgtgaatggctacggcaagatcaccgggaagaaccaggtgacagccaccaaggcagatggcggcacccaggtgattgacaccaagaacatcctgattgccaccggcagcgaggtgacccccttccctggcatcaccattgatgaggacaccatcgtgagcagcactggagccctgagcctgaagaaggtgcctgagaagatggtggtgattggagctggggtgattggagtggagctgggctctgtgtggcagaggctgggcgcagatgtgacagctgtggagttcctgggccacgtgggcggcgtgggcatcgacatggagatcagcaagaacttccagaggatcctgcagaagcagggcttcaagttcaagctgaacaccaaggtgactggagccaccaagaagagtgatggcaagattgatgtgtccattgaggccgccagcggcggcaaggccgaggtgatcacctgtgatgtgctgctggtgtgcatcggccggcggcccttcaccaagaacctgggcctggaggagctgggcatcgagctggacccccggggccgcatccctgtgaacacccgcttccagaccaagatccccaacatctatgccatcggagatgtggtggccggccccatgctggcccacaaggccgaggatgagggcatcatctgtgtggagggcatggccggcggcgctgtgcacatcgactacaactgtgtgcccagcgtcatctacacccaccctgaggtggcctgggtgggcaagtctgaggagcagctgaaggaggagggcatcgagtacaaggtgggcaagttcccctttgctgccaacagccgggccaagaccaatgctgacacagatggcatggtgaagatcctgggccagaagagcacagacagagtgctgggcgcccacatcctgggccctggagctggggagatggtgaatgaggccgccctggccctggagtatggagccagctgtgaagatattgcccgggtgtgccacgcccaccccaccctgtctgaggccttccgggaggccaacctggccgccagctttgggaagagcatcaacttctag

SEQ ID NO: 149973 - DNA, 1380 bp, synthetic construct
  misc_feature 1..1380: note = Description of Artificial Sequence: Synthetic coding sequence
  source 1..1380: mol_type = other DNA
atgctgatctacgtggccgccatcaaggccgcccagctgggcttcaagacagtgtgcatcgagaagaatgagaccctgggcggcacctgcctgaatgtgggctgcatccccagcaaggccctgctgaacaacagccactactaccacatggcccacggcaaggactttgccagccggggcatcgagatgtctgaggtgcggctgaacctggacaagatgatggagcagaagagcacagctgtgaaggccctgactggaggcatcgcccacctgttcaagcagaacaaggtggtgcacgtgaatggctacggcaagatcaccgggaagaaccaggtgacagccaccaaggcagatggcggcacccaggtgattgacaccaagaacatcctgattgccactggaagtgaggtgacccccttccctggcatcaccattgatgaggacaccatcgtgagcagcactggagccctgagcctgaagaaggtgcctgagaagatggtggtgattggagctggggtcatcggcgtggagctgggctctgtgtggcagaggctgggcgcagatgtgacagctgtggagttcctgggccacgtgggcggcgtgggcatcgacatggagatcagcaagaacttccagaggatcctgcagaagcagggcttcaagttcaagctgaacaccaaggtgactggagccaccaagaagagtgatggcaagattgatgtgtccattgaagctgccagcggcggcaaggccgaggtgatcacctgtgatgtgctgctggtgtgcattggaagaagacccttcaccaagaacctgggcctggaggagctgggcatcgagctggacccccggggccgcatccctgtgaacacccgcttccagaccaagatccccaacatctatgccatcggagatgtggtggccggccccatgctggcccacaaggcagaagatgagggcatcatctgtgtggagggcatggccggcggcgctgtgcacatcgactacaactgtgtgcccagcgtcatctacacccaccctgaggtggcctgggtgggcaagtctgaggagcagctgaaggaggagggcatcgagtacaaggtgggcaagttcccctttgctgccaacagccgggccaagaccaatgctgacacagatggcatggtgaagatcctgggccagaagagcacagacagagtgctgggcgcccacatcctgggccctggggccggggagatggtgaatgaagctgccctggccctggagtatggagccagctgtgaggacatcgcccgggtgtgccacgcccaccccaccctgtctgaggccttccgggaggccaacctggccgccagctttgggaagagcatcaacttctag

SEQ ID NO: 149974 - DNA, 1944 bp, synthetic construct
  misc_feature 1..1944: note = Description of Artificial Sequence: Synthetic coding sequence
  source 1..1944: mol_type = other DNA
atgtggagggtgtgtgcccggcgggcccagaatgtggccccctgggccggcctggaggcccgctggacagccctgcaggaggtgcccggcaccccccgggtgaccagccgcagcggccctgccccagccaggagaaattctgtgaccaccggctacggcggcgtgcgggccctgtgtggctggacccccagcagcggggccacccccaggaaccggctgctgctgcagctgctgggcagccctggaagacgctactacagcctgcccccccaccagaaggtgcccctgcccagcctgagccccaccatgcaggccggcaccatcgcccgctgggagaagaaggagggggacaagatcaatgaaggagacctgattgctgaggtggagacagacaaggccaccgtgggctttgagagcctggaggagtgctacatggccaagatcctggtggccgagggcaccagagatgtgcccatcggggccatcatctgcatcaccgtgggcaagccagaagatattgaggccttcaagaactacaccctggacagcagcgctgcccccaccccccaggccgccccagcccccaccccagctgccacagccagcccccccaccccatctgcccaggcccctggcagcagctacccaccccacatgcaggtgctgctgcctgccctgagccccaccatgaccatgggcaccgtgcagcgctgggagaagaaggtgggggagaagctgtctgagggggacctgctggccgagattgaaacagacaaggccaccatcggctttgaggtgcaggaggagggctacctggccaagatcctggtgcctgagggcaccagagatgtgcccctgggcacccccctgtgcatcatcgtggagaaggaggccgacatcagcgcctttgctgactaccggcccacagaggtgacagacctgaagccccaggtgcccccacccaccccacctcctgtggccgctgtgccccccaccccccagcccctggcccccaccccatctgccccctgcccagccaccccagctggccccaagggccgggtgtttgtgagccccctggccaagaagctggccgtggagaagggcatcgacctgacccaggtgaagggcaccggcccagatggccgcatcaccaagaaggacatcgacagctttgtgcccagcaaggtggccccagccccagctgctgtggtgccccccaccggccctggcatggcccctgtgcccactggagtcttcacagacatccccatcagcaacatcagaagagtcatcgcccagaggctgatgcagagcaagcagaccatcccccactactacctgagcattgatgtgaacatgggagaggtgctgctggtgaggaaggagctgaacaagatcctggagggccgcagcaagatctctgtgaatgacttcatcatcaaggccagcgccctggcctgcctgaaggtgcctgaggccaacagctcctggatggacaccgtcatccggcagaaccacgtggtggatgtgtctgtggccgtgtccaccccagctggcctcatcacccccatcgtgttcaatgcccacatcaagggcgtggagaccatcgccaatgatgtggtgtccctggccaccaaggcccgggagggcaagctgcagccccatgagttccagggcggcaccttcaccatcagcaacctgggcatgtttggcatcaagaacttcagcgccatcatcaaccccccccaggcctgcatcctggccatcggggccagcgaggacaagctggtgcctgctgacaatgagaagggctttgatgtggcctccatgatgtctgtgaccctgagctgtgaccaccgggtggtggatggagctgtgggcgcccagtggctggccgagttcaggaagtacctggagaagcccatcaccatgctgctgtag

SEQ ID NO: 149975 - DNA, 678 bp, synthetic construct
  misc_feature 1..678: note = Description of Artificial Sequence: Synthetic coding sequence
  source 1..678: mol_type = other DNA
atgtggagggtgtgtgcccggcgggcccagaatgtggccccctgggccggcctggaggcccgctggacagccctgcaggaggtgcccggcaccccccgggtgaccagccgcagcggccctgccccagccaggagaaattctgtgaccaccggctacggcggcgtgcgggccctgtgtggctggacccccagcagcggggccacccccaggaaccggctgctgctgcagctgctgggcagccctggaagacgctactacagcctgcccccccaccagaaggtgcccctgcccagcctgagccccaccatgcaggccggcaccatcgcccgctgggagaagaaggagggggacaagatcaatgaaggagacctgattgctgaggtggagacagacaaggccaccgtgggcaagccagaagatattgaggccttcaagaactacaccctggacagcagcgctgcccccaccccccaggccgccccagcccccaccccagctgccacagccagcccccccaccccatctgcccaggcccctggcagcagctacccaccccacatgcaggtgctgctgcctgccctgagccccaccatgaccatgggcaccgtgcagcgctgggagaagaaggtgggggagaagctgtctgagggggacctgctggccgagatgagcctgtag

SEQ ID NO: 149976 - DNA, 1257 bp, synthetic construct
  misc_feature 1..1257: note = Description of Artificial Sequence: Synthetic coding sequence
  source 1..1257: mol_type = other DNA
atgcaggccggcaccatcgcccgctgggagaagaaggagggggacaagatcaatgaaggagacctgctggccgagattgaaacagacaaggccaccatcggctttgaggtgcaggaggagggctacctggccaagatcctggtgcctgagggcaccagagatgtgcccctgggcacccccctgtgcatcatcgtggagaaggaggccgacatcagcgcctttgctgactaccggcccacagaggtgacagacctgaagccccaggtgcccccacccaccccacctcctgtggccgctgtgccccccaccccccagcccctggcccccacccccagcgccccctgcccagccaccccagctggccccaagggccgggtgtttgtgagccccctggccaagaagctggccgtggagaagggcatcgacctgacccaggtgaagggcactggaccagatggccgcatcaccaagaaggacatcgacagctttgtgcccagcaaggtggccccagccccagctgctgtggtgcccccaactggacctggcatggcccctgtgcccaccggggtcttcacagacatccccatcagcaacatccggcgggtgattgcccagaggctgatgcagagcaagcagaccatcccccactactacctgagcattgatgtgaacatgggagaggtgctgctggtgaggaaggagctgaacaagatcctggagggccgcagcaagatctctgtgaatgacttcatcatcaaggccagcgccctggcctgcctgaaggtgcctgaggccaacagctcctggatggacaccgtcatccggcagaaccacgtggtggatgtgtctgtggccgtgtccaccccagctggcctcatcacccccatcgtgttcaatgcccacatcaagggcgtggagaccatcgccaatgatgtggtgtccctggccaccaaggcccgggagggcaagctgcagccccatgagttccagggcggcaccttcaccatcagcaacctgggcatgtttggcatcaagaacttcagcgccatcatcaaccccccccaggcctgcatcctggccatcggggccagcgaggacaagctggtgcctgctgacaatgaaaaaggatttgatgtggcctccatgatgtctgtgaccctgagctgtgaccaccgggtggtggatggagctgtgggcgcccagtggctggccgagttcaggaagtacctggagaagcccatcaccatgctgctgtag

SEQ ID NO: 149977 - DNA, 1104 bp, synthetic construct
  misc_feature 1..1104: note = Description of Artificial Sequence: Synthetic coding sequence
  source 1..1104: mol_type = other DNA
atgacctggctgcagagcaagccccagaggctgcagaacctgagccagcgggagatgtctgggggcaggaagacctctgtgcaggtgcccagccctgccaacggggtgattgaggccctgctggtgcctgatggcggcaaggtggagggcggcacccccctcttcaccctgaggaagacaggagctgccccagccaaggccaagccagctgaggccccagctgctgctgcccccaaggccgagcccacagctgctgctgtgcccccacctgctgcccccatccccacccagatgcctcctgtgcccagccccagccagcccccatctgggaagcctgtgtctgctgtgaagcccaccgtggccccacccctggccgagcctggagctgggaagggcctgcggtctgagcaccgggagaagatgaacaggatgaggcagagaattgcccagaggctgaaggaggcccagaacacctgtgccatgctgaccaccttcaatgaaattgacatgagcaacatccaggagatgagggcccggcacaaggaggccttcctgaagaagcacaacctgaagctgggcttcatgtctgcctttgtgaaggccagcgcctttgccctgcaggagcagcctgtggtgaatgctgtgattgatgacaccaccaaggaggtggtgtacagagactacatcgacatctctgtggccgtggccaccccccggggcctggtggtgcctgtgatcagaaatgtggaggccatgaactttgctgacattgaaagaaccatcacagagctgggggagaaggccaggaagaatgagctggccatcgaggacatggatggcggcaccttcaccatcagcaatggaggagtgtttggcagcctgtttggcacccccatcatcaaccccccccagagcgccatcctgggcatgcacggcatctttgacaggcctgtggccatcggcggcaaggtggaggtgcggcccatgatgtatgtggccctgacctatgaccaccggctgattgatggccgggaggccgtgaccttcctgaggaagatcaaggctgctgtggaggacccccgggtgctgctgctggacctgtag

SEQ ID NO: 149978 - DNA, 1362 bp, synthetic construct
  misc_feature 1..1362: note = Description of Artificial Sequence: Synthetic coding sequence
  source 1..1362: mol_type = other DNA
atgctgagccgcagccgctgtgtgtcccgggccttcagccgcagcctgagcgccttccagaagggcaactgccccctgggccgccgcagcctgcccggggtgtccctgtgccagggccctggctaccccaacagcaggaaggtggtgatcaacaacagcgtcttctctgtgcgcttcttccgcaccacagctgtgtgcaaggatgacctggtgacagtgaagaccccagcctttgctgagagcgtgacagaaggagatgtgcgctgggagaaggctgtgggggacacagtggctgaagatgaggtggtgtgtgaaattgaaacagacaagacctctgtgcaggtgcccagccctgccaacggggtgattgaggccctgctggtgcctgatggcggcaaggtggagggcggcacccccctcttcaccctgaggaagacaggagctgccccagccaaggccaagccagctgaggccccagctgctgctgcccccaaggccgagcccacagctgctgctgtgcccccacctgctgcccccatccccacccagatgcctcctgtgcccagccccagccagcccccatctgggaagcctgtgtctgctgtgaagcccaccgtggccccacccctggccgagcctggagctgggaagggcctgcggtctgagcaccgggagaagatgaacaggatgaggcagagaattgcccagaggctgaaggaggcccagaacacctgtgccatgctgaccaccttcaatgaaattgacatgagcaacatccaggagatgagggcccggcacaaggaggccttcctgaagaagcacaacctgaagctgggcttcatgtctgcctttgtgaaggccagcgcctttgccctgcaggagcagcctgtggtgaatgctgtgattgatgacaccaccaaggaggtggtgtacagagactacatcgacatctctgtggccgtggccaccccccggggcctggtggtgcctgtgatcagaaatgtggaggccatgaactttgctgacattgaaagaaccatcacagagctgggggagaaggccaggaagaatgagctggccatcgaggacatggatggcggcaccttcaccatcagcaatggaggagtgtttggcagcctgtttggcacccccatcatcaaccccccccagagcgccatcctgggcatgcacggcatctttgacaggcctgtggccatcggcggcaaggtggaggtgcggcccatgatgtatgtggccctgacctatgaccaccggctgattgatggccgggaggccgtgaccttcctgaggaagatcaaggctgctgtggaggacccccgggtgctgctgctggacctgtag

SEQ ID NO: 149979 - DNA, 282 bp, synthetic construct
  misc_feature 1..282: note = Description of Artificial Sequence: Synthetic coding sequence
  source 1..282: mol_type = other DNA
atggaccggctgcagacagccctgctggtggtgctggtgctgctggccgtggccctgcaggccacagaggccggcccctatggagccaacatggaggacagcgtgtgctgccgggactatgtgcgctaccgcctgcccctgcgggtggtgaagcacttctactggaccagtgacagctgccccaggcctggggtggtgctgctgaccttccgggacaaggagatctgtgccgacccccgggtgccctgggtgaagatgatcctgaacaagctgagccagtag

SEQ ID NO: 149980 - DNA, 1560 bp, synthetic construct
  misc_feature 1..1560: note = Description of Artificial Sequence: Synthetic coding sequence
  source 1..1560: mol_type = other DNA
atggccgcccccagccggctgctgatccggggcggccgggtggtgaatgatgacttcagcgaggtggctgatgtgctggtggaggatggagtggtgcgggccctgggccatgacctgctgcccccaggaggagccccagctggcctgcgggtgctggatgctgctgggaagctggtgctgcccggcggcatcgacacccacacccacatgcagttccccttcatgggcagccgcagcattgatgacttccaccagggcaccaaggccgccctgagcggcggcaccaccatgatcatcgactttgccatcccccagaagggcggcagcctgattgaggcctttgagacctggaggtcctgggccgaccccaaggtgtgctgtgactacagcctgcacgtggccgtgacctggtggagcgaccaggtgaaggaggagatgaagatcctggtgcaggacaagggcgtgaacagcttcaagatgttcatggcctacaaggacctgtacatggtgacagacctggagctgtatgaggccttcagccgctgcaaggagattggagccatcgcccaggtgcatgctgaaaatggagacctgattgctgagggcgccaagaagatgctggccctgggcatcaccggccctgagggccacgagctgtgcaggcctgaggccgtggaggccgaggccaccctgcgggccatcaccatcgccagcgctgtgaactgccccctgtacatcgtgcacgtgatgagcaagtctgctgccaaggtgattgctgatgccaggagagatggcaaggtggtgtatggagagcccatcgccgccagcctgggcacagatggcacccactactggaacaaggagtggcaccacgccgcccaccacgtgatgggcccccccctgcggccagaccccagcaccccagacttcctgatgaacctgctggccaatgatgacctgaccaccactggaacagacaactgcaccttcaacacctgccagaaggccctgggcaaggatgacttcaccaagatccccaatggagtgaatggagtggaggacaggatgtctgtcatctgggagaagggcgtgcacagcggcaagatggatgaaaatagatttgtggccgtgaccagcaccaatgctgccaagatcttcaacctgtaccccaggaagggcagaattgctgtgggcagtgatgctgacatcgtcatctgggaccccaagggcaccaggaccatcagcgccaagacccaccaccaggccgtgaacttcaacatctttgagggcatggtgtgccacggcgtgcccctggtgaccatcagccggggcaaggtggtgtatgaggccggggtcttctctgtgacagctggagatggcaagttcatccccaggaagccctttgctgagtacatctacaagaggatcaagcagagggacaggacctgcacccccacccctgtggagcgggccccctacaagggggaggtggccaccctgaagagccgggtgaccaaggaggatgccacagctggcaccaggaagcaggcccacccctag

SEQ ID NO: 149981 - DNA, 1719 bp, synthetic construct
  misc_feature 1..1719: note = Description of Artificial Sequence: Synthetic coding sequence
  source 1..1719: mol_type = other DNA
atgagctaccagggcaagaagaacatcccccgcatcaccagtgaccggctgctgatcaagggcggcaagatcgtgaatgatgaccagagcttctatgctgacatctacatggaggatggcctcatcaagcagattggagaaaatctcatcgtgcctgggggcgtgaagaccatcgaggcccacagcaggatggtgattcctgggggcattgatgtgcacacccgcttccagatgccagaccagggcatgaccagcgcagatgacttcttccagggcaccaaggccgccctggccggcggcaccaccatgatcatcgaccacgtggtgcctgagcccggcaccagcctgctggccgcctttgaccagtggagggagtgggccgacagcaagagctgctgtgactacagcctgcacgtggacatcagcgagtggcacaagggcatccaggaggagatggaggccctggtgaaggaccatggagtgaacagcttcctggtgtacatggccttcaaggaccgcttccagctgacagactgccagatctatgaggtgctgagcgtcatccgggacattggagccatcgcccaggtgcatgctgaaaatggagacatcatcgccgaggagcagcagaggatcctggacctgggcatcaccggccctgagggccacgtgctgagcaggcctgaggaggtggaggccgaggccgtgaacagagccatcaccatcgccaaccagaccaactgccccctgtacatcaccaaggtgatgagcaagagcagcgctgaggtgattgcccaggccaggaagaagggcaccgtggtgtatggagagcccatcacagccagcctgggcacagatggcagccactactggagcaagaactgggccaaggctgctgcctttgtgaccagcccccccctgagcccagaccccaccaccccagacttcctgaacagcctgctgagctgtggggacctgcaggtgactggaagtgcccactgcaccttcaacacagcccagaaggctgtgggcaaggacaacttcaccctcatccctgagggcaccaacggcacagaggagaggatgtctgtcatctgggacaaggctgtggtgacaggcaagatggatgagaaccagtttgtggccgtgaccagcaccaatgctgccaaggtgttcaacctgtaccccaggaagggcagaattgctgtgggcagtgatgctgacctggtgatctgggaccctgacagcgtgaagaccatcagcgccaagacccacaacagcagcctggagtacaacatctttgagggcatggagtgccggggcagccccctggtggtgatcagccagggcaagatcgtgctggaggatggcaccctgcacgtgacagagggcagcggccgctacatccccaggaagcccttcccagactttgtgtacaagaggatcaaggcccggagccggctggccgagctgcggggcgtgccccggggcctgtatgatggccctgtgtgtgaggtgtctgtgacccccaagacagtgaccccagccagcagcgccaagaccagccctgccaagcagcaggcccctcctgtgaggaacctgcaccagagcggcttcagcctgagcggggcccagattgatgacaacatccccaggaggaccacccagagaattgtggcccctcctgggggccgggccaacatcaccagcctgggctag

SEQ ID NO: 149982 - DNA, 1611 bp, synthetic construct
  misc_feature 1..1611: note = Description of Artificial Sequence: Synthetic coding sequence
  source 1..1611: mol_type = other DNA
atggaggatggcctcatcaagcagattggagaaaatctcatcgtgcctgggggcgtgaagaccatcgaggcccacagcaggatggtgattcctgggggcattgatgtgcacacccgcttccagatgccagaccagggcatgaccagcgcagatgacttcttccagggcaccaaggccgccctggccggcggcaccaccatgatcatcgaccacgtggtgcctgagcccggcaccagcctgctggccgcctttgaccagtggagggagtgggccgacagcaagagctgctgtgactacagcctgcacgtggacatcagcgagtggcacaagggcatccaggaggagatggaggccctggtgaaggaccatggagtgaacagcttcctggtgtacatggccttcaaggaccgcttccagctgacagactgccagatctatgaggtgctgagcgtcatccgggacattggagccatcgcccaggtgcatgctgaaaatggagacatcatcgccgaggagcagcagaggatcctggacctgggcatcaccggccctgagggccacgtgctgagcaggcctgaggaggtggaggccgaggccgtgaacagagccatcaccatcgccaaccagaccaactgccccctgtacatcaccaaggtgatgagcaagagcagcgctgaggtgattgcccaggccaggaagaagggcaccgtggtgtatggagagcccatcacagccagcctgggcacagatggcagccactactggagcaagaactgggccaaggctgctgcctttgtgaccagcccccccctgagcccagaccccaccaccccagacttcctgaacagcctgctgagctgtggggacctgcaggtgactggaagtgcccactgcaccttcaacacagcccagaaggctgtgggcaaggacaacttcaccctcatccctgagggcaccaacggcacagaggagaggatgtctgtcatctgggacaaggctgtggtgacaggcaagatggatgagaaccagtttgtggccgtgaccagcaccaatgctgccaaggtgttcaacctgtaccccaggaagggcagaattgctgtgggcagtgatgctgacctggtgatctgggaccctgacagcgtgaagaccatcagcgccaagacccacaacagcagcctggagtacaacatctttgagggcatggagtgccggggcagccccctggtggtgatcagccagggcaagatcgtgctggaggatggcaccctgcacgtgacagagggcagcggccgctacatccccaggaagcccttcccagactttgtgtacaagaggatcaaggcccggagccggctggccgagctgcggggcgtgccccggggcctgtatgatggccctgtgtgtgaggtgtctgtgacccccaagacagtgaccccagccagcagcgccaagaccagccctgccaagcagcaggcccctcctgtgaggaacctgcaccagagcggcttcagcctgagcggggcccagattgatgacaacatccccaggaggaccacccagagaattgtggcccctcctgggggccgggccaacatcaccagcctgggctag

SEQ ID NO: 149983 - DNA, 1719 bp, synthetic construct; identical to SEQ ID NO: 149981
  misc_feature 1..1719: note = Description of Artificial Sequence: Synthetic coding sequence
  source 1..1719: mol_type = other DNA

SEQ ID NO: 149984 - DNA, 1611 bp, synthetic construct; identical to SEQ ID NO: 149982
  misc_feature 1..1611: note = Description of Artificial Sequence: Synthetic coding sequence
  source 1..1611: mol_type = other DNA

SEQ ID NO: 149985 - DNA, 597 bp, synthetic construct
  misc_feature 1..597: note = Description of Artificial Sequence: Synthetic coding sequence
  source 1..597: mol_type = other DNA
atgtctgtcatctgggacaaggctgtggtgacaggcaagatggatgagaaccagtttgtggccgtgaccagcaccaatgctgccaaggtgttcaacctgtaccccaggaagggcagaattgctgtgggcagtgatgctgacctggtgatctgggaccctgattctgtgaagaccatctttgagggcatggagtgccggggcagccccctggtggtgatcagccagggcaagatcgtgctggaggatggcaccctgcacgtgacagagggcagcggccgctacatccccaggaagcccttcccagactttgtgtacaagaggatcaaggcccggagccggctggccgagctgcggggcgtgccccggggcctgtatgatggccctgtgtgtgaggtgtctgtgacccccaagacagtgaccccagccagcagcgccaagaccagccctgccaagcagcaggcccctcctgtgaggaacctgcaccagagcggcttcagcctgagcggggcccagattgatgacaacatccccaggaggaccacccagagaattgtggcccctcctgggggccgggccaacatcaccagcctgggctag

SEQ ID NO: 149986 - DNA, 2055 bp, synthetic construct
  misc_feature 1..2055: note = Description of Artificial Sequence: Synthetic coding sequence
  source 1..2055: mol_type = other DNA
atggccagcggcagaagaggctgggacagcagccatgaagatgacctgcctgtgtacctggcccggcccggcaccacagaccaggtgccccggcagaagtatggaggcatgttctgcaatgtggagggcgcctttgagagcaagaccctggactttgatgccctgtctgtgggccagagaggagccaagacccccaggagcggccagggcagtgaccggggcagcggcagcaggcctggcattgaaggagacaccccaagaagaggccagggccgggaggagagccgggagcccgccccagccagccctgccccagctggggtggagatccgcagcgccaccgggaaggaggtgctgcagaacctgggccccaaggacaagagtgaccggctgctgatcaagggcggccgcatcgtgaatgatgaccagagcttctatgctgacatctacatggaggatggcctcatcaagcagattggagacaacctgattgtgcctgggggcgtgaagaccatcgaggccaacgggaagatggtgattcctgggggcattgatgtgcacacccacttccagatgccctacaagggcatgaccaccgtggatgacttcttccagggcaccaaggccgccctggccggcggcaccaccatgatcatcgaccacgtggtgcctgagcctgagagcagcctgacagaggcctatgagaagtggagggagtgggcagatggcaagagctgctgtgactatgccctgcacgtggacatcacccactggaatgattctgtgaagcaggaggtgcagaacctgatcaaggacaagggcgtgaacagcttcatggtgtacatggcctacaaggacctgtaccaggtgagcaacacagagctgtatgagatcttcacctgcctgggggagctgggcgccatcgcccaggtgcatgctgaaaatggagacatcatcgcccaggagcagaccaggatgctggagatgggcatcaccggccctgagggccacgtgctgagcaggcctgaggagctggaggccgaggccgtgttccgggccatcaccatcgccagccagaccaactgccccctgtatgtgaccaaggtgatgagcaagtctgctgctgacctgatcagccaggccaggaagaagggaaatgtggtgtttggagagcccatcacagccagcctgggcattgatggcacccactactggagcaagaactgggccaaggctgctgcctttgtgaccagcccccccctgagcccagaccccaccaccccagactacatcaacagcctgctggccagcggggacctgcagctgagcggcagcgcccactgcaccttcagcacagcccagaaggccatcggcaaggacaacttcaccgccatccctgagggcaccaacggggtggaggagaggatgtctgtcatctgggacaaggctgtggccaccgggaagatggatgagaaccagtttgtggccgtgaccagcaccaatgctgccaagatcttcaacctgtaccccaggaagggccgcatctctgtgggcagtgacagcgacctggtgatctgggaccctgatgctgtgaagatcgtgtctgccaagaaccaccagagcgctgctgagtacaacatctttgagggcatggagctgcggggggcccccctggtggtgatctgccagggcaagatcatgctggaggatggcaacctgcacgtgacccagggcgccggccgcttcatcccctgcagccccttcagtgactatgtgtacaagaggatcaaggcccggaggaagatggctgacctgcatgctgtgccccggggcatgtatgatggccctgtgtttgacctgaccaccacccccaagggcggcaccccagctggcagcgcccggggcagccccacccggcccaacccccctgtgaggaacctgcaccagagcggcttcagcctgagcggcacccaggtggatgagggcgtgcgcagcgccagcaagagaattgtggcccctcctgggggccgcagcaacatcaccagcctgtcctag

SEQ ID NO: 149987 - DNA, 1713 bp, synthetic construct
  misc_feature 1..1713: note = Description of Artificial Sequence: Synthetic coding sequence
  source 1..1713: mol_type = other DNA
atgagctaccagggcaagaagaacatcccccgcatcaccagtgaccggctgctgatcaagggcggccgcatcgtgaatgatgaccagagcttctatgctgacatctacatggaggatggcctcatcaagcagattggagacaacctgattgtgcctgggggcgtgaagaccatcgaggccaacgggaagatggtgattcctgggggcattgatgtgcacacccacttccagatgccctacaagggcatgaccaccgtggatgacttcttccagggcaccaaggccgccctggccggcggcaccaccatgatcatcgaccacgtggtgcctgagcctgagagcagcctgacagaggcctatgagaagtggagggagtgggcagatggcaagagctgctgtgactatgccctgcacgtggacatcacccactggaatgattctgtgaagcaggaggtgcagaacctgatcaaggacaagggcgtgaacagcttcatggtgtacatggcctacaaggacctgtaccaggtgagcaacacagagctgtatgagatcttcacctgcctgggggagctgggcgccatcgcccaggtgcatgctgaaaatggagacatcatcgcccaggagcagaccaggatgctggagatgggcatcaccggccctgagggccacgtgctgagcaggcctgaggagctggaggccgaggccgtgttccgggccatcaccatcgccagccagaccaactgccccctgtatgtgaccaaggtgatgagcaagtctgctgctgacctgatcagccaggccaggaagaagggaaatgtggtgtttggagagcccatcacagccagcctgggcattgatggcacccactactggagcaagaactgggccaaggctgctgcctttgtgaccagcccccccctgagcccagaccccaccaccccagactacatcaacagcctgctggccagcggggacctgcagctgagcggcagcgcccactgcaccttcagcacagcccagaaggccatcggcaaggacaacttcaccgccatccctgagggcaccaacggggtggaggagaggatgtctgtcatctgggacaaggctgtggccaccgggaagatggatgagaaccagtttgtggccgtgaccagcaccaatgctgccaagatcttcaacctgtaccccaggaagggccgcatctctgtgggcagtgacagcgacctggtgatctgggaccctgatgctgtgaagatcgtgtctgccaagaaccaccagagcgctgctgagtacaacatctttgagggcatggagctgcggggggcccccctggtggtgatctgccagggcaagatcatgctggaggatggcaacctgcacgtgacccagggcgccggccgcttcatcccctgcagccccttcagtgactatgtgtacaagaggatcaaggcccggaggaagatggctgacctgcatgctgtgccccggggcatgtatgatggccctgtgtttgacctgaccaccacccccaagggcggcaccccagctggcagcgcccggggcagccccacccggcccaacccccctgtgaggaacctgcaccagagcggcttcagcctgagcggcacccaggtggatgagggcgtgcgcagcgccagcaagagaattgtggcccctcctgggggccgcagcaacatcaccagcctgtcctag

SEQ ID NO: 149988 - DNA, 279 bp, synthetic construct
  misc_feature 1..279: note = Description of Artificial Sequence: Synthetic coding sequence
  source 1..279: mol_type = other DNA
atgagctaccagggcaagaagaacatcccccgcatcaccagtgaccggctgctgatcaagggcggccgcatcgtgaatgatgaccagagcttctatgctgacatctacatggaggatggcctcatcaagcagattggagacaacctgattgtgcctgggggcgtgaagaccatcgaggccaacgggaagatggtgattcctgggggcattgatgtgcacacccacttccagatgccctacaagggcatgaccaccgtggatgacttcttccagggctag

SEQ ID NO: 149989 - DNA, 591 bp, synthetic construct
  misc_feature 1..591: note = Description of Artificial Sequence: Synthetic coding sequence
  source 1..591: mol_type = other DNA
atggatgagaaccagtttgtggccgtgaccagcaccaatgctgccaagatcttcaacctgtaccccaggaagggccgcatctctgtgggcagtgacagcgacctggtgatctgggaccctgatgctgtgaagatcgtgtctgccaagaaccaccagagcgctgctgagtacaacatctttgagggcatggagctgcggggggcccccctggtggtgatctgccagggcaagatcatgctggaggatggcaacctgcacgtgacccagggcgccggccgcttcatcccctgcagccccttcagtgactatgtgtacaagaggatcaaggcccggaggaagatggctgacctgcatgctgtgccccggggcatgtatgatggccctgtgtttgacctgaccaccacccccaagggcggcaccccagctggcagcgcccggggcagccccacccggcccaacccccctgtgaggaacctgcaccagagcggcttcagcctgagcggcacccaggtggatgagggcgtgcgcagcgccagcaagagaattgtggcccctcctgggggccgcagcaacatcaccagcctgtcctag

SEQ ID NO: 149990 - DNA, 1719 bp, synthetic construct
  misc_feature 1..1719: note = Description of Artificial Sequence: Synthetic coding sequence
  source 1..1719: mol_type = other DNA
atgtccttccagggcaagaagagcatcccccgcatcaccagtgaccggctgctgatccggggcggccgcatcgtgaatgatgaccagagcttctatgcagatgtgcacgtggaggatggcctcatcaagcagattggagaaaatctcatcgtgcctgggggcatcaagaccattgatgcccacggcctgatggtgctgcctggaggagtggatgtgcacacccggctgcagatgcctgtgctgggcatgaccccagcagatgacttctgccagggcaccaaggccgccctggccggcggcaccaccatgatcctggaccacgtgtttcctgacaccggggtgtccctgctggccgcctatgagcagtggagggagagagctgacagcgctgcctgctgtgactacagcctgcacgtggacatcacccgctggcatgagagcatcaaggaggagctggaggccctggtgaaggagaagggcgtgaacagcttcctggtgttcatggcctacaaggaccgctgccagtgcagcgacagccagatgtatgagatcttcagcatcatccgggacctgggcgccctggcccaggtgcatgctgaaaatggagacatcgtggaggaggagcagaagaggctgctggagctgggcatcaccggccctgagggccacgtgctgagccaccctgaggaggtggaggccgaggccgtgtacagagctgtgaccatcgccaagcaggccaactgccccctgtatgtgaccaaggtgatgagcaaaggagctgctgatgccatcgcccaggccaagagaagaggagtggtggtgtttggagagcccatcacagccagcctgggcacagatggcagccactactggagcaagaactgggccaaggctgctgcctttgtgaccagcccccctgtgaacccagaccccaccacagctgaccacctgacctgcctgctgagcagcggggacctgcaggtgactggaagtgcccactgcaccttcaccacagcccagaaggctgtgggcaaggacaactttgccctgatccctgagggcaccaacggcatcgaggagaggatgtccatggtgtgggagaagtgtgtggccagcggcaagatggatgaaaatgaatttgtggccgtgaccagcaccaatgctgccaagatcttcaacttctaccccaggaagggccgggtggccgtgggcagtgatgctgacctggtgatctggaaccccaaggccaccaagatcatcagcgccaagacccacaacctgaatgtggagtacaacatctttgagggcgtggagtgccgcggggccccagctgtggtgatcagccagggccgggtggccctggaggatggcaagatgtttgtgaccccaggagctggccgctttgtgcccaggaagaccttcccagactttgtgtacaagaggatcaaggccaggaaccggctggccgagatccacggcgtgccccggggcctgtatgatggccctgtgcatgaggtgatggtgcctgccaagccaggcagcggggccccagcccgggccagctgccctgggaagatctctgtgccccctgtgaggaacctgcaccagagcggcttcagcctgagcggcagccaggctgatgaccacatcgcccggaggacagcccagaagatcatggcccctcctgggggccgcagcaacatcaccagcctgtcctag

SEQ ID NO: 149991 - DNA, 1239 bp, synthetic construct
  misc_feature 1..1239: note = Description of Artificial Sequence: Synthetic coding sequence
  source 1..1239: mol_type = other DNA
atgcctgtgctgggcatgaccccagcagatgacttctgccagggcaccaaggccgccctggccggcggcaccaccatgatcctggaccacgtgtttcctgacacaggagtgtccctgctggccgcctatgagcagtggagggagagagctgacagcgctgcctgctgtgactacagcctgcacgtggacatcacccgctggcatgagagcatcaaggaggagctggaggccctggtgaaggagaagggcgtgaacagcttcctggtgttcatggcctacaaggaccgctgccagtgcagcgacagccagatgtatgagatcttcagcatcatccgggacctgggcgccctggcccaggtgcatgctgaaaatggagacatcgtggaggaggtggaggccgaggccgtgtacagagctgtgaccatcgccaagcaggccaactgccccctgtatgtgaccaaggtgatgagcaaaggagctgctgatgccatcgcccaggccaagagaagaggagtggtggtgtttggagagcccatcacagccagcctgggcacagatggcagccactactggagcaagaactgggccaaggctgctgcctttgtgaccagcccccctgtgaacccagaccccaccacagctgaccacctgacctgcctgctgagcagcggggacctgcaggtgactggaagtgcccactgcaccttcaccacagcccagaaggctgtgggcaaggacaactttgccctgatccctgagggcaccaacggcatcgaggagaggatgtccatggtgtgggagaagtgtgtggccagcggcaagatggatgaaaatgaatttgtggccgtgaccagcaccaatgctgccaagatcttcaacttctaccccaggaagggccgggtggccgtgggcagtgatgctgacctggtgatctggaaccccaaggccaccaagatcatcagcgccaagacccacaacctgctggccgagatccacggcgtgccccggggcctgtatgatggccctgtgcatgaggtgatggtgcctgccaagccaggcagcggggccccagcccgggccagctgccctgggaagatctctgtgccccctgtgaggaacctgcaccagagcggcttcagcctgagcggcagccaggctgatgaccacatcgcccggaggacagcccagaagatcatggcccctcctgggggccgcagcaacatcaccagcctgtcctag

SEQ ID NO: 149992 - DNA, 1239 bp, synthetic construct; identical to SEQ ID NO: 149991
  misc_feature 1..1239: note = Description of Artificial Sequence: Synthetic coding sequence
  source 1..1239: mol_type = other DNA

SEQ ID NO: 149993 - DNA, 1695 bp, synthetic construct
  misc_feature 1..1695: note = Description of Artificial Sequence: Synthetic coding sequence
  source 1..1695: mol_type = other DNA
atgctggccaacagcgcctctgtgcgcatcctgatcaagggcggcaaggtggtgaatgatgactgcacccatgaagcagatgtgtacattgaaaatggcatcatccagcaggtgggccgggagctgatgatccctggaggagccaaggtgattgatgccaccgggaagctggtgattcctgggggcatcgacaccagcacccacttccaccagaccttcatgaatgccacctgtgtggatgacttctaccacggcaccaaggccgccctggtgggcggcaccaccatgatcatcggccacgtgctgcctgacaaggagaccagcctggtggatgcctatgaaaaatgtcggggcctggccgaccccaaggtgtgctgtgactatgccctgcacgtgggcatcacctggtgggcccccaaggtgaaggccgagatggagaccctggtgcgggagaagggcgtgaacagcttccagatgttcatgacctacaaggacctgtacatgctgcgggacagcgagctgtaccaggtgctgcacgcctgcaaggacatcggggccatcgcccgggtgcatgctgaaaatggagagctggtggccgagggcgccaaggaggccctggacctgggcatcactggacctgagggcatcgagatcagcaggcctgaggagctggaggccgaggccacccacagggtcatcaccatcgccaacagaacccactgccccatctacctggtgaatgtgagcagcatctctgctggagatgtgattgctgctgccaagatgcagggcaaggtggtgctggccgagaccaccacagcccacgccaccctgaccggcctgcactactaccaccaggactggagccatgctgctgcctacgtgacagtgccccccctgcggctggacaccaacaccagcacctacctgatgagcctgctggccaatgacaccctgaacatcgtggccagtgaccaccggcccttcaccaccaagcagaaggccatgggcaaggaggacttcaccaagatcccccacggcgtgtctggagtgcaggacaggatgtctgtcatctgggagcggggcgtggtgggcggcaagatggatgagaacagatttgtggccgtgaccagcagcaatgctgccaagctgctgaacctgtaccccaggaagggccgcatcatccctggagcagatgctgatgtggtggtgtgggaccctgaggccaccaagaccatcagcgccagcacccaggtgcagggcggggacttcaacctgtatgagaacatgcgctgccacggcgtgcccctggtgaccatcagccggggccgggtggtgtatgaaaatggagtcttcatgtgtgccgagggcaccgggaagttctgccccctgcggagcttcccagacacagtgtacaagaagctggtgcagcgggagaagaccctgaaggtgcggggcgtggacaggaccccctacctgggagatgtggccgtggtggtgcaccctgggaagaaggagatgggcacccccctggccgacacccccaccaggcctgtgaccaggcatggaggcatgagggacctgcacgagagcagcttcagcctgagcggcagccagattgatgaccacgtgcccaagagggccagcgcccgcatcctggcccctcctgggggccgcagcagcggcatctggtag

SEQ ID NO: 149994 - DNA, 1695 bp, synthetic construct; identical to SEQ ID NO: 149993
  misc_feature 1..1695: note = Description of Artificial Sequence: Synthetic coding sequence
  source 1..1695: mol_type = other DNA

SEQ ID NO: 149995 - DNA, 573 bp, synthetic construct
  misc_feature 1..573: note = Description of Artificial Sequence: Synthetic coding sequence
  source 1..573: mol_type = other DNA
atgctggccaacagcgcctctgtgcgcatcctgatcaagggcggcaaggtggtgaatgatgactgcacccatgaagcagatgtgtacattgaaaatggcatcatccagcaggtgggccgggagctgatgatccctggaggagccaaggtgattgatgccaccgggaagctggtgattcctgggggcatcgacaccagcacccacttccaccagaccttcatgaatgccacctgtgtggatgacttctaccacggcaccaaggccgccctggtgggcggcaccaccatgatcatcggccacgtgctgcctgacaaggagaccagcctggtggatgcctatgaaaaatgtcggggcctggccgaccccaaggtgtgctgtgactatgccctgcacgtgggcatcacctggtgggcccccaaggtgaaggccgagatggagaccctggtgcgggagaagggcgtgaacagcttccagatgttcatgacctacaaggacctgtacatgctgcgggacagcgagctgtaccaggtgctgcacgcctgcaaggacatcggggccatcgcccgggtgtag

SEQ ID NO: 149996 - DNA, 525 bp, synthetic construct
  misc_feature 1..525: note = Description of Artificial Sequence: Synthetic coding sequence
  source 1..525: mol_type = other DNA
atgctggccaacagcgcctctgtgcgcatcctgatcaagggcggcaaggtggtgaatgatgactgcacccatgaagcagatgtgtacattgaaaatggcatcatccagcaggtgggccgggagctgatgatccctggaggagccaaggtgattgatgccaccgggaagctggtgattcctgggggcatcgacaccagcacccacttccaccagaccttcatgaatgccacctgtgtggatgacttctaccacggcaccaaggccgccctggtgggcggcaccaccatgatcatcggccacgtgctgcctgacaaggagaccagcctggtggatgcctatgaaaaatgtcggggcctggccgaccccaaggtgtgctgtgactatgccctgcacgtgggcatcacctggtgggcccccaaggtgaaggccgagatggagaccctggtgcgggagaagggcgtgaacagcttccagatgttcatgacctacaaggacctgtacatgctgcgggacagcgagctgtag

SEQ ID NO: 149997 - DNA, 498 bp, synthetic construct
  misc_feature 1..498: note = Description of Artificial Sequence: Synthetic coding sequence
  source 1..498: mol_type = other DNA
atgctggccaacagcgcctctgtgcgcatcctgatcaagggcggcaaggtggtgaatgatgactgcacccatgaagcagatgtgtacattgaaaatggcatcatccagcaggtgggccgggagctgatgatccctggaggagccaaggtgattgatgccaccgggaagctggtgattcctgggggcatcgacaccagcacccacttccaccagaccttcatgaatgccacctgtgtggatgacttctaccacggcaccaaggccgccctggtgggcggcaccaccatgatcatcggccacgtgctgcctgacaaggagaccagcctggtggatgcctatgaaaaatgtcggggcctggccgaccccaaggtgtgctgtgactatgccctgcacgtgggcatcacctggtgggcccccaaggtgaaggccgagatggagaccctggtgcgggagaagggcgtgaacagcttccagatgttcatgacctacaaggactag

SEQ ID NO: 149998 - DNA, 522 bp, synthetic construct
  misc_feature 1..522: note = Description of Artificial Sequence: Synthetic coding sequence
  source 1..522: mol_type = other DNA
atggcccctgtgctgagcaaggacagcgctgacatcgagagcatcctggccctgaaccccaggacccagacccacgccaccctgcggagcaccagcgccaagaagctggacaagaagcactggaagagaaatccagacaagaactgcttcaactgtgagaagctggagaacaactttgatgacatcaagcacaccaccctgggggagcggggggccctgcgggaggccatgcgctgcctgaagtgtgctgatgccccctgccagaagagctgccccaccaacctggacatcaagagcttcatcaccagcatcgccaacaagaactactacggggccgccaagatgatcttcagtgacaaccccctgggcctgacctgtggcatggtgtgccccaccagtgacctgtgtgtgggcggctgcaacctgtatgccacagaggagggccccatcaacatcggcggcctgcagcagtttgccacagagaccctcatcctggccttcagcctgatgaaccacctgtag

SEQ ID NO: 149999 - DNA, 3078 bp, synthetic construct
  misc_feature 1..3078: note = Description of Artificial Sequence: Synthetic coding sequence
  source 1..3078: mol_type = other DNA
atggcccctgtgctgagcaaggacagcgctgacatcgagagcatcctggccctgaaccccaggacccagacccacgccaccctgcggagcaccagcgccaagaagctggacaagaagcactggaagagaaatccagacaagaactgcttcaactgtgagaagctggagaacaactttgatgacatcaagcacaccaccctgggggagcggggggccctgcgggaggccatgcgctgcctgaagtgtgctgatgccccctgccagaagagctgccccaccaacctggacatcaagagcttcatcaccagcatcgccaacaagaactactacggggccgccaagatgatcttcagtgacaaccccctgggcctgacctgtggcatggtgtgccccaccagtgacctgtgtgtgggcggctgcaacctgtatgccacagaggagggccccatcaacatcggcggcctgcagcagtttgccacagaggtgttcaaggccatgagcatcccccagatccggaaccccagcctgcccccacctgagaagatgtctgaggcctacagcgccaagatcgccctgtttggagctggccctgccagcatcagctgtgccagcttcctggcccggctgggctacagcgacatcaccatctttgagaagcaggagtatgtgggcggcctgagcaccagcgagatcccccagttccggctgccctatgatgtggtgaactttgaaattgagctgatgaaggacctgggcgtgaagatcatctgtgggaagagcctgtctgtgaatgagatgaccctgagcaccctgaaggagaagggctacaaggccgccttcatcggcatcggcctgcctgagcccaacaaggatgccatcttccagggcctgacccaggaccagggcttctacaccagcaaggacttcctgcccctggtggccaagggcagcaaggccggcatgtgtgcctgccacagccccctgcccagcatccggggcgtggtgattgtgctgggcgctggggacacagcctttgactgtgccaccagcgccctgcgctgtggggcccggcgggtcttcatcgtgttcagaaaaggatttgtgaacatccgggctgtgcctgaggagatggagctggccaaggaggagaagtgtgagttcctgcccttcctgagccccaggaaggtgattgtgaagggcggcagaattgtggccatgcagtttgtgaggacagagcaggatgagaccgggaagtggaatgaagatgaggaccagatggtgcacctgaaggcagatgtggtgatcagcgccttcggctctgtgctgagtgaccccaaggtgaaggaggccctgagccccatcaagttcaaccgctggggcctgcctgaggtggaccctgagaccatgcagaccagcgaggcctgggtgtttgctggaggagatgtggtgggcctggccaacaccaccgtggagagcgtgaatgatggcaagcaggcctcctggtacatccacaagtatgtgcagagccagtatggagcctctgtgtctgccaagccagagctgcccctcttctacacccccatcgacctggtggacatctctgtggagatggccggcctgaagttcatcaaccccttcggcctggccagcgccaccccagccaccagcacctccatgatcagaagagcctttgaggccggctggggctttgccctgaccaagaccttcagcctggacaaggacatcgtgaccaacgtgagcccccgcatcatccggggcaccaccagcggccccatgtatggccctggccagagcagcttcctgaacatcgagctgatcagcgagaagacagctgcctactggtgccagagcgtgacagagctgaaggctgacttcccagacaacatcgtcatcgccagcatcatgtgcagctacaacaagaatgactggacagagctggccaagaagtctgaggacagcggggctgatgccctggagctgaacctgagctgcccccacggcatgggagagcggggcatgggcctggcctgtggccaggaccctgagctggtgaggaacatctgccgctgggtgcggcaggccgtgcagatccccttctttgccaagctgaccccaaatgtgacagacatcgtgtccatcgcccgggccgccaaggagggcggggccaacggggtgacagccaccaacacagtgtctggcctgatgggcctgaagagtgatggcaccccctggccagctgtgggcatcgccaagaggaccacctacggcggcgtgtctggaacagccatccggcccatcgccctgcgggctgtgaccagcatcgcccgggccctgcccggcttccccatcctggccactggaggcatcgacagcgctgagagcggcctgcagttcctgcacagcggggcctctgtgctgcaggtgtgcagcgccatccagaaccaggacttcaccgtgattgaggactactgcaccggcctgaaggccctgctgtacctgaagagcattgaggagctgcaggactgggatggccagagccctgccaccgtgagccaccagaagggcaagcctgtgcccagaattgctgagctgatggacaagaagctgcccagctttggcccctacctggagcagaggaagaagatcatcgccgagaacaagatccggctgaaggagcagaatgtggccttcagccccctgaagaggaactgcttcatccccaagaggcccatccccaccatcaaggatgtgattggcaaggccctgcagtacctgggcacctttggagagctgagcaatgtggagcaggtggtggccatgattgatgaggagatgtgcatcaactgtgggaagtgctacatgacctgcaatgacagcggctaccaggccatccagtttgatcctgagacccacctgcccaccatcacagacacctgcaccggctgcaccctgtgcctgtctgtgtgccccatcgtggactgcatcaagatggtgtccaggaccaccccctatgagcccaagaggggcgtgcccctgtctgtgaaccctgtgtgctag

SEQ ID NO: 150000 - DNA, 471 bp, synthetic construct
  misc_feature 1..471: note = Description of Artificial Sequence: Synthetic coding sequence
  source 1..471: mol_type = other DNA
atggcccctgtgctgagcaaggacagcgctgacatcgagaactgtgagaagctggagaacaactttgatgacatcaagcacaccaccctgggggagcggggggccctgcgggaggccatgcgctgcctgaagtgtgctgatgccccctgccagaagagctgccccaccaacctggacatcaagagcttcatcaccagcatcgccaacaagaactactatggagctgccaagatgatcttcagtgacaaccccctgggcctgacctgtggcatggtgtgccccaccagtgacctgtgtgtgggcggctgcaacctgtatgccacagaggagggccccatcaacattggaggcctgcagcagtttgccacagaggtgaatggcctgctgcacttccagaacagcgtgtccctgtggttccagaagacagccaacatctccttcctgagctgtggcagcctgcaggatgcctag

SEQ ID NO: 150001 - DNA, 1482 bp, synthetic construct
  misc_feature 1..1482: note = Description of Artificial Sequence: Synthetic coding sequence
  source 1..1482: mol_type = other DNA
atgatcctgaacagcctgagcctgtgctaccacaacaagctgatcctggcccccatggtgcgggtgggcaccctgcccatgaggctgctggccctggactatggagctgacatcgtgtactgtgaggagctgattgacctgaagatgatccagtgcaagagggtggtgaatgaggtgctgagcacagtggactttgtggccccagatgacagagtggtgttccgcacctgtgagcgggagcagaacagagtggtgttccagatgggcaccagtgatgctgagcgggccctggccgtggcccggctggtggagaatgatgtggccggcattgatgtgaacatgggctgccccaagcagtacagcaccaagggcggcatgggcgccgccctgctgagtgaccctgacaagattgagaagatcctgagcaccctggtgaagggcaccaggaggcctgtgacctgcaagatccgcatcctgcccagcctggaggacaccctgagcctggtgaagagaattgaaagaactggaattgctgccatcgctgtgcacggcaggaagcgggaggagcggccccagcaccctgtgtcctgtgaggtgatcaaggccatcgctgacaccctgagcatccctgtgattgccaacggcggcagccatgaccacatccagcagtacagcgacatcgaggacttccggcaggccacagctgccagctctgtgatggtggcccgggccgccatgtggaaccccagcatcttcctgaaggagggcctgcggcccctggaggaggtgatgcagaagtacatccgctatgctgtgcagtatgacaaccactacaccaacaccaagtactgcctgtgccagatgctgcgggagcagctggagagcccccagggccgcctgctgcatgctgcccagagcagccgggagatctgtgaggccttcggcctgggcgccttctatgaggagaccacccaggagctggatgcccagcaggcccggctgagcgccaagaccagcgagcagacaggagagcctgctgaggacaccagcggggtcatcaagatggctgtgaagtttgacagaagagcctacccagcccagatcacccccaagatgtgcctgctggagtggtgcagaagagagaagctggcccagcctgtgtatgagaccgtgcagaggcccctggacaggctcttcagcagcatcgtgacagtggccgagcagaagtaccagagcaccctgtgggacaagagcaagaagctggccgagcaggccgccgccatcgtgtgcctgcggagccagggcctgcctgagggccgcctgggggaggagagccccagcctgcacaagaggaagcgggaggccccagaccaggaccccggcggcccccgggcccaggagctggcccagcccggggacctgtgcaagaagccctttgtggccctgggcagcggggaggagagccccctggagggctggtag

SEQ ID NO: 150002 - DNA, 1482 bp, synthetic construct; identical to SEQ ID NO: 150001
  misc_feature 1..1482: note = Description of Artificial Sequence: Synthetic coding sequence
  source 1..1482: mol_type = other DNA

SEQ ID NO: 150003 - DNA, 1377 bp, synthetic construct
  misc_feature 1..1377: note = Description of Artificial Sequence: Synthetic coding sequence
  source 1..1377: mol_type = other DNA
atgatcctgaacagcctgagcctgtgctaccacaacaagctgatcctggcccccatggtgcgggtgggcaccctgcccatgaggctgctggccctggactatggagctgacatcgtgtactgtgaggagctgattgacctgaagatgatccagtgcaagagggtggtgaatgaggtgctgagcacagtggactttgtggccccagatgacagagtggtgttccgcacctgtgagcgggagcagaacagagtggtgttccagatgggcggcatgggcgccgccctgctgagtgaccctgacaagattgagaagatcctgagcaccctggtgaagggcacccggcggcctgtgacctgcaagatccgcatcctgcccagcctggaggacaccctgagcctggtgaagagaattgaaagaactggaattgctgccatcgctgtgcacggcaggaagcgggaggagcggccccagcaccctgtgtcctgtgaggtgatcaaggccatcgctgacaccctgagcatccctgtgattgccaatggaggcagccatgaccacatccagcagtacagcgacatcgaggacttccggcaggccacagctgccagctctgtgatggtggcccgggccgccatgtggaaccccagcatcttcctgaaggagggcctgcggcccctggaggaggtgatgcagaagtacatccgctatgctgtgcagtatgacaaccactacaccaacaccaagtactgcctgtgccagatgctgcgggagcagctggagagcccccagggccgcctgctgcacgccgcccagagcagccgggagatctgtgaggccttcggcctgggcgccttctatgaggagaccacccaggagctggatgcccagcaggcccggctgagcgccaagaccagcgagcagacaggagagcctgctgaggacaccagcggggtcatcaagatggctgtgaagtttgaccggcgggcctacccagcccagatcacccccaagatgtgcctgctggagtggtgccggcgggagaagctggcccagcctgtgtatgaaacagtgcagaggcccctggacaggctcttcagcagcatcgtgacagtggccgagcagaagtaccagagcaccctgtgggacaagagcaagaagctggccgagcaggccgccgccatcgtgtgcctgcggagccagggcctgcctgagggccgcctgggggaggagagccccagcctgcacaagaggaagcgggaggccccagaccaggaccccggcggcccccgggcccaggagctggcccagcccggggacctgtgcaagaagccctttgtggccctgggcagcggggaggagagccccctggagggctggtag

SEQ ID NO: 150004 - DNA, 858 bp, synthetic construct
  misc_feature 1..858: note = Description of Artificial Sequence: Synthetic coding sequence
  source 1..858: mol_type = other DNA
atggccggcctgggccaccctgctgccttcggccgggccacccatgctgtggtgcgggccctgcctgagagcctgggccagcacgccctgcggagcgccaagggggaggaggtggatgtggcccgggcagagcggcagcaccagctgtatgtgggcgtgctgggcagcaagctgggcctgcaggtggtggagctgcctgcagatgagagcctgcctgactgtgtgtttgtggaggatgtggccgtggtgtgtgaggagacagccctgatcaccaggcctggggcccccagcaggaggaaggaggtggacatgatgaaggaggccctggagaagctgcagctgaacatcgtggagatgaaggatgaaaatgccaccctggatggaggagatgtgctcttcaccggccgggagttctttgtgggcctgagcaagaggaccaaccagagaggagctgagatcctggccgacaccttcaaggactatgctgtgtccacagtgcctgtggctgatggcctgcacctgaagagcttctgcagcatggccggccccaacctgattgccatcggcagcagcgagagcgcccagaaggccctgaagatcatgcagcagatgtctgaccacagatatgacaagctgactgtgcctgatgacattgctgccaactgcatctacctgaacatccccaacaagggccacgtgctgctgcacaggaccccagaggagtacccagagagcgccaaggtgtatgagaagctgaaggaccacatgctgatccctgtgtccatgtctgagctggagaaggtggatggcctgctgacctgctgcagcgtgctgatcaacaagaaggtggacagctag

SEQ ID NO: 150005 - DNA, 579 bp, synthetic construct
  misc_feature 1..579: note = Description of Artificial Sequence: Synthetic coding sequence
  source 1..579: mol_type = other DNA
atgtggctgtatggcctgggccaggtggacatgatgaaggaggccctggagaagctgcagctgaacatcgtggagatgaaggatgaaaatgccaccctggatggaggagatgtgctcttcaccggccgggagttctttgtgggcctgagcaagaggaccaaccagagaggagctgagatcctggccgacaccttcaaggactatgctgtgtccacagtgcctgtggctgatggcctgcacctgaagagcttctgcagcatggccggccccaacctgattgccatcggcagcagcgagagcgcccagaaggccctgaagatcatgcagcagatgtctgaccacagatatgacaagctgactgtgcctgatgacattgctgccaactgcatctacctgaacatccccaacaagggccacgtgctgctgcacaggaccccagaggagtacccagagagcgccaaggtgtatgagaagctgaaggaccacatgctgatccctgtgtccatgtctgagctggagaaggtggatggcctgctgacctgctgcagcgtgctgatcaacaagaaggtggacagctag

SEQ ID NO: 150006 - DNA, 549 bp, synthetic construct
  misc_feature 1..549: note = Description of Artificial Sequence: Synthetic coding sequence
  source 1..549: mol_type = other DNA
atgatgaaggaggccctggagaagctgcagctgaacatcgtggagatgaaggatgaaaatgccaccctggatggaggagatgtgctcttcaccggccgggagttctttgtgggcctgagcaagaggaccaaccagagaggagctgagatcctggccgacaccttcaaggactatgctgtgtccacagtgcctgtggctgatggcctgcacctgaagagcttctgcagcatggccggccccaacctgattgccatcggcagcagcgagagcgcccagaaggccctgaagatcatgcagcagatgtctgaccacagatatgacaagctgactgtgcctgatgacattgctgccaactgcatctacctgaacatccccaacaagggccacgtgctgctgcacaggaccccagaggagtacccagagagcgccaaggtgtatgagaagctgaaggaccacatgctgatccctgtgtccatgtctgagctggagaaggtggatggcctgctgacctgctgcagcgtgctgatcaacaagaaggtggacagctag

SEQ ID NO: 150007 - DNA, 858 bp, synthetic construct; identical to SEQ ID NO: 150004
  misc_feature 1..858: note = Description of Artificial Sequence: Synthetic coding sequence
  source 1..858: mol_type = other DNA

SEQ ID NO: 150008 - DNA, 558 bp, synthetic construct
  misc_feature 1..558: note = Description of Artificial Sequence: Synthetic coding sequence
  source 1..558: mol_type = other DNA
atggtggacatgatgaaggaggccctggagaagctgcagctgaacatcgtggagatgaaggatgaaaatgccaccctggatggaggagatgtgctcttcaccggccgggagttctttgtgggcctgagcaagaggaccaaccagagaggagctgagatcctggccgacaccttcaaggactatgctgtgtccacagtgcctgtggctgatggcctgcacctgaagagcttctgcagcatggccggccccaacctgattgccatcggcagcagcgagagcgcccagaaggccctgaagatcatgcagcagatgtctgaccacagatatgacaagctgactgtgcctgatgacattgctgccaactgcatctacctgaacatccccaacaagggccacgtgctgctgcacaggaccccagaggagtacccagagagcgccaaggtgtatgagaagctgaaggaccacatgctgatccctgtgtccatgtctgagctggagaaggtggatggcctgctgacctgctgcagcgtgctgatcaacaagaaggtggacagctag

SEQ ID NO: 150009 - DNA, 858 bp, synthetic construct
  misc_feature 1..858: note = Description of Artificial Sequence: Synthetic coding sequence
  source 1..858: mol_type = other DNA
atgggcaccccaggagagggcctgggccgctgcagccacgccctgatccggggcgtgcctgagagcctggccagcggggagggcgctggggccggcctgcctgccctggacctggccaaggcccagcgggagcacggcgtgctgggcggcaagctgcggcagaggctgggcctgcagctgctggagctgcccccagaggagagcctgcccctgggccccctgctgggggacacagctgtgatccagggcgacacagccctgatcacccggccctggagccctgcccggcggcctgaggtggatggagtgaggaaggccctgcaggacctgggcctgcgcatcgtggagattggagatgaaaatgccaccctggatggaacagatgtgctcttcaccggccgggagttctttgtgggcctgagcaagtggaccaaccacagaggagctgagatcgtggccgacaccttccgggactttgctgtgtccacagtgcctgtgtctggccccagccacctgcggggcctgtgtggcatgggcggccccaggacagtggtggccggcagcagtgatgctgcccagaaggctgtgcgggccatggctgtgctgacagaccacccctatgccagcctgaccctgcctgatgatgctgctgctgactgcctcttcctgcggcccggcctgcccggggtgccccccttcctgctgcaccggggcggcggggacctgcccaacagccaggaggccctgcagaagctgagtgatgtgaccctggtgcctgtgtcctgcagcgagctggagaaggccggggccggcctgagcagcctgtgcctggtgctgagcacccggccccacagctag

SEQ ID NO: 150010 - DNA, 858 bp, synthetic construct; identical to SEQ ID NO: 150009
  misc_feature 1..858: note = Description of Artificial Sequence: Synthetic coding sequence
  source 1..858: mol_type = other DNA

SEQ ID NO: 150011 - DNA, 858 bp, synthetic construct; identical to SEQ ID NO: 150009
  misc_feature 1..858: note = Description of Artificial Sequence: Synthetic coding sequence
  source 1..858: mol_type = other DNA

SEQ ID NO: 150012 - DNA, 858 bp, synthetic construct; identical to SEQ ID NO: 150009
  misc_feature 1..858: note = Description of Artificial Sequence: Synthetic coding sequence
  source 1..858: mol_type = other DNA

SEQ ID NO: 150013 - DNA, 858 bp, synthetic construct; identical to SEQ ID NO: 150009
  misc_feature 1..858: note = Description of Artificial Sequence: Synthetic coding sequence
  source 1..858: mol_type = other DNA

SEQ ID NO: 150014 - DNA, 858 bp, synthetic construct; identical to SEQ ID NO: 150009
  misc_feature 1..858: note = Description of Artificial Sequence: Synthetic coding sequence
  source 1..858: mol_type = other DNA

SEQ ID NO: 150015 - DNA, 858 bp, synthetic construct; identical to SEQ ID NO: 150009
  misc_feature 1..858: note = Description of Artificial Sequence: Synthetic coding sequence
  source 1..858: mol_type = other DNA

SEQ ID NO: 150016 - DNA, 567 bp, synthetic construct
  misc_feature 1..567: note = Description of Artificial Sequence: Synthetic coding sequence
  source 1..567: mol_type = other DNA
tgaagaagacctgaggtggatggagtgaggaaggccctgcaggacctgggcctgcgcatcgtggagattggagatgaaaatgccaccctggatggaacagatgtgctcttcaccggccgggagttctttgtgggcctgagcaagtggaccaaccacagaggagctgagatcgtggccgacaccttccgggactttgctgtgtccacagtgcctgtgtctggccccagccacctgcggggcctgtgtggcatgggcggccccaggacagtggtggccggcagcagtgatgctgcccagaaggctgtgaggatgacccagctgctgactgtgtccttctttgtgctgggctgcctggtgtgccccctgagcagctgcaccgtggaggtgggcatctgccccacagcccggcggcactgccgcagcagcctgatgagcccctggtacctgtgcccagcccagaactggaggcggctggcccctggcagcgcccccagcgcctggtgcagcgcccacgcccccacagctgagggcctggccctgggctactgctggccaggagtgggctag

SEQ ID NO: 150017 - DNA, 567 bp, synthetic construct; identical to SEQ ID NO: 150016
  misc_feature 1..567: note = Description of Artificial Sequence: Synthetic coding sequence
  source 1..567: mol_type = other DNA

SEQ ID NO: 150018 - DNA, 858 bp, synthetic construct; identical to SEQ ID NO: 150009
  misc_feature 1..858: note = Description of Artificial Sequence: Synthetic coding sequence
  source 1..858: mol_type = other DNA

SEQ ID NO: 150019 - DNA, 858 bp, synthetic construct; identical to SEQ ID NO: 150009
  misc_feature 1..858: note = Description of Artificial Sequence: Synthetic coding sequence
  source 1..858: mol_type = other DNA

SEQ ID NO: 150020 - DNA, 858 bp, synthetic construct; identical to SEQ ID NO: 150009
  misc_feature 1..858: note = Description of Artificial Sequence: Synthetic coding sequence
  source 1..858: mol_type = other DNA

SEQ ID NO: 150021 - DNA, 711 bp, synthetic construct
  misc_feature 1..711: note = Description of Artificial Sequence: Synthetic coding sequence
  source 1..711: mol_type = other DNA
atgggcaccccaggagagggcctgggccgctgcagccacgccctgatccggggcgtgcctgagagcctggccagcggggagggcgctggggccggcctgcctgccctggacctggccaaggcccagcgggagcacggcgtgctgggcggcaagctgcggcagaggctgggcctgcagctgctggagctgcccccagaggagagcctgcccctgggccccctgctgggggacacagctgtgatccagggcgacacagccctgatcacccggccctggagccctgcccggcggcctgaggtggatggagtgaggaaggccctgcaggacctgggcctgcgcatcgtggagattggagatgaaaatgccaccctggatggaacagatgtgctcttcaccggccgggagttctttgtgggcctgagcaagtggaccaaccacagaggagctgagatcgtggccgacaccttccgggactttgctgtgtccacagtgcctgtgtctggccccagccacctgcggggcctgtgtggcatgggcggccccaggacagtggtggccggcagcagtgatgctgcccagaaggctgtgcgggccatggctgtgctgacagaccacccctatgccagcctgaccctgcctgatgatgctgctgctgactgcctcttcctgcggcccggcctgcccggggtgccccccttcctgctgcactag

SEQ ID NO: 150022 - DNA, 681 bp, synthetic construct
  misc_feature 1..681: note = Description of Artificial Sequence: Synthetic coding sequence
  source 1..681: mol_type = other DNA
atgggcaccccaggagagggcctgggccgctgcagccacgccctgatccggggcgtgcctgagagcctggccagcggggagggcgctggggccggcctgcctgccctggacctggccaaggcccagcgggagcacggcgtgctgggcggcaagctgcggcagaggctgggcctgcagctgctggagctgcccccagaggagagcctgcccctgggccccctgctgggggacacagctgtgatccagggcgacacagccctgatcacccggccctggagccctgcccggcggcctgaggtggatggagtgaggaaggccctgcaggacctgggcctgcgcatcgtggagattggagatgaaaatgccaccctggatggaacagatgtgctcttcaccggccgggagttctttgtgggcctgagcaagtggaccaaccacagaggagctgagatcgtggccgacaccttccgggactttgctgtgtccacagtgcctgtgtctggccccagccacctgcggggcctgtgtggcatgggcggccccaggacagtggtggccggcagcagtgatgctgcccagaaggctgtgcgggccatggctgtgctgacagaccacccctatgccagcctgaccctgcctgatgatgctgctgctgactgcctcttcctgcggcctggatag

SEQ ID NO: 150023 - DNA, 711 bp, synthetic construct; identical to SEQ ID NO: 150021
  misc_feature 1..711: note = Description of Artificial Sequence: Synthetic coding sequence
  source 1..711: mol_type = other DNA

SEQ ID NO: 150024 - DNA, 858 bp, synthetic construct; identical to SEQ ID NO: 150009
  misc_feature 1..858: note = Description of Artificial Sequence: Synthetic coding sequence
  source 1..858: mol_type = other DNA

SEQ ID NO: 150025 - DNA, 858 bp, synthetic construct; identical to SEQ ID NO: 150009
  misc_feature 1..858: note = Description of Artificial Sequence: Synthetic coding sequence
  source 1..858: mol_type = other DNA

SEQ ID NO: 150026 - DNA, 858 bp, synthetic construct; identical to SEQ ID NO: 150009
  misc_feature 1..858: note = Description of Artificial Sequence: Synthetic coding sequence
  source 1..858: mol_type = other DNA

SEQ ID NO: 150027 - DNA, 681 bp, synthetic construct; identical to SEQ ID NO: 150022
  misc_feature 1..681: note = Description of Artificial Sequence: Synthetic coding sequence
  source 1..681: mol_type = other DNA

SEQ ID NO: 150028 - DNA, 858 bp, synthetic construct; identical to SEQ ID NO: 150009
  misc_feature 1..858: note = Description of Artificial Sequence: Synthetic coding sequence
  source 1..858: mol_type = other DNA

SEQ ID NO: 150029 - DNA, 681 bp, synthetic construct; identical to SEQ ID NO: 150022
  misc_feature 1..681: note = Description of Artificial Sequence: Synthetic coding sequence
  source 1..681: mol_type = other DNA

SEQ ID NO: 150030 - DNA, 681 bp, synthetic construct; identical to SEQ ID NO: 150022
  misc_feature 1..681: note = Description of Artificial Sequence: Synthetic coding sequence
  source 1..681: mol_type = other DNA

SEQ ID NO: 150031 - DNA, 858 bp, synthetic construct; identical to SEQ ID NO: 150009
  misc_feature 1..858: note = Description of Artificial Sequence: Synthetic coding sequence
  source 1..858: mol_type = other DNA

SEQ ID NO: 150032 - DNA, 681 bp, synthetic construct; identical to SEQ ID NO: 150022
  misc_feature 1..681: note = Description of Artificial Sequence: Synthetic coding sequence
  source 1..681: mol_type = other DNA

SEQ ID NO: 150033 - DNA, 567 bp, synthetic construct; identical to SEQ ID NO: 150016
  misc_feature 1..567: note = Description of Artificial Sequence: Synthetic coding sequence
  source 1..567: mol_type = other DNA

SEQ ID NO: 150034 - DNA, 567 bp, synthetic construct; identical to SEQ ID NO: 150016
  misc_feature 1..567: note = Description of Artificial Sequence: Synthetic coding sequence
  source 1..567: mol_type = other DNA

SEQ ID NO: 150035 - DNA, 681 bp, synthetic construct; identical to SEQ ID NO: 150022
  misc_feature 1..681: note = Description of Artificial Sequence: Synthetic coding sequence
  source 1..681: mol_type = other DNA

SEQ ID NO: 150036 - DNA, 858 bp, synthetic construct; identical to SEQ ID NO: 150009
  misc_feature 1..858: note = Description of Artificial Sequence: Synthetic coding sequence
  source 1..858: mol_type = other DNA

SEQ ID NO: 150037 - DNA, 711 bp, synthetic construct; identical to SEQ ID NO: 150021
  misc_feature 1..711: note = Description of Artificial Sequence: Synthetic coding sequence
  source 1..711: mol_type = other DNA

SEQ ID NO: 150038 - DNA, 711 bp, synthetic construct; identical to SEQ ID NO: 150021
  misc_feature 1..711: note = Description of Artificial Sequence: Synthetic coding sequence
  source 1..711: mol_type = other DNA

SEQ ID NO: 150039 - DNA, 858 bp, synthetic construct; identical to SEQ ID NO: 150009
  misc_feature 1..858: note = Description of Artificial Sequence: Synthetic coding sequence
  source 1..858: mol_type = other DNA

SEQ ID NO: 150040 - DNA, 678 bp, synthetic construct
  misc_feature 1..678: note = Description of Artificial Sequence: Synthetic coding sequence
  source 1..678: mol_type = other DNA
atgggcaccccaggagagggcctgggccgctgcagccacgccctgatccggggcgtgcctgagagcctggccagcggggagggcgctggggccggcctgcctgccctggacctggccaaggcccagcgggagcacggcgtgctgggcggcaagctgcggcagaggctgggcctgcagctgctggagctgcccccagaggagagcctgcccctgggccccctgctgggggacacagctgtgatccagggcgacacagccctgatcacccggccctggagccctgcccggcggcctgaggtggatggagtgaggaaggccctgcaggacctgggcctgcgcatcgtggagattggagatgaaaatgccaccctggatggaacagatgtgctcttcaccggccgggagttctttgtgggcctgagcaagtggaccaaccacagaggagctgagatcgtggccgacaccttccgggactttgctgtgtccacagtgcctgtgtctggccccagccacctgcggggcctgtgtggcatgggcggccccaggacagtggtggccggcagcagtgatgctgcccagaaggctgtgcgggccatggctgtgctgacagaccacccctatgccagcctgaccctgcctgatgatgctgctgctgactgcctcttcctgcggccctag

SEQ ID NO: 150041 - DNA, 858 bp, synthetic construct; identical to SEQ ID NO: 150009
  misc_feature 1..858: note = Description of Artificial Sequence: Synthetic coding sequence
  source 1..858: mol_type = other DNA

SEQ ID NO: 150042 - DNA, 567 bp, synthetic construct; identical to SEQ ID NO: 150016
  misc_feature 1..567: note = Description of Artificial Sequence: Synthetic coding sequence
  source 1..567: mol_type = other DNA

SEQ ID NO: 150043 - DNA, 567 bp, synthetic construct; identical to SEQ ID NO: 150016
  misc_feature 1..567: note = Description of Artificial Sequence: Synthetic coding sequence
  source 1..567: mol_type = other DNA

SEQ ID NO: 150044 - DNA, 858 bp, synthetic construct; identical to SEQ ID NO: 150009
  misc_feature 1..858: note = Description of Artificial Sequence: Synthetic coding sequence
  source 1..858: mol_type = other DNA

SEQ ID NO: 150045 - DNA, 711 bp, synthetic construct; identical to SEQ ID NO: 150021
  misc_feature 1..711: note = Description of Artificial Sequence: Synthetic coding sequence
  source 1..711: mol_type = other DNA

SEQ ID NO: 150046 - DNA, 567 bp, synthetic construct; identical to SEQ ID NO: 150016
  misc_feature 1..567: note = Description of Artificial Sequence: Synthetic coding sequence
  source 1..567: mol_type = other DNA

SEQ ID NO: 150047 - DNA, 858 bp, synthetic construct; identical to SEQ ID NO: 150009
  misc_feature 1..858: note = Description of Artificial Sequence: Synthetic coding sequence
  source 1..858: mol_type = other DNA

SEQ ID NO: 150048 - DNA, 858 bp, synthetic construct; identical to SEQ ID NO: 150009
  misc_feature 1..858: note = Description of Artificial Sequence: Synthetic coding sequence
  source 1..858: mol_type = other DNA

SEQ ID NO: 150049 - DNA, 711 bp, synthetic construct; identical to SEQ ID NO: 150021
  misc_feature 1..711: note = Description of Artificial Sequence: Synthetic coding sequence
  source 1..711: mol_type = other DNA

SEQ ID NO: 150050 - DNA, 711 bp, synthetic construct; identical to SEQ ID NO: 150021
  misc_feature 1..711: note = Description of Artificial Sequence: Synthetic coding sequence
  source 1..711: mol_type = other DNA

SEQ ID NO: 150051 - DNA, 2601 bp, synthetic construct
  misc_feature 1..2601: note = Description of Artificial Sequence: Synthetic coding sequence
  source 1..2601: mol_type = other DNA
atgctgcggcctggggcccagctgctgcggggcctgctgctgcggagctgccccctgcagggcagccctggccggcccaggtctgtgtgtggccgggagggggaggagaagccacccctgtctgctgagacccagtggaaggacagagctgagaccgtcatcattggaggcggctgtgtgggcgtgtccctggcctaccacctggccaaggccggcatgaaggatgtggtgctgctggagaagtctgagctgacagctggcagcacctggcacgccgccggcctgaccacctacttccaccctggcatcaacctgaagaagatccactatgacagcatcaagctgtatgagaagctggaggaggagaccggccaggtggtgggcttccaccagcccggcagcatccggctggccaccacccctgtgcgggtggatgagttcaagtaccagatgaccaggacaggctggcacgccacagagcagtacctgattgagcctgagaagatccaggagatgttccccctgctgaacatgaacaaggtgctggccggcctgtacaaccctggagatggccacatcgacccctacagcctgaccatggccctggccgccggggccaggaaatgtggggccctgctgaagtacccagcccctgtgaccagcctgaaggcccggagtgatggcacctgggatgtggagaccccccagggctccatgagggccaaccgcatcgtgaatgctgctggcttctgggcccgggaggtgggcaagatgattggcctggagcaccccctcatccctgtgcagcaccagtatgtggtgaccagcaccatcagcgaggtgaaggccctgaagcgggagctgcctgtgctgcgggacctggagggcagctactacctgcggcaggagagagatggcctgctgtttggcccctatgagagccaggagaagatgaaggtgcaggacagctgggtgaccaatggagtgcccccaggctttgggaaggagctgtttgaaagtgacctggaccgcatcatggagcacatcaaggccgccatggagatggtgcctgtgctgaagaaggctgacatcatcaacgtggtgaatggccccatcacctacagcccagacatcctgcccatggtgggcccccaccagggcgtgaggaactactgggtggccatcggcttcggctacggcatcatccacgccggcggcgtgggcaagtacctgagtgactggatcctgcatggagagcccccatttgacctgattgagctggaccccaacagatatggcaagtggaccaccacccagtacacagaggccaaggcccgggagagctatggcttcaacaacatcgtgggctaccccaaggaggagagatttgctggccggcccacccagagggtgtctggcctgtaccagaggctggagagcaaatgttccatgggcttccacgccggctgggagcagccccactggttctacaagccaggccaggacacccagtaccggcccagcttccggaggaccaactggtttgagcctgtgggcagcgagtacaagcaggtgatgcagagggtggccgtgacagacctgagcccctttgggaagttcaacatcaagggccaggacagcatccggctgctggaccacctgtttgccaacgtcatccccaaggtgggcttcaccaacatcagccacatgctgacccccaagggccgggtgtatgcagagctgactgtgagccaccagagccctggagagttcctgctgatcactggaagtggcagcgagctgcatgacctgcgctggattgaggaggaggccgtgaagggcggctatgatgtggagatcaagaacatcacagatgagctgggcgtgctgggcgtggccggcccccaggccaggaaggtgctgcagaagctgaccagcgaggacctgagtgatgatgtgttcaagttcctgcagaccaagagcctgaaggtgagcaacatccctgtgacagccatccgcatctcctacacaggagagctgggctgggagctgtaccacagaagagaagattctgtggccctgtatgatgccatcatgaatgccggccaggaggagggcatcgacaactttggcacctacgccatgaatgccctgcggctggagaaggccttccgggcctggggcctggagatgaactgtgacaccaaccccctggaggccggcctggagtactttgtgaagctgaacaagccagctgacttcatcggcaagcaggccctgaagcagatcaaggccaagggcctgaagaggcggctggtgtgcctgaccctggccacagatgatgtggaccctgagggcaatgaaagcatctggtacaacgggaaggtggtgggcaacaccaccagcggcagctacagctacagcatccagaagagcctggcctttgcctacgtgcctgtgcagctgtctgaggtgggccagcaggtggaggtggagctgctgggcaagaactacccagctgtgatcatccaggagcccctggtgctgacagagcccaccaggaaccggctgcagaagaagggcggcaaggacaagacctag

SEQ ID NO: 150052 - DNA, 1722 bp, synthetic construct
  misc_feature 1..1722: note = Description of Artificial Sequence: Synthetic coding sequence
  source 1..1722: mol_type = other DNA
atggagcggcagagcaggaacagcgacaactggcgctggctgtgctggtgtgagagcggcctgagccctggccagagcagagatgagcgctgtggccctgctggggagatccgggcccacggctggatctacctggcccggcgcttctgggcccgggaggtgggcaagatgattggcctggagcaccccctcatccctgtgcagcaccagtatgtggtgaccagcaccatcagcgaggtgaaggccctgaagcgggagctgcctgtgctgcgggacctggagggcagctactacctgcggcaggagagagatggcctgctgtttggcccctatgagagccaggagaagatgaaggtgcaggacagctgggtgaccaacggggtgcccccaggctttgggaaggagctgtttgaaagtgacctggaccgcatcatggagcacatcaaggccgccatggagatggtgcctgtgctgaagaaggctgacatcatcaacgtggtgaatggccccatcacctacagcccagacatcctgcccatggtgggcccccaccagggcgtgaggaactactgggtggccatcggcttcggctacggcatcatccatgctggaggagtgggcaagtacctgagtgactggatcctgcacggggagcccccatttgacctgattgagctggaccccaacagatatggcaagtggaccaccacccagtacacagaggccaaggcccgggagagctatggcttcaacaacatcgtgggctaccccaaggaggagagatttgctggccggcccacccagagggtgtctggcctgtaccagaggctggagagcaagtgcagcatgggcttccacgccggctgggagcagccccactggttctacaagccaggccaggacacccagtaccggcccagcttccggaggaccaactggtttgagcctgtgggcagcgagtacaagcaggtgatgcagagggtggccgtgacagacctgagcccctttgggaagttcaacatcaagggccaggacagcatccggctgctggaccacctgtttgccaacgtcatccccaaggtgggcttcaccaacatcagccacatgctgacccccaagggccgggtgtatgcagagctgactgtgagccaccagagccctggagagttcctgctgatcaccggcagcggcagcgagctgcatgacctgcgctggattgaggaggaggccgtgaagggcggctatgatgtggagatcaagaacatcacagatgagctgggcgtgctgggcgtggccggcccccaggccaggaaggtgctgcagaagctgaccagcgaggacctgagtgatgatgtgttcaagttcctgcagaccaagagcctgaaggtgagcaacatccctgtgacagccatccgcatctcctacaccggggagctgggctgggagctgtaccaccggcgggaggacagcgtggccctgtatgatgccatcatgaatgccggccaggaggagggcatcgacaactttggcacctacgccatgaatgccctgcggctggagaaggccttccgggcctggggcctggagatgaactgtgacaccaaccccctggaggccggcctggagtactttgtgaagctgaacaaggaccagaacagctgctttgcccacttcaaggaggagaatggctgggtgagccgctgggccatccggccctactag

SEQ ID NO: 150053 - DNA, 1842 bp, synthetic construct
  misc_feature 1..1842: note = Description of Artificial Sequence: Synthetic coding sequence
  source 1..1842: mol_type = other DNA
tacctgattgagcctgagaagatccaggagatgttccccctgctgaacatgaacaaggtgctggccggcctgtacaaccctggagatggccacatcgacccctacagcctgaccatggccctggccgccggggccaggaaatgtggggccctgctgaagtacccagcccctgtgaccagcctgaaggcccggagtgatggcacctgggatgtggagaccccccagggctccatgagggccaacagaattgtgaatgctgctggcttctgggcccgggaggtgggcaagatgattggcctggagcaccccctcatccctgtgcagcaccagtatgtggtgaccagcaccatcagcgaggtgaaggccctgaagcgggagctgcctgtgctgcgggacctggagggcagctactacctgcggcaggagagagatggcctgctgtttggcccctatgagagccaggagaagatgaaggtgcaggacagctgggtgaccaacggggtgcccccaggctttgggaaggagctgtttgaaagtgacctggaccgcatcatggagcacatcaaggccgccatggagatggtgcctgtgctgaagaaggctgacatcatcaacgtggtgaatggccccatcacctacagcccagacatcctgcccatggtgggcccccaccagggcgtgaggaactactgggtggccatcggcttcggctacggcatcatccatgctggaggagtgggcaagtacctgagtgactggatcctgcacggggagcccccatttgacctgattgagctggaccccaacagatatggcaagtggaccaccacccagtacacagaggccaaggcccgggagagctatggcttcaacaacatcgtgggctaccccaaggaggagagatttgctggccggcccacccagagggtgtctggcctgtaccagaggctggagagcaagtgcagcatgggcttccacgccggctgggagcagccccactggttctacaagccaggccaggacacccagtaccggcccagcttccggaggaccaactggtttgagcctgtgggcagcgagtacaagcaggtgatgcagagggtggccgtgacagacctgagcccctttgggaagttcaacatcaagggccaggacagcatccggctgctggaccacctgtttgccaacgtcatccccaaggtgggcttcaccaacatcagccacatgctgacccccaagggccgggtgtatgcagagctgactgtgagccaccagagccctggagagttcctgctgatcaccggcagcggcagcgagctgcatgacctgcgctggattgaggaggaggccgtgaagggcggctatgatgtggagatcaagaacatcacagatgagctgggcgtgctgggcgtggccggcccccaggccaggaaggtgctgcagaagctgaccagcgaggacctgagtgatgatgtgttcaagttcctgcagaccaagagcctgaaggtgagcaacatccctgtgacagccatccgcatctcctacaccggggagctgggctgggagctgtaccaccggcgggaggacagcgtggccctgtatgatgccatcatgaatgccggccaggaggagggcatcgacaactttggcacctacgccatgaatgccctgcggctggagaaggccttccgggcctggggcctggagatgaactgtgacaccaaccccctggaggccggcctggagtactttgtgaagctgaacaaggaccagaacagctgctttgcccacttcaaggaggagaatggctgggtgagccgctgggccatccggccctactag

SEQ ID NO: 150054 - DNA, 1875 bp, synthetic construct
  misc_feature 1..1875: note = Description of Artificial Sequence: Synthetic coding sequence
  source 1..1875: mol_type = other DNA
atgaccaggacaggctggcacgccacagagcagtacctgattgagcctgagaagatccaggagatgttccccctgctgaacatgaacaaggtgctggccggcctgtacaaccctggagatggccacatcgacccctacagcctgaccatggccctggccgccggggccaggaaatgtggggccctgctgaagtacccagcccctgtgaccagcctgaaggcccggagtgatggcacctgggatgtggagaccccccagggctccatgagggccaaccgcatcgtgaatgctgctggcttctgggcccgggaggtgggcaagatgattggcctggagcaccccctcatccctgtgcagcaccagtatgtggtgaccagcaccatcagcgaggtgaaggccctgaagcgggagctgcctgtgctgcgggacctggagggcagctactacctgcggcaggagagagatggcctgctgtttggcccctatgagagccaggagaagatgaaggtgcaggacagctgggtgaccaatggagtgcccccaggctttgggaaggagctgtttgaaagtgacctggaccgcatcatggagcacatcaaggccgccatggagatggtgcctgtgctgaagaaggctgacatcatcaacgtggtgaatggccccatcacctacagcccagacatcctgcccatggtgggcccccaccagggcgtgaggaactactgggtggccatcggcttcggctacggcatcatccacgccggcggcgtgggcaagtacctgagtgactggatcctgcatggagagcccccatttgacctgattgagctggaccccaacagatatggcaagtggaccaccacccagtacacagaggccaaggcccgggagagctatggcttcaacaacatcgtgggctaccccaaggaggagagatttgctggccggcccacccagagggtgtctggcctgtaccagaggctggagagcaaatgttccatgggcttccacgccggctgggagcagccccactggttctacaagccaggccaggacacccagtaccggcccagcttccggaggaccaactggtttgagcctgtgggcagcgagtacaagcaggtgatgcagagggtggccgtgacagacctgagcccctttgggaagttcaacatcaagggccaggacagcatccggctgctggaccacctgtttgccaacgtcatccccaaggtgggcttcaccaacatcagccacatgctgacccccaagggccgggtgtatgcagagctgactgtgagccaccagagccctggagagttcctgctgatcactggaagtggcagcgagctgcatgacctgcgctggattgaggaggaggccgtgaagggcggctatgatgtggagatcaagaacatcacagatgagctgggcgtgctgggcgtggccggcccccaggccaggaaggtgctgcagaagctgaccagcgaggacctgagtgatgatgtgttcaagttcctgcagaccaagagcctgaaggtgagcaacatccctgtgacagccatccgcatctcctacacaggagagctgggctgggagctgtaccacagaagagaagattctgtggccctgtatgatgccatcatgaatgccggccaggaggagggcatcgacaactttggcacctacgccatgaatgccctgcggctggagaaggccttccgggcctggggcctggagatgaactgtgacaccaaccccctggaggccggcctggagtactttgtgaagctgaacaaggaccagaacagctgctttgcccacttcaaggaggagaatggctgggtgagccgctgggccatccggccctactag

SEQ ID NO: 150055 - DNA, 1185 bp, synthetic construct
  misc_feature 1..1185: note = Description of Artificial Sequence: Synthetic coding sequence
  source 1..1185: mol_type = other DNA
atgtggagctgctggaggaaccagagcagccggctggacctgcccggcacccagtatggcatcatccacgccggcggcgtgggcaagtacctgagtgactggatcctgcatggagagcccccatttgacctgattgagctggaccccaacagatatggcaagtggaccaccacccagtacacagaggccaaggcccgggagagctatggcttcaacaacatcgtgggctaccccaaggaggagagatttgctggccggcccacccagagggtgtctggcctgtaccagaggctggagagcaaatgttccatgggcttccacgccggctgggagcagccccactggttctacaagccaggccaggacacccagtaccggcccagcttccggaggaccaactggtttgagcctgtgggcagcgagtacaagcaggtgatgcagagggtggccgtgacagacctgagcccctttgggaagttcaacatcaagggccaggacagcatccggctgctggaccacctgtttgccaacgtcatccccaaggtgggcttcaccaacatcagccacatgctgacccccaagggccgggtgtatgcagagctgactgtgagccaccagagccctggagagttcctgctgatcactggaagtggcagcgagctgcatgacctgcgctggattgaggaggaggccgtgaagggcggctatgatgtggagatcaagaacatcacagatgagctgggcgtgctgggcgtggccggcccccaggccaggaaggtgctgcagaagctgaccagcgaggacctgagtgatgatgtgttcaagttcctgcagaccaagagcctgaaggtgagcaacatccctgtgacagccatccgcatctcctacacaggagagctgggctgggagctgtaccacagaagagaagattctgtggccctgtatgatgccatcatgaatgccggccaggaggagggcatcgacaactttggcacctacgccatgaatgccctgcggctggagaaggccttccgggcctggggcctggagatgaactgtgacaccaaccccctggaggccggcctggagtactttgtgaagctgaacaaggaccagaacagctgctttgcccacttcaaggaggagaatggctgggtgagccgctgggccatccggccctactag

SEQ ID NO: 150056 - DNA, 4731 bp, synthetic construct
  misc_feature 1..4731: note = Description of Artificial Sequence: Synthetic coding sequence
  source 1..4731: mol_type = other DNA
atggccgagcggggcctggagcccagccctgctgctgtggccgccctgcccccagaggtgcgggcccagctggccgagctggagctggagctgtctgagggggacatcacccagaagggctatgagaagaagaggagcaagctgctgagcccctacagcccccagacccaggagacagattctgctgtgcagaaggagctgaggaaccagaccccagcccccagcgctgcccagaccagcgcccccagcaagtaccacaggaccaggtctgggggcgccagagatgagcgctacagaagtgacatccacacagaggccgtgcaggccgccctggccaagcacaaggagcagaagatggccctgcccatgcccaccaagagaagaagcacctttgtgcagagccctgcagatgcctgcaccccaccagacaccagcagcgcctctgaagatgagggcagcctgcggcggcaggccgccctgtctgctgccctgcagcagagcctgcagaatgctgagagctggatcaacagaagcatccagggcagcagcaccagcagcagcgccagcagcaccctgagccacggggaggtgaagggcaccagcggcagcctggctgatgtgtttgccaacaccagaattgagaacttcagcgcccccccagatgtgaccaccaccaccagcagcagcagcagcagcagcagcatccggcctgccaacatcgacctgcccccatctggaattgtgaagggcatgcacaagggcagcaacagaagcagcctgatggacacagcagatggagtgcctgtgagcagccgggtgtccaccaagatccagcagctgctgaacaccctgaagaggcccaagaggcctcccctgaaggagttctttgtggatgacagcgaggagatcgtggaggtgccccagcctgaccccaaccagcccaagccagagggccggcagatgacccctgtgaagggggagcccctgggcgtcatctgcaactggcccccagccctggagagcgccctgcagcgctggggcaccacccaggccaagtgcagctgcctgacagccctggacatgaccgggaagcctgtgtacaccctgacctacggcaagctgtggagccgcagcctgaagctggcctacaccctgctgaacaagctgggcaccaagaatgaacctgtgctgaagccaggggacagagtggccctggtgtaccccaacaatgaccctgtgatgttcatggtggccttctacggctgcctgctggccgaggtgattcctgtgcccatcgaggtgcccctgaccaggaaggatgctgggggccagcagatcggcttcctgctgggcagctgtggcatcgccctggccctgaccagcgaggtgtgcctgaagggcctgcccaagacccagaatggagagatcgtgcagttcaagggctggccccggctgaagtgggtggtgacagacagcaagtacctgagcaagccacccaaggactggcagccccacatcagccctgctggaacagagcccgcctacatcgagtacaagaccagcaaggagggctctgtgatgggcgtgacagtgtcccggctggccatgctgagccactgccaggccctgagccaggcctgcaactacagcgagggggagaccatcgtgaatgtgctggacttcaagaaggatgctggcctgtggcacggcatgtttgccaacgtgatgaacaagatgcacaccatctctgtgccctacagcgtgatgaagacctgccccctgtcctgggtgcagagggtgcacgcccacaaggccaaggtggccctggtgaagtgccgggacctgcactgggccatgatggcccaccgggaccagagagatgtgtccctgagcagcctgaggatgctgattgtgacagatggagccaacccctggagcgtgagcagctgtgatgccttcctgagcctcttccagagccacggcctgaagccagaggccatctgcccctgtgccaccagcgctgaggccatgacagtggccatccggcggcctggggtgcctggggcccccctgcccggccgggccatcctgtccatgaatggcctgtcctatggagtcatccgggtgaacacagaggacaagaacagcgccctgactgtgcaggatgtgggccacgtgatgcctgggggcatgatgtgcatcgtgaagccagatggccccccccagctgtgcaagacagatgaaattggagagatctgtgtgagcagcaggactggaggcatgatgtacttcggcctggccggcgtgaccaagaacacctttgaggtgattcctgtgaacagcgctggcagccctgtgggagatgtgcccttcatccgcagcggcctgctgggctttgtgggccctggcagcctggtgtttgtggtgggcaagatggatggcctgctgatggtgtctggaagaagacacaatgctgatgacatcgtggccaccggcctggccgtggagagcatcaagacagtgtaccggggcagaattgctgtgttttctgtgtctgtgttctatgatgaaagaattgtggtggtggccgagcagaggccagatgccagcgaggaggacagcttccagtggatgagccgggtgctgcaggccatcgacagcatccaccaggtgggcgtgtactgcctggccctggtgcctgccaacaccctgcccaagacccccctgggcggcatccacatcagccagaccaagcagctgttcctggagggcagcctgcacccctgcaacatcctgatgtgcccccacacctgtgtgaccaacctgcccaagccccggcagaagcagcccggggtgggccctgcctctgtgatggtgggcaacctggtggccggcaagagaattgcccaggccgccggccgggacctgggccagattgaagaaaatgacctggtgaggaagcaccagttcctggccgagatcctgcagtggagggcccaggccaccccagaccacgtgctcttcatgctgctgaatgccaagggcaccaccgtgtgcacagccagctgcctgcagctgcacaagagagctgagagaattgcctctgtgctgggggacaagggccacctgaatgctggggacaacgtggtgctgctgtacccacctggcatcgagctgattgctgccttctacggctgcctgtatgccggctgcatccctgtgacagtgcggcccccccacgcccagaacctgacagccaccctgcccaccgtgaggatgattgtggatgtgtccaaggccgcctgcatcctgaccagccagaccctgatgaggctgctgcggagccgggaggccgctgctgctgtggatgtgaagacctggcccaccatcatcgacacagatgacctgcccaggaagaggctgccccagctgtacaagccacccaccccagagatgctggcctacctggacttctctgtgtccaccaccggcatgctgactggagtgaagatgagccacagcgctgtgaatgccctgtgccgggccatcaagctgcagtgtgagctgtacagcagccggcagatcgccatctgcctggacccctactgcggcctgggctttgccctgtggtgcctgtgcagcgtgtacagcggccaccagagcgtgctgatcccccccatggagctggagaacaacctcttcctgtggctgagcacagtgaaccagtacaagatccgggacaccttctgcagctacagcgtgatggagctgtgcaccaagggcctgggcaaccaggtggaggtgctgaagacccggggcatcaacctgagctgtgtgaggacctgtgtggtggtggccgaggagcggccccgggtggccctgcagcagagcttcagcaagctgttcaaggacatcggcctgagccccagggctgtgtccaccaccttcggcagccgggtgaatgtggccatctgcctgcagggcaccagcggccctgaccccaccaccgtgtatgtggacctgaagagcctgcggcatgacagagtgcggctggtggagcggggggccccccagagcctgctgctgtctgagagcggcaagatcctgcccggggtgaaggtggtgattgtgaaccctgagaccaagggccctgtgggggacagccacctgggggagatctgggtgaacagcccccacacagccagcggctactacaccatctatgacagcgagaccctgcaggccgaccacttcaacacccggctgagctttggagatgctgcccagaccctgtgggccaggacaggctacctgggctttgtgcggaggacagagctgacagctgccaccggggagagacatgatgccctgtatgtggtgggcgccctggatgagaccctggagctgcggggcctgcgctaccaccccattgatattgagacctctgtgagccgcatccacaggagcattgctgaatgtgctgtgttcacctggaccaacctgctggtggtggtggtggagctgtgtggcagcgagcaggaggccctggacctggtgcccctggtgaccaacgtggtgctggaggagcactacctgattgtgggcgtggtggtggtggtggaccccggggtcatccccatcaacagcagaggagagaagcagaggatgcacctgcgggacagcttcctggccgaccagctggaccccatctacgtggcctacaacatgtag

SEQ ID NO: 150057 - DNA, 1179 bp, synthetic construct
  misc_feature 1..1179: note = Description of Artificial Sequence: Synthetic coding sequence
  source 1..1179: mol_type = other DNA
atggccgagcggggcctggagcccagccctgctgctgtggccgccctgcccccagaggtgcgggcccagctggccgagctggagctggagctgtctgagggggacatcacccagaagggctatgagaagaagaggagcaagctgctgagcccctacagcccccagacccaggagacagattctgctgtgcagaaggagctgaggaaccagaccccagcccccagcgctgcccagaccagcgcccccagcaagtaccacaggaccaggtctgggggcgccagagatgagcgctacagaagtgagttcagcctggtgcgcatctacagcgaggacatccacacagaggccgtgcaggccgccctggccaagcacaaggagcagaagatggccctgcccatgcccaccaagagaagaagcacctttgtgcagagccctgcagatgcctgcaccccaccagacaccagcagcgcctctgaagatgagggcagcctgcggcggcaggccgccctgtctgctgccctgcagcagagcctgcagaatgctgagagctggatcaacagaagcatccagggcagcagcaccagcagcagcgccagcagcaccctgagccacggggaggtgaagggcaccagcggcagcctggctgatgtgtttgccaacaccagaattgagaacttcagcgcccccccagatgtgaccaccaccaccagcagcagcagcagcagcagcagcatccggcctgccaacatcgacctgcccccatctggaattgtgaagggcatgcacaagggcagcaacagaagcagcctgatggacacagcagatggagtgcctgtgagcagccgggtgtccaccaagatccagcagctgctgaacaccctgaagaggcccaagaggcctcccctgaaggagttctttgtggatgacagcgaggagatcgtggaggtgccccagcctgaccccaaccagcccaagccagagggccggcagatgacccctgtgaagggggagcccctgggcgtcatctgcaactggcccccagccctggagagcgccctgcagcgctggggcaccacccaggccaagtgcagctgcctgacagccctggacatgaccgggaagcctgtgtacaccctgacctatggagagagcgcccgcttccagatcctgctgtcctag

SEQ ID NO: 150058 - DNA, 4671 bp, synthetic construct
  misc_feature 1..4671: note = Description of Artificial Sequence: Synthetic coding sequence
  source 1..4671: mol_type = other DNA
atggctgacaggagcctggagggcatggccctgcccctggaggtgcgggcccggctggccgagctggagctggagctgtctgagggggacatcacccagaagggctatgagaagaagaggagcaagctgattggagcctacctgccccagcccccccgggtggaccaggccctgccccaggagcggcgggcccctgtgacccccagcagcgccagccgctaccacagaagaagaagcagcggcagcagagatgagcgctacagaagtgatgtgcacacagaagctgtgcaggccgccctggccaagcacaaggagaggaagatggctgtgcccatgcccagcaagaggaggagcctggtggtgcagacctccatggatgcctacaccccaccagacaccagcagcggctctgaagatgagggctctgtgcagggcgacagccagggcacccccaccagcagccagggcagcatcaacatggagcactggatcagccaggccatccacggcagcaccaccagcaccaccagcagcagcagcacccagagcggcggcagcggggccgcccaccggctggctgatgtgatggcccagacccacatcgagaaccacagcgcccccccagatgtgaccacctacaccagcgagcacagcatccaggtggagcggccccagggcagcacaggcagcaggacagcccccaagtatggaaatgctgagctgatggagactggagatggagtgcctgtgagcagccgggtgtctgccaagatccagcagctggtgaacaccctgaagaggcccaagaggcctcccctgcgggagttctttgtggatgactttgaggagctgctggaggtgcagcagcctgaccccaaccagcccaagccagagggcgcccagatgctggccatgagaggagagcagctgggcgtggtgaccaactggccacccagcctggaggccgccctgcagcgctggggcaccatcagccccaaggccccctgcctgaccaccatggacaccaacgggaagcccctgtacatcctgacctacggcaagctgtggaccaggtccatgaaggtggcctacagcatcctgcacaagctgggcaccaagcaggagcccatggtgcggcctggggacagagtggccctggtgttccccaacaatgaccctgctgccttcatggccgccttctacggctgcctgctggccgaggtggtgcctgtgcccatcgaggtgcccctgaccaggaaggatgctggcagccagcagatcggcttcctgctgggcagctgtggggtgacagtggccctgaccagtgatgcctgccacaagggcctgcccaagagccccaccggggagatcccccagttcaagggctggcccaagctgctgtggtttgtgacagagagcaagcacctgagcaagccaccccgggactggttcccccacatcaaggatgccaacaatgacacagcctacatcgagtacaagacctgcaaggatggctctgtgctgggcgtgacagtgaccaggacagccctgctgacccactgccaggccctgacccaggcctgtggctacacagaagctgagaccatcgtgaatgtgctggacttcaagaaggatgtgggcctgtggcacggcatcctgacctctgtgatgaacatgatgcacgtgatcagcatcccctacagcctgatgaaggtgaaccccctgtcctggatccagaaggtgtgccagtacaaggccaaggtggcctgtgtgaagagccgggacatgcactgggccctggtggcccaccgggaccagagggacatcaacctgagcagcctgaggatgctgattgtggctgatggagccaacccctggagcatcagcagctgtgatgccttcctgaatgtgttccagagcaagggcctgcggcaggaggtgatctgcccctgtgccagcagccctgaggccctgactgtggccatcagaagacccacagatgacagcaaccagcccccaggccggggcgtgctgtccatgcacggcctgacctatggagtcatccgggtggacagcgaggagaagctgtctgtgctgactgtgcaggatgtgggcctggtgatgcctggggccatcatgtgcagcgtgaagccagatggagtgccccagctgtgcaggacagatgagatcggggagctgtgtgtgtgtgctgtggccaccggcaccagctactacggcctgagcggcatgaccaagaacacctttgaggtgttccccatgaccagcagcggggcccccatcagcgagtaccccttcatcagaacaggcctgctgggctttgtgggccctgggggcctggtgtttgtggtgggcaagatggatggcctgatggtggtgtctggccgccgccacaatgctgatgacatcgtggccacagccctggccgtggagcccatgaagtttgtgtaccggggcagaattgctgtgttttctgtgacagtgctgcatgatgagcgcatcgtcatcgtggccgagcagaggccagacagcacagaagaagattccttccagtggatgagccgggtgctgcaggccatcgacagcatccaccaggtgggcgtgtactgcctggccctggtgcctgccaacaccctgcccaagacccccctgggcggcatccacctgtctgagaccaagcagctgttcctggagggcagcctgcacccctgcaatgtgctgatgtgcccccacacctgtgtgaccaacctgcccaagccccggcagaagcagcctgagatcggccctgcctctgtgatggtgggcaacctggtgtctgggaagagaattgcccaggccagcggccgggacctgggccagattgaagataatgaccaggccaggaagttcctgttcctgtctgaggtgctgcagtggagggcccagaccaccccagaccacatcctgtacaccctgctgaactgccgcggggccatcgccaacagcctgacctgtgtgcagctgcacaagagagctgagaagattgctgtgatgctgatggagcggggccacctgcaggatggagaccacgtggccctggtgtacccacctggcatcgacctgattgctgccttctacggctgcctgtatgccggctgtgtgcccatcaccgtgcggcccccccacccccagaacatcgccaccaccctgcccaccgtgaagatgattgtggaggtgagccgcagcgcctgcctgatgaccacccagctgatctgcaagctgctgcggagccgggaggccgctgctgctgtggatgtgaggacctggcccctcatcctggacacagatgacctgcccaagaagaggcctgcccagatctgcaagccctgcaacccagacaccctggcctacctggacttctctgtgtccaccaccggcatgctggccggcgtgaagatgagccatgctgccaccagcgccttctgccgcagcatcaagctgcagtgtgagctgtaccccagccgggaggtggccatctgcctggacccctactgcggcctgggctttgtgctgtggtgcctgtgcagcgtgtacagcggccaccagagcatcctgatcccccccagcgagctggagaccaacccagccctgtggctgctggccgtgtcccagtacaaggtgcgggacaccttctgcagctacagcgtgatggagctgtgcaccaagggcctgggcagccagacagagagcctgaaggcccggggcctggacctgagccgggtgaggacctgtgtggtggtggccgaggagcggcccagaattgccctgacccagagcttcagcaagctgttcaaggacctgggcctgcaccccagggctgtgtccaccagctttggctgccgggtgaacctggccatctgcctgcagggcaccagcggccctgaccccaccaccgtgtatgtggacatgagggccctgcggcatgacagagtgcggctggtggagcggggcagcccccacagcctgcccctgatggagagcggcaagatcctgcccggggtgcgcatcatcatcgccaaccctgagaccaagggccccctgggggacagccacctgggggagatctgggtgcacagcgcccacaatgccagcggctacttcaccatctatggagatgagagcctgcagagcgaccacttcaacagccggctgagctttggagacacccagaccatctgggccaggacaggctacctgggcttcctgcggaggacagagctgacagatgccaacggggagagacatgatgccctgtatgtggtgggcgccctggatgaggccatggagctgcggggcatgagataccaccccattgatattgagaccagcgtcatccgggcccacaagtctgtgacagaatgtgctgtgttcacctggaccaacctgctggtggtggtggtggagctggatggcagcgagcaggaggccctggacctggtgcccctggtgaccaacgtggtgctggaggagcactacctgattgtgggcgtggtggtggtggtggacatcggggtcatccccatcaacagcagaggagagaagcagaggatgcacctgagagatggcttcctggccgaccagctggaccccatctacgtggcctacaacatgtag

SEQ ID NO: 150059 - DNA, 1971 bp, synthetic construct
  misc_feature 1..1971: note = Description of Artificial Sequence: Synthetic coding sequence
  source 1..1971: mol_type = other DNA
atggctgtgcccatgcccagcaagagaagaagcctggtggtgcagacctccatggatgcctacaccccaccagacaccagcagcggctctgaagatgagggctctgtgcagggcgacagccagggcacccccaccagcagccagggcagcatcaacatggagcactggatcagccaggccatccacggcagcaccaccagcaccaccagcagcagcagcacccagagcggcggcagcggggccgcccaccggctggctgatgtgatggcccagacccacatcgagaaccacagcgcccccccagatgtgaccacctacaccagcgagcacagcatccaggtggagcggccccagggcagcacaggcagcaggacagcccccaagtatggaaatgctgagctgatggagactggagatggagtgcctgtgagcagccgggtgtctgccaagatccagcagctggtgaacaccctgaagaggcccaagaggcctcccctgcgggagttctttgtggatgactttgaggagctgctggaggtgcagcagcctgaccccaaccagcccaagccagagggcgcccagatgctggccatgagaggagagcagctgggcgtggtgaccaactggccacccagcctggaggccgccctgcagcgctggggcaccatcagccccaaggccccctgcctgaccaccatggacaccaacgggaagcccctgtacatcctgacctacggcaagctgtggaccaggtccatgaaggtggcctacagcatcctgcacaagctgggcaccaagcaggagcccatggtgcggcctggggacagagtggccctggtgttccccaacaatgaccctgctgccttcatggccgccttctacggctgcctgctggccgaggtggtgcctgtgcccatcgaggtgcccctgaccaggaaggatgctggcagccagcagatcggcttcctgctgggcagctgtggggtgacagtggccctgaccagtgatgcctgccacaagggcctgcccaagagccccactggagagatcccccagttcaagggctggcccaagctgctgtggtttgtgacagagagcaagcacctgagcaagccaccccgggactggttcccccacatcaaggatgccaacaatgacacagcctacatcgagtacaagacctgcaaggatggctctgtgctgggcgtgacagtgaccaggacagccctgctgacccactgccaggccctgacccaggcctgtggctacacagaggccgagaccatcgtgaatgtgctggacttcaagaaggatgtgggcctgtggcacggcatcctgacctctgtgatgaacatgatgcacgtgatcagcatcccctacagcctgatgaaggtgaaccccctgtcctggatccagaaggtgtgccagtacaaggccaaggtggcctgtgtgaagagccgggacatgcactgggccctggtggcccaccgggaccagagggacatcaacctgagcagcctgaggatgctgattgtggctgatggagccaacccctggagcatcagcagctgtgatgccttcctgaatgtgttccagagcaagggcctgcggcaggaggtgatctgcccctgtgccagcagccctgaggccctgactgtggccatccggcggcccacagatgacagcaaccagcccccaggccggggcgtgctgtccatgcacggcctgacctacggcgtcatccgggtggacagcgaggagaagctgtctgtgctgactgtgcaggatgtgggcctggtgatgcctggggccatcatgtgcagcgtgaagccagatggagtgccccagctgtgcaggacagatgaaattggagagctgtgtgtgtgtgctgtggccaccggcaccagctactacggcctgagcggcatgaccaagaacacctttgagcacaccagcaacaagggcaagtag

SEQ ID NO: 150060 - DNA, 597 bp, synthetic construct
  misc_feature 1..597: note = Description of Artificial Sequence: Synthetic coding sequence
  source 1..597: mol_type = other DNA
atgagccacgccgccaccagcgccttctgccgcagcatcaagctgcagtgtgagctgtaccccagccgggaggtggccatctgcctggacccctactgcggcctgggctttgtgctgtggtgcctgtgcagcgtgtacagcggccaccagagcatcctgatccccccatctgagctggagaccaacccagccctgtggctgctggccgtgtcccagtacaaggtgcgggacaccttctgcagctacagcgtgatggagctgtgcaccaagggcctgggcagccagacagagagcctgaaggcccggggcctggacctgagccgggtgaggacctgtgtggtggtggccgaggagcggccccgcatcgccctgacccagagcttcagcaagctgttcaaggacctgggcctgcaccccagggctgtgtccaccagctttggctgccgggtgaacctggccatctgcctgcagtgctgggactacagacatgagccccccaggcctgcccccaagtgcttcaagatggtgtacaaggagggcgtgcgctctgtgggggaggacaagatccgggagaagaggaccaagacctggaggtag

SEQ ID NO: 150061 - DNA, 696 bp, synthetic construct
  misc_feature 1..696: note = Description of Artificial Sequence: Synthetic coding sequence
  source 1..696: mol_type = other DNA
tgagaaaccatcgtgaatgtgctggacttcaagaaggatgtgggcctgtggcacggcatcctgacctctgtgatgaacatgatgcacgtgatcagcatcccctacagcctgatgaaggtgaaccccctgtcctggatccagaaggtgtgccagtacaaggccaaggtggcctgtgtgaagagccgggacatgcactgggccctggtggcccaccgggaccagagggacatcaacctgagcagcctgaggatgctgattgtggctgatggagccaacccctggagcatcagcagctgtgatgccttcctgaatgtgttccagagcaagggcctgcggcaggaggtgatctgcccctgtgccagcagccctgaggccctgactgtggccatcagaagacccacagatgacagcaaccagcccccaggccggggcgtgctgtccatgcacggcctgacctatggagtcatccgggtggacagcgaggagaagctgtctgtgctgactgtgcaggatgtgggcctggtgatgcctggggccatcatgtgcagcgtgaagccagatggagtgccccagctgtgcaggacagatgagatcggggagctgtgtgtgtgtgctgtggccaccggcaccagctactacggcctgagcggcatgaccaagaacacctttgagcacaccagcaacaagggcaagtag

SEQ ID NO: 150062 - DNA, 564 bp, synthetic construct
  misc_feature 1..564: note = Description of Artificial Sequence: Synthetic coding sequence
  source 1..564: mol_type = other DNA
atggctgacaggagcctggagggcatggccctgcccctggaggtgcgggcccggctggccgagctggagctggagctgtctgagggggacatcacccagaagggctatgagaagaagaggagcaagctgattggagcctacctgccccagcccccaacagccaatggagctgctgtggtgcgctgccgcctgcagcacagcgagggcgcccccaggaggaccttccgcagcgcccacatcggcgtgtgtgatgtgcgggaggccgccgcccgggagcgggtggccagcacagctggcaaccggcccctcttctacttccgcttcggcgtggaccaggccctgccccaggagcggcgggcccctgtgacccccagcagcgccagccgctaccacagaagaagaagcagcggcagcagagatgagcgctacagaagtgatgtgcacacagaagctgtgcaggccgccctggccaagcacaaggagaggaagatggctgtgcccatgcccagcaagaggaggagcctggtggtgcagacctccatggatgcctacaccccaccctag

SEQ ID NO: 150063 - DNA, 468 bp, synthetic construct
  misc_feature 1..468: note = Description of Artificial Sequence: Synthetic coding sequence
  source 1..468: mol_type = other DNA
tgagtgtacagcggccaccagagcatcctgatcccccccagcgagctggagaccaacccagccctgtggctgctggccgtgtcccagtacaaggtgcgggacaccttctgcagctacagcgtgatggagctgtgcaccaagggcctgggcagccagacagagagcctgaaggcccggggcctggacctgagccgggtgaggacctgtgtggtggtggccgaggagcggcccagaattgccctgacccagagcttcagcaagctgttcaaggacctgggcctgcaccccagggctgtgtccaccagctttggctgccgggtgaacctggccatctgcctgcagtgctgggactacagacatgagccccccaggcctgcccccaagtgcttcaagatggtgtacaaggagggcgtgcgctctgtgggggaggacaagatccgggagaagaggaccaagacctggaggtag

SEQ ID NO: 150064 - DNA, 1446 bp, synthetic construct
  misc_feature 1..1446: note = Description of Artificial Sequence: Synthetic coding sequence
  source 1..1446: mol_type = other DNA
atctgggtgagccgcagcgcctgcctgatgaccacccagctgatctgcaagctgctgcggagccgggaggccgctgctgctgtggatgtgaggacctggcccctcatcctggacacagatgacctgcccaagaagaggcctgcccagatctgcaagccctgcaacccagacaccctggcctacctggacttctctgtgtccaccaccggcatgctggccggcgtgaagatgagccacgccgccaccagcgccttctgccgcagcatcaagctgcagtgtgagctgtaccccagccgggaggtggccatctgcctggacccctactgcggcctgggctttgtgctgtggtgcctgtgcagcgtgtacagcggccaccagagcatcctgatccccccatctgagctggagaccaacccagccctgtggctgctggccgtgtcccagtacaaggtgcgggacaccttctgcagctacagcgtgatggagctgtgcaccaagggcctgggcagccagacagagagcctgaaggcccggggcctggacctgagccgggtgaggacctgtgtggtggtggccgaggagcggccccgcatcgccctgacccagagcttcagcaagctgttcaaggacctgggcctgcaccccagggctgtgtccaccagctttggctgccgggtgaacctggccatctgcctgcagggcaccagcggccctgaccccaccaccgtgtatgtggacatgagggccctgcggcatgacagagtgcggctggtggagcggggcagcccccacagcctgcccctgatggagagcggcaagatcctgcccggggtgcgcatcatcatcgccaaccctgagaccaagggccccctgggggacagccacctgggggagatctgggtgcacagcgcccacaatgccagcggctacttcaccatctatggagatgagagcctgcagagcgaccacttcaacagccggctgagctttggagacacccagaccatctgggccaggacaggctacctgggcttcctgcggaggacagagctgacagatgccaatggagagagacatgatgccctgtatgtggtgggcgccctggatgaggccatggagctgcggggcatgagataccaccccatcgacatcgagaccagcgtcatccgggcccacaagtctgtgacagaatgtgctgtgttcacctggaccaacctgctggtggtggtggtggagctggatggcagcgagcaggaggccctggacctggtgcccctggtgaccaacgtggtgctggaggagcactacctgattgtgggcgtggtggtggtggtggacattggagtcatccccatcaacagcagaggagagaagcagaggatgcacctgagagatggcttcctggccgaccagctggaccccatctacgtggcctacaacatgtag

SEQ ID NO: 150065 - DNA, 1116 bp, synthetic construct
  misc_feature 1..1116: note = Description of Artificial Sequence: Synthetic coding sequence
  source 1..1116: mol_type = other DNA
atgcacggcctgacctacggcgtcatccgggtggacagcgaggagaagctgtctgtgctgactgtgcaggatgtgggcctggtgatgcctggggccatcatgtgcagcgtgaagccagatggagtgccccagctgtgcaggacagatgaaattggagagctgtgtgtgtgtgctgtggccaccggcaccagctactacggcctgagcggcatgaccaagaacacctttgaggtgttccccatgaccagcagcggggcccccatcagcgagtaccccttcatcagaacaggcctgctgggctttgtgggccctgggggcctggtgtttgtggtgggcaagatggatggcctgatggtggtgtctggaagaagacacaatgctgatgacatcgtggccacagccctggccgtggagcccatgaagtttgtgtaccggggcagaattgctgtgttttctgtgacagtgctgcatgatgaaagaattgtgattgtggccgagcagaggccagacagcacagaggaggacagcttccagtggatgagccgggtgctgcaggccatcgacagcatccaccaggtgggcgtgtactgcctggccctggtgcctgccaacaccctgcccaagacccccctgggcggcatccacctgtctgagaccaagcagctgttcctggagggcagcctgcacccctgcaatgtgctgatgtgcccccacacctgtgtgaccaacctgcccaagccccggcagaagcagcctgagatcggccctgcctctgtgatggtgggcaacctggtgtctgggaagagaattgcccaggccagcggccgggacctgggccagatcgaggacaatgaccaggccaggaagttcctgttcctgtctgaggtgctgcagtggagggcccagaccaccccagaccacatcctgtacaccctgctgaactgccgggtgagaagaggagctggcctgccctggctgctggccagccggggcctggcctggttcctgggcgccctgctgctgctgagcctgaacccctttgcctctgtgctgtgggagttcttcctgtgctttgccatcctgacagagacctttgtgccccgggactgcttctag

SEQ ID NO: 150066 - DNA, 1236 bp, synthetic construct
  misc_feature 1..1236: note = Description of Artificial Sequence: Synthetic coding sequence
  source 1..1236: mol_type = other DNA
atgtggagcggctggtggctgtggcccctggtggccgtgtgcacagctgacttcttcagagatgaagctgagcgcatcatgagggacagccctgtgattgatggccacaatgacctgccctggcagctgctggacatgttcaacaaccggctgcaggatgagcgggccaacctgaccaccctggccggcacccacaccaacatccccaagctgcgggccggctttgtgggcggccagttctggagcgtgtacaccccctgtgacacccagaacaaggatgctgtgcggaggaccctggagcagatggatgtggtgcacaggatgtgcaggatgtacccagagaccttcctgtatgtgaccagcagcgctggcatccggcaggccttccgggagggcaaggtggccagcctcatcggcgtggagggcggccacagcattgacagcagcctgggcgtgctgcgggccctgtaccagctgggcatgagatacctgaccctgacccacagctgcaacaccccctgggccgacaactggctggtggacaccggggacagcgagccccagagccagggcctgagccccttcggccagagggtggtgaaggagctgaaccggctgggcgtgctgattgacctggcccacgtgtctgtggccaccatgaaggccaccctgcagctgagccgggcccctgtgatcttcagccacagcagcgcctacagcgtgtgtgccagcagaagaaatgtgcctgatgatgtgctgcggctggtgaagcagacagacagcctggtgatggtgaacttctacaacaactacatcagctgcaccaacaaggccaacctgagccaggtggccgaccacctggaccacatcaaggaggtggccggggcccgggctgtgggctttggaggagactttgatggagtgccccgggtgcctgagggcctggaggatgtgtccaagtacccagacctgattgctgagctgctgcggaggaactggacagaggccgaggtgaagggggccctggccgacaacctgctgcgggtgtttgaggccgtggagcaggccagcaacctgacccaggcccctgaggaggagcccatccccctggaccagctgggcggcagctgcaggacccactacggctacagcagcggggccagcagcctgcaccgccactggggcctgctgctggccagcctggcccccctggtgctgtgcctgagcctgctgtag

SEQ ID NO: 150067 - DNA, 1236 bp, synthetic construct; identical to SEQ ID NO: 150066
  misc_feature 1..1236: note = Description of Artificial Sequence: Synthetic coding sequence
  source 1..1236: mol_type = other DNA

SEQ ID NO: 150068 - DNA, 1236 bp, synthetic construct; identical to SEQ ID NO: 150066
  misc_feature 1..1236: note = Description of Artificial Sequence: Synthetic coding sequence
  source 1..1236: mol_type = other DNA

SEQ ID NO: 150069 - DNA, 381 bp, synthetic construct
  misc_feature 1..381: note = Description of Artificial Sequence: Synthetic coding sequence
  source 1..381: mol_type = other DNA
atgcagcccagcggcctggagggccctggcaccttcggccgctggcccctgctgagcctgctgctgctgctgctgctgctgcagcctgtgacctgtgcctacaccaccccaggccccccccgggccctgaccaccctgggcgccccccgggcccacaccatgcctggcacctacgcccccagcaccaccctgagcagccccagcacccagggcctgcaggagcaggcccgggccctgatgagggacttccccctggtggatggcagcggccagcccatgtgccacgcccggcccaggacaggcatgccctgtgccagcccctggagccggctgaccagctatgctgcctgtgtgccccccatcctgtcctggagcctgtag

SEQ ID NO: 150070 - DNA, 1200 bp, synthetic construct
  misc_feature 1..1200: note = Description of Artificial Sequence: Synthetic coding sequence
  source 1..1200: mol_type = other DNA
atgcagcccagcggcctggagggccctggcaccttcggccgctggcccctgctgagcctgctgctgctgctgctgctgctgcagcctgtgacctgtgcctacaccaccccaggccccccccgggccctcttctggagcgcctacgtgccctgccagacccaggacagagatgccctgcggctgaccctggagcagattgacctgatccggaggatgtgtgccagctacagcgagctggagctggtgaccagcgccaaggccctgaatgacacccagaagctggcctgcctgattggagtggagggcggccacagcctggacaacagcctgagcatcctgcccaccttctacatgctgggcgtgcgctacctgaccctgacccacacctgcaacaccccctgggccgagagcagcgccaagggcgtgcacagcttctacaacaacatcagcggcctgacagactttggagagaaggtggtggccgagatgaaccggctgggcatgatggtggacctgagccacgtgtctgatgctgtggcccggcgggccctggaggtgtcccaggcccctgtgatcttcagccacagcgctgcccggggcgtgtgcaacagcgccagaaatgtgcctgatgacatcctgcagctgctgaagaagaatggaggagtggtgatggtgtccctgtccatgggcgtcatccagtgcaaccccagcgccaacgtgtccacagtggccgaccactttgaccacatcaaggccgtcatcggcagcaagttcatcggcattggaggagactatgatggagctgggaagttcccccagggcctggaggatgtgtccacctaccctgtgctgattgaggagctgctgagccggggctggagcgaggaggagctgcagggcgtgctgcggggcaacctgctgcgggtcttccggcaggtggagaaggtgcaggaggagaacaagtggcagagccccctggaggacaagttcccagatgagcagctgagcagcagctgccacagcgacctgagccggctgcggcagaggcagagcctgaccagcggccaggagctgacagagatccccatccactggacagccaagctgcctgccaagtggagcgtgtctgagagcagcccccacatggcccctgtgctggccgtggtggccaccttccctgtgctgatcctgtggctgtag

SEQ ID NO: 150071 - DNA, 1461 bp, synthetic construct
  misc_feature 1..1461: note = Description of Artificial Sequence: Synthetic coding sequence
  source 1..1461: mol_type = other DNA
atgcagcccagcggcctggagggccctggcaccttcggccgctggcccctgctgagcctgctgctgctgctgctgctgctgcagcctgtgacctgtgcctacaccaccccaggccccccccgggccctgaccaccctgggcgccccccgggcccacaccatgcctggcacctacgcccccagcaccaccctgagcagccccagcacccagggcctgcaggagcaggcccgggccctgatgagggacttccccctggtggatggccacaatgacctgcccctggtgctgcggcaggtgtaccagaagggcctgcaggatgtgaacctgaggaacttctcctatggccagaccagcctggaccggctgagagatggcctggtgggcgcccagttctggagcgcctacgtgccctgccagacccaggacagagatgccctgcggctgaccctggagcagattgacctgatccggaggatgtgtgccagctacagcgagctggagctggtgaccagcgccaaggccctgaatgacacccagaagctggcctgcctgattggagtggagggcggccacagcctggacaacagcctgagcatcctgcccaccttctacatgctgggcgtgcgctacctgaccctgacccacacctgcaacaccccctgggccgagagcagcgccaagggcgtgcacagcttctacaacaacatcagcggcctgacagactttggagagaaggtggtggccgagatgaaccggctgggcatgatggtggacctgagccacgtgtctgatgctgtggcccggcgggccctggaggtgtcccaggcccctgtgatcttcagccacagcgctgcccggggcgtgtgcaacagcgccagaaatgtgcctgatgacatcctgcagctgctgaagaagaatggaggagtggtgatggtgtccctgtccatgggcgtcatccagtgcaaccccagcgccaacgtgtccacagtggccgaccactttgaccacatcaaggctgtgattggcagcaagttcatcggcatcggcggggactatgatggagctgggaagttcccccagggcctggaggatgtgtccacctaccctgtgctgattgaggagctgctgagccggggctggagcgaggaggagctgcagggcgtgctgcggggcaacctgctgcgggtcttccggcaggtggagaaggtgcaggaggagaacaagtggcagagccccctggaggacaagttcccagatgagcagctgagcagcagctgccacagcgacctgagccggctgcggcagaggcagagcctgaccagcggccaggagctgacagagatccccatccactggacagccaagctgcctgccaagtggagcgtgtctgagagcagcccccacatggcccctgtgctggccgtggtggccaccttccctgtgctgatcctgtggctgtag

SEQ ID NO: 150072 - DNA, 1461 bp, synthetic construct; identical to SEQ ID NO: 150071
  misc_feature 1..1461: note = Description of Artificial Sequence: Synthetic coding sequence
  source 1..1461: mol_type = other DNA

SEQ ID NO: 150073 - DNA, 1542 bp, synthetic construct
  misc_feature 1..1542: note = Description of Artificial Sequence: Synthetic coding sequence
  source 1..1542: mol_type = other DNA
atgatccgcacccccctgagcgccagcgcccaccggctgctgctgcccggcagccggggccggccccccaggaacatgcagcccaccggccgggagggcagccgggccctgagccgccgctacctgcggcggctgctgctgctgctgctgctgctgctgctgcggcagcctgtgaccagggctgagaccacccctggggccccccgggccctgagcaccctgggcagccccagcctcttcaccaccccaggagtgcccagcgccctgaccaccccaggcctgaccaccccaggcacccccaagaccctggacctgcggggccgggcccaggccctgatgaggagcttccccctggtggatggccacaatgacctgccccaggtgctgcggcagcgctacaagaatgtgctgcaggatgtgaacctgaggaacttcagccacggccagaccagcctggaccggctgagagatggcctggtgggcgcccagttctggagcgcctctgtgtcctgccagagccaggaccagacagctgtgcggctggccctggagcagattgacctgatccacaggatgtgtgccagctacagcgagctggagctggtgaccagcgctgagggcctgaacagcagccagaagctggcctgcctgattggagtggagggcggccacagcctggacagcagcctgtctgtgctgcgctccttctacgtgctgggcgtgcgctacctgaccctgaccttcacctgcagcaccccctgggccgagagcagcaccaagttccgccaccacatgtacaccaacgtgtctggcctgaccagctttggagagaaggtggtggaggagctgaaccggctgggcatgatgattgacctgtcctatgccagtgacaccctcatcagaagagtgctggaggtgtcccaggcccctgtgatcttcagccacagcgctgcccgggctgtgtgtgacaacctgctgaatgtgcctgatgacatcctgcagctgctgaagaagaatggaggcatcgtgatggtgaccctgtccatgggcgtgctgcagtgcaacctgctggccaacgtgtccacagtggccgaccactttgaccacatccgggccgtcatcggcagcgagttcatcggcattggaggcaactatgatggcaccggccgcttcccccagggcctggaggatgtgtccacctaccctgtgctgattgaggagctgctgagccgctcctggagcgaggaggagctgcagggcgtgctgcggggcaacctgctgcgggtcttccggcaggtggagaaggtgcgggaggagagccgggcccagagccctgtggaggccgagttcccctacggccagctgagcaccagctgccacagccacctggtgccccagaatggccaccaggccacccacctggaggtgaccaagcagcccaccaacagagtgccctggaggagcagcaatgccagcccctacctggtgcccggcctggtggccgccgccaccatccccaccttcacccagtggctgtgctag

SEQ ID NO: 150074 - DNA, 2370 bp, synthetic construct
  misc_feature 1..2370: note = Description of Artificial Sequence: Synthetic coding sequence
  source 1..2370: mol_type = other DNA
atgaggaaggtggagagcagaggagagggcggccgggaggagctgggcagcaacagccccccccagaggaactggaagggcatcgccatcgccctgctggtgatcctggtggtgtgcagcctcatcaccatgtctgtcatcctgctgaccccagatgagctgaccaacagcagcgagacccggctgagcctggaggacctcttcaggaaggactttgtgctgcatgaccctgaggcccgctggatcaatgacacagatgtggtgtacaagtcagaaaatggacatgtgatcaagctgaacatcgagaccaatgccaccaccctgctgctggagaacaccacctttgtgaccttcaaggccagccgccacagcgtgtccccagacctgaagtatgtgctgctggcctatgatgtgaagcagatcttccactacagctacacagccagctatgtgatctacaacatccacacccgggaggtgtgggagctgaaccccccagaggtggaggacagcgtgctgcagtatgctgcctggggcgtgcagggccagcagctgatctacatctttgagaacaacatctactaccagcctgacatcaagagcagcagcctgcggctgaccagcagcggcaaggaggagatcatcttcaatggaattgctgactggctgtatgaggaggagctgctgcacagccacatcgcccactggtggagcccagatggagagcggctggccttcctgatgatcaatgacagcctggtgcccaccatggtgatcccccgcttcaccggggccctgtaccccaagggcaagcagtacccctaccccaaggccggccaggtgaaccccaccatcaagctgtatgtggtgaacctgtatggccccacccacaccctggagctgatgcccccagacagcttcaagagccgggagtactacatcaccatggtgaagtgggtgagcaacaccaagacagtggtgcgctggctgaacagagcccagaacatcagcatcctgactgtgtgtgagaccaccaccggggcctgcagcaagaagtatgagatgaccagtgacacctggctgagccagcagaatgaggagcccgtcttcagcagagatggcagcaagttcttcatgacagtgcctgtgaagcagggcggccgcggggagttccaccacgtggccatgttcctgatccagagcaagtctgagcagatcaccgtgcgccacctgaccagcggcaactgggaggtgatcaagatcctggcctatgatgagaccacccagaagatctacttcctgagcacagagagcagcccccggggccggcagctgtacagcgccagcacagagggcctgctgaaccggcagtgcatcagctgcaacttcatgaaggagcagtgcacctactttgatgccagcttcagccccatgaaccagcacttcctgctcttctgtgagggcccccgggtgcctgtggtgtccctgcacagcacagacaacccagccaagtacttcatcctggagagcaacagcatgctgaaggaggccatcctgaagaagaagattggcaagccagagatcaagatcctgcacattgatgattatgagctgcccctgcagctgagcctgcccaaggacttcatggacaggaaccagtatgccctgctgctgatcatggatgaggagcccggcggccagctggtgacagacaagttccacatcgactgggacagcgtgctgattgacatggacaacgtcatcgtggccaggtttgatggccggggcagcggcttccagggcctgaagatcctgcaggagatccaccggcggctgggctctgtggaggtgaaggaccagatcacagctgtgaagttcctgctgaagctgccctacatcgacagcaagaggctgagcatctttgggaagggctatggaggctacatcgcctccatgatcctgaagagtgatgagaagctgttcaagtgtggctctgtggtggcccccatcacagacctgaagctgtatgccagcgccttcagcgagcgctacctgggcatgcccagcaaggaggagagcacctaccaggccgcctctgtgctgcacaacgtgcacggcctgaaggaggagaacatcctgatcatccacggcacagctgacaccaaggtgcacttccagcacagcgctgagctgatcaagcacctgatcaaggccggcgtgaactacaccatgcaggtgtacccagatgagggccacaacgtgtctgagaagagcaagtaccacctgtacagcaccatcctgaagttcttcagtgactgcctgaaggaggagatctctgtgctgccccaggagccagaagaagatgaatag

SEQ ID NO: 150075 - DNA, 2403 bp, synthetic construct
  misc_feature 1..2403: note = Description of Artificial Sequence: Synthetic coding sequence
  source 1..2403: mol_type = other DNA
atgacagctgccaagcaggagccccagcccacccctggggcccgggccagccaggcccagcctgctgaccaggagctgggcagcaacagccccccccagaggaactggaagggcatcgccatcgccctgctggtgatcctggtggtgtgcagcctcatcaccatgtctgtcatcctgctgaccccagatgagctgaccaacagcagcgagacccggctgagcctggaggacctcttcaggaaggactttgtgctgcatgaccctgaggcccgctggatcaatgacacagatgtggtgtacaagtcagaaaatggccacgtgatcaagctgaacatcgagaccaatgccaccaccctgctgctggagaacaccacctttgtgaccttcaaggccagccgccacagcgtgtccccagacctgaagtatgtgctgctggcctatgatgtgaagcagatcttccactacagctacacagccagctatgtgatctacaacatccacacccgggaggtgtgggagctgaaccccccagaggtggaggacagcgtgctgcagtatgctgcctggggcgtgcagggccagcagctgatctacatctttgagaacaacatctactaccagcctgacatcaagagcagcagcctgcggctgaccagcagcggcaaggaggagatcatcttcaacggcattgctgactggctgtatgaggaggagctgctgcacagccacatcgcccactggtggagcccagatggagagcggctggccttcctgatgatcaatgacagcctggtgcccaccatggtgatcccccgcttcaccggggccctgtaccccaagggcaagcagtacccctaccccaaggccggccaggtgaaccccaccatcaagctgtatgtggtgaacctgtatggccccacccacaccctggagctgatgcccccagacagcttcaagagccgggagtactacatcaccatggtgaagtgggtgagcaacaccaagacagtggtgcgctggctgaacagagcccagaacatcagcatcctgactgtgtgtgagaccaccactggagcctgcagcaagaagtatgagatgaccagtgacacctggctgagccagcagaatgaggagcctgtgttcagcagagatggcagcaagttcttcatgacagtgcctgtgaagcagggcggccgcggggagttccaccacgtggccatgttcctgatccagagcaagtctgagcagatcaccgtgcgccacctgaccagcggcaactgggaggtgatcaagatcctggcctatgatgagaccacccagaagatctacttcctgagcacagagagcagcccccggggccggcagctgtacagcgccagcacagagggcctgctgaaccggcagtgcatcagctgcaacttcatgaaggagcagtgcacctactttgatgccagcttcagccccatgaaccagcacttcctgctcttctgtgagggcccccgggtgcctgtggtgtccctgcacagcacagacaacccagccaagtacttcatcctggagagcaacagcatgctgaaggaggccatcctgaagaagaagattggcaagccagagatcaagatcctgcacattgatgattatgagctgcccctgcagctgagcctgcccaaggacttcatggacaggaaccagtatgccctgctgctgatcatggatgaggagcccggcggccagctggtgacagacaagttccacatcgactgggacagcgtgctgattgacatggacaacgtgattgtggccaggtttgatggccggggcagcggcttccagggcctgaagatcctgcaggagatccaccggcggctgggctctgtggaggtgaaggaccagatcacagctgtgaagttcctgctgaagctgccctacatcgacagcaagaggctgagcatctttgggaagggctacggcggctacatcgcctccatgatcctgaagagtgatgagaagctgttcaagtgtggctctgtggtggcccccatcacagacctgaagctgtatgccagcgccttcagcgagcgctacctgggcatgcccagcaaggaggagagcacctaccaggccgcctctgtgctgcacaacgtgcacggcctgaaggaggagaacatcctgatcatccatggaacagctgacaccaaggtgcacttccagcacagcgctgagctgatcaagcacctgatcaaggccggcgtgaactacaccatgcaggtgtacccagatgagggccacaacgtgtctgagaagagcaagtaccacctgtacagcaccatcctgaagttcttcagtgactgcctgaaggaggagatctctgtgctgccccaggagcctgaggaggatgaatag

SEQ ID NO: 150076 - DNA, 2391 bp, synthetic construct
  misc_feature 1..2391: note = Description of Artificial Sequence: Synthetic coding sequence
  source 1..2391: mol_type = other DNA
atgaaccagacagcctctgtgagccaccacatcaagtgccagcccagcaagaccatcaaggagctgggcagcaacagccccccccagaggaactggaagggcatcgccatcgccctgctggtgatcctggtggtgtgcagcctcatcaccatgtctgtcatcctgctgaccccagatgagctgaccaacagcagcgagacccggctgagcctggaggacctcttcaggaaggactttgtgctgcatgaccctgaggcccgctggatcaatgacacagatgtggtgtacaagtcagaaaatggccacgtgatcaagctgaacatcgagaccaatgccaccaccctgctgctggagaacaccacctttgtgaccttcaaggccagccgccacagcgtgtccccagacctgaagtatgtgctgctggcctatgatgtgaagcagatcttccactacagctacacagccagctatgtgatctacaacatccacacccgggaggtgtgggagctgaaccccccagaggtggaggacagcgtgctgcagtatgctgcctggggcgtgcagggccagcagctgatctacatctttgagaacaacatctactaccagcctgacatcaagagcagcagcctgcggctgaccagcagcggcaaggaggagatcatcttcaacggcattgctgactggctgtatgaggaggagctgctgcacagccacatcgcccactggtggagcccagatggagagcggctggccttcctgatgatcaatgacagcctggtgcccaccatggtgatcccccgcttcaccggggccctgtaccccaagggcaagcagtacccctaccccaaggccggccaggtgaaccccaccatcaagctgtatgtggtgaacctgtatggccccacccacaccctggagctgatgcccccagacagcttcaagagccgggagtactacatcaccatggtgaagtgggtgagcaacaccaagacagtggtgcgctggctgaacagagcccagaacatcagcatcctgactgtgtgtgagaccaccactggagcctgcagcaagaagtatgagatgaccagtgacacctggctgagccagcagaatgaggagcctgtgttcagcagagatggcagcaagttcttcatgacagtgcctgtgaagcagggcggccgcggggagttccaccacgtggccatgttcctgatccagagcaagtctgagcagatcaccgtgcgccacctgaccagcggcaactgggaggtgatcaagatcctggcctatgatgagaccacccagaagatctacttcctgagcacagagagcagcccccggggccggcagctgtacagcgccagcacagagggcctgctgaaccggcagtgcatcagctgcaacttcatgaaggagcagtgcacctactttgatgccagcttcagccccatgaaccagcacttcctgctcttctgtgagggcccccgggtgcctgtggtgtccctgcacagcacagacaacccagccaagtacttcatcctggagagcaacagcatgctgaaggaggccatcctgaagaagaagattggcaagccagagatcaagatcctgcacattgatgattatgagctgcccctgcagctgagcctgcccaaggacttcatggacaggaaccagtatgccctgctgctgatcatggatgaggagcccggcggccagctggtgacagacaagttccacatcgactgggacagcgtgctgattgacatggacaacgtgattgtggccaggtttgatggccggggcagcggcttccagggcctgaagatcctgcaggagatccaccggcggctgggctctgtggaggtgaaggaccagatcacagctgtgaagttcctgctgaagctgccctacatcgacagcaagaggctgagcatctttgggaagggctacggcggctacatcgcctccatgatcctgaagagtgatgagaagctgttcaagtgtggctctgtggtggcccccatcacagacctgaagctgtatgccagcgccttcagcgagcgctacctgggcatgcccagcaaggaggagagcacctaccaggccgcctctgtgctgcacaacgtgcacggcctgaaggaggagaacatcctgatcatccatggaacagctgacaccaaggtgcacttccagcacagcgctgagctgatcaagcacctgatcaaggccggcgtgaactacaccatgcaggtgtacccagatgagggccacaacgtgtctgagaagagcaagtaccacctgtacagcaccatcctgaagttcttcagtgactgcctgaaggaggagatctctgtgctgccccaggagcctgaggaggatgaatag

SEQ ID NO: 150077 - DNA, 294 bp, synthetic construct
  misc_feature 1..294: note = Description of Artificial Sequence: Synthetic coding sequence
  source 1..294: mol_type = other DNA
atgtctgtcatcctgctgaccccagatgagctgaccaacagcagcgagacccggctgagcctggaggacctcttcaggaaggactttgtgctgcatgaccctgaggcccgctggatcaatgacacagatgtggtgtacaagtcagaaaatggccacgtgatcaagctgaacatcgagaccaatgccaccaccctgctgctggagaacaccacctttgtgaccttcaaggccagccgccacagcgtgtccccagacctgaagtatgtgctgctggcctatgatgtgaagcagtag

SEQ ID NO: 150078 - DNA, 1803 bp, synthetic construct
  misc_feature 1..1803: note = Description of Artificial Sequence: Synthetic coding sequence
  source 1..1803: mol_type = other DNA
ctgagcatcctgatcctgaccagcaatgagctgaccaacagcagcgagacccggctgagcctggaggacctcttcaggaaggactttgtgctgcatgaccctgaggcccgctggatcaatgacacagatgtggtgtacaagtcagaaaatggccacgtgatcaagctgaacatcgagaccaatgccaccaccctgctgctggagaacaccacctttgtgaccttcaaggccagccgccacagcgtgtccccagacctgaagtatgtgctgctggcctatgatgtgaagcagatcttccactacagctacacagccagctatgtgatctacaacatccacacccgggaggtgtgggagctgaaccccccagaggtggaggacagcgtgctgcagtatgctgcctggggcgtgcagggccagcagctgatctacatctttgagaacaacatctactaccagcctgacatcaagagcagcagcctgcggctgaccagcagcggcaaggaggagatcatcttcaacggcattgctgactggctgtatgaggaggagctgctgcacagccacatcgcccactggtggagcccagatggagagcggctggccttcctgatgatcaatgacagcctggtgcccaccatggtgatcccccgcttcaccggggccctgtaccccaagggcaagcagtacccctaccccaaggccggccaggtgaaccccaccatcaagctgtatgtggtgaacctgtatggccccacccacaccctggagctgatgcccccagacagcttcaagagccgggagtactacatcaccatggtgaagtgggtgagcaacaccaagacagtggtgcgctggctgaacagagcccagaacatcagcatcctgactgtgtgtgagaccaccactggagcctgcagcaagaagtatgagatgaccagtgacacctggctgagccagcagaatgaggagcctgtgttcagcagagatggcagcaagttcttcatgacagtgcctgtgaagcagggcggccgcggggagttccaccacgtggccatgttcctgatccagagcaagtctgagcagatcaccgtgcgccacctgaccagcggcaactgggaggtgatcaagatcctggcctatgatgagaccacccagaagatctacttcctgagcacagagagcagcccccggggccggcagctgtacagcgccagcacagagggcctgctgaaccggcagtgcatcagctgcaacttcatgaaggagcagtgcacctactttgatgccagcttcagccccatgaaccagcacttcctgctcttctgtgagggcccccgggtgcctgtggtgtccctgcacagcacagacaacccagccaagtacttcatcctggagagcaacagcatgctgaaggaggccatcctgaagaagaagattggcaagccagagatcaagatcctgcacattgatgattatgagctgcccctgcagctgagcctgcccaaggacttcatggacaggaaccagtatgccctgctgctgatcatggatgaggagcccggcggccagctggtgacagacaagttccacatcgactgggacagcgtgctgattgacatggacaacgtgattgtggccaggtttgatggccggggcagcggcttccagggcctgaagatcctgcaggagatccaccggcggctgggctctgtggaggtgaaggaccagatcacagctgtgaagttcctgctgaagctgccctacatcgacagcaagaggctgagcatctttgggaagtag

SEQ ID NO: 150079 - DNA, 2241 bp, synthetic construct
  misc_feature 1..2241: note = Description of Artificial Sequence: Synthetic coding sequence
  source 1..2241: mol_type = other DNA
atgtctgtcatcctgctgaccccagatgagctgaccaacagcagcgagacccggctgagcctggaggacctcttcaggaaggactttgtgctgcatgaccctgaggcccgctggatcaatgacacagatgtggtgtacaagtcagaaaatggccacgtgatcaagctgaacatcgagaccaatgccaccaccctgctgctggagaacaccacctttgtgaccttcaaggccagccgccacagcgtgtccccagacctgaagtatgtgctgctggcctatgatgtgaagcagatcttccactacagctacacagccagctatgtgatctacaacatccacacccgggaggtgtgggagctgaaccccccagaggtggaggacagcgtgctgcagtatgctgcctggggcgtgcagggccagcagctgatctacatctttgagaacaacatctactaccagcctgacatcaagagcagcagcctgcggctgaccagcagcggcaaggaggagatcatcttcaacggcattgctgactggctgtatgaggaggagctgctgcacagccacatcgcccactggtggagcccagatggagagcggctggccttcctgatgatcaatgacagcctggtgcccaccatggtgatcccccgcttcaccggggccctgtaccccaagggcaagcagtacccctaccccaaggccggccaggtgaaccccaccatcaagctgtatgtggtgaacctgtatggccccacccacaccctggagctgatgcccccagacagcttcaagagccgggagtactacatcaccatggtgaagtgggtgagcaacaccaagacagtggtgcgctggctgaacagagcccagaacatcagcatcctgactgtgtgtgagaccaccactggagcctgcagcaagaagtatgagatgaccagtgacacctggctgagccagcagaatgaggagcctgtgttcagcagagatggcagcaagttcttcatgacagtgcctgtgaagcagggcggccgcggggagttccaccacgtggccatgttcctgatccagagcaagtctgagcagatcaccgtgcgccacctgaccagcggcaactgggaggtgatcaagatcctggcctatgatgagaccacccagaagatctacttcctgagcacagagagcagcccccggggccggcagctgtacagcgccagcacagagggcctgctgaaccggcagtgcatcagctgcaacttcatgaaggagcagtgcacctactttgatgccagcttcagccccatgaaccagcacttcctgctcttctgtgagggcccccgggtgcctgtggtgtccctgcacagcacagacaacccagccaagtacttcatcctggagagcaacagcatgctgaaggaggccatcctgaagaagaagattggcaagccagagatcaagatcctgcacattgatgattatgagctgcccctgcagctgagcctgcccaaggacttcatggacaggaaccagtatgccctgctgctgatcatggatgaggagcccggcggccagctggtgacagacaagttccacatcgactgggacagcgtgctgattgacatggacaacgtgattgtggccaggtttgatggccggggcagcggcttccagggcctgaagatcctgcaggagatccaccggcggctgggctctgtggaggtgaaggaccagatcacagctgtgaagttcctgctgaagctgccctacatcgacagcaagaggctgagcatctttgggaagggctacggcggctacatcgcctccatgatcctgaagagtgatgagaagctgttcaagtgtggctctgtggtggcccccatcacagacctgaagctgtatgccagcgccttcagcgagcgctacctgggcatgcccagcaaggaggagagcacctaccaggccgcctctgtgctgcacaacgtgcacggcctgaaggaggagaacatcctgatcatccatggaacagctgacaccaaggtgcacttccagcacagcgctgagctgatcaagcacctgatcaaggccggcgtgaactacaccatgcaggtgtacccagatgagggccacaacgtgtctgagaagagcaagtaccacctgtacagcaccatcctgaagttcttcagtgactgcctgaaggaggagatctctgtgctgccccaggagcctgaggaggatgaatag

SEQ ID NO: 150080 - DNA, 954 bp, synthetic construct
  misc_feature 1..954: note = Description of Artificial Sequence: Synthetic coding sequence
  source 1..954: mol_type = other DNA
atggctgacacccagtacatcctgcccaatgacatcggcgtgagcagcctggactgccgggaggccttccggctgctgagccccacagagcggctgtatgcctaccacctgagccgggccgcctggtatggaggcctggccgtgctgctgcagaccagccctgaggccccctacatctatgccctgctgagccgcctcttccgggcccaggaccctgaccagctgcggcagcacgccctggccgagggcctgacagaggaggagtaccaggccttcctggtgtatgctgctggggtgtacagcaacatgggcaactacaagagctttggagacaccaagtttgtgcccaacctgcccaaggagaagctggagagggtcatcctgggcagcgaggccgcccagcagcaccctgaggaggtgcggggcctgtggcagacctgtggggagctgatgttcagcctggagccccggctgcggcacctgggcctgggcaaggagggcatcaccacctacttcagcggcaactgcaccatggaggatgcccgggtgcggctggacaggagcaagatccgctctgtgggcaagccagccctggagcgcttcctgcggcggctgcaggtgctgaagagcactggagatgtggccggcggccgggccctgtatgagggctacgccaccgtgacagatgcccccccagagtgcttcctgaccctgcgggacacagtgctgctgaggaaggagagcaggaagctgattgtgcagcccaacacccggctggagggcagtgatgtgcagctgctggagtatgaggccagcgctgctggcctcatccgctccttcagcgagcgcttcccagaagatggccctgagctggaggagatcctgacccagctggccacagcagatgcccgcttctggaagggccccagcgaggcccccagcggccaggcctag

SEQ ID NO: 150081 - DNA, 2214 bp, synthetic construct
  misc_feature 1..2214: note = Description of Artificial Sequence: Synthetic coding sequence
  source 1..2214: mol_type = other DNA
atggctgacacccagtacatcctgcccaatgacatcggcgtgagcagcctggactgccgggaggccttccggctgctgagccccacagagcggctgtatgcctaccacctgagccgggccgcctggtatggaggcctggccgtgctgctgcagaccagccctgaggccccctacatctatgccctgctgagccgcctcttccgggcccaggaccctgaccagctgcggcagcacgccctggccgagggcctgacagaggaggagtaccaggccttcctggtgtatgctgctggggtgtacagcaacatgggcaactacaagagctttggagacaccaagtttgtgcccaacctgcccaaggagaagctggagagggtcatcctgggcagcgaggccgcccagcagcaccctgaggaggtgcggggcctgtggcagacctgtggggagctgatgttcagcctggagccccggctgcggcacctgggcctgggcaaggagggcatcaccacctacttcagcggcaactgcaccatggaggatgccaagctggcccaggacttcctggacagccagaacctgagcgcctacaacaccaggctcttcaaggaggtggatggagagggcaagccctactatgaggtgcggctggcctctgtgctgggcagcgagcccagcctggacagcgaggtgaccagcaagctgaagagctatgagttccggggcagccccttccaggtgaccaggggggactatgcccccatcctgcagaaggtggtggagcagctggagaaggccaaggcctatgctgccaacagccaccagggccagatgctggcccagtacatcgagagcttcacccagggcagcattgaggcccacaagaggggcagccgcttctggatccaggacaagggccccatcgtggagagctacatcggcttcatcgagagctacagagaccccttcggcagcagaggagaatttgagggctttgtggccgtggtgaacaaggccatgtctgccaagtttgagcggctggtggccagcgctgagcagctgctgaaggagctgccctggccacccacctttgagaaggacaagttcctgaccccagacttcaccagcctggatgtgctgacctttgctggcagcggcatcccagctggcatcaacatccccaactatgatgacctgcggcagacagagggcttcaagaatgtgtccctgggcaatgtgctggccgtggcctatgccacccagcgggagaagctgaccttcctggaggaggatgacaaggacctgtacatcctgtggaagggccccagctttgatgtgcaggtgggcctgcacgagctgctgggccacggcagcggcaagctgtttgtgcaggatgagaagggggccttcaactttgaccaggagaccgtcatcaaccctgagactggagagcagatccagagctggtacagaagtggagagacctgggacagcaagttcagcaccatcgccagcagctatgaggagtgcagagctgagagcgtgggcctgtacctgtgcctgcacccccaggtgctggagatcttcggctttgagggcgcagatgctgaagatgtgatctacgtgaactggctgaacatggtgcgggccggcctgctggccctggagttctacaccccagaggccttcaactggaggcaggcccacatgcaggccaggtttgtgatcctgcgggtgctgctggaggccggggagggcctggtgaccatcacccccaccactggaagtgatggccgcccagatgcccgggtgcggctggacaggagcaagatccgctctgtgggcaagccagccctggagcgcttcctgcggcggctgcaggtgctgaagagcactggagatgtggccggcggccgggccctgtatgagggctacgccaccgtgacagatgcccccccagagtgcttcctgaccctgcgggacacagtgctgctgaggaaggagagcaggaagctgattgtgcagcccaacacccggctggagggcagtgatgtgcagctgctggagtatgaggccagcgctgctggcctcatccgctccttcagcgagcgcttcccagaagatggccctgagctggaggagatcctgacccagctggccacagcagatgcccgcttctggaagggccccagcgaggcccccagcggccaggcctag

SEQ ID NO: 150082 - DNA, 2214 bp, synthetic construct; identical to SEQ ID NO: 150081
  misc_feature 1..2214: note = Description of Artificial Sequence: Synthetic coding sequence
  source 1..2214: mol_type = other DNA

SEQ ID NO: 150083 - DNA, 273 bp, synthetic construct
  misc_feature 1..273: note = Description of Artificial Sequence: Synthetic coding sequence
  source 1..273: mol_type = other DNA
atggctgacacccagtacatcctgcccaatgacatcggcgtgagcagcctggactgccgggaggccttccggctgctgagccccacagagcggctgtatgcctaccacctgagccgggccgcctggtatggaggcctggccgtgctgctgcagaccagccctgaggccccctacatctatgccctgctgagccgcctcttccgggcccaggaccctgaccagctgcggcagcacgccctggccgagggcctgacagaggaggagtaccagtag

SEQ ID NO: 150084 - DNA, 606 bp, synthetic construct
  misc_feature 1..606: note = Description of Artificial Sequence: Synthetic coding sequence
  source 1..606: mol_type = other DNA
atggctgacacccagtacatcctgcccaatgacatcggcgtgagcagcctggactgccgggaggccttccggctgctgagccccacagagcggctgtatgcctaccacctgagccgggccgcctggtatggaggcctggccgtgctgctgcagaccagccctgaggccccctacatctatgccctgctgagccgcctcttccgggcccaggaccctgaccagctgcggcagcacgccctggccgagggcctgacagaggaggagtaccaggccttcctggtgtatgctgctggggtgtacagcaacatgggcaactacaagagctttggagacaccaagtttgtgcccaacctgcccaaggagaagctggagagggtcatcctgggcagcgaggccgcccagcagcaccctgaggaggtgcggggcctgtggcagacctgtggggagctgatgttcagcctggagccccggctgcggcacctgggcctgggcaaggagggcatcaccacctacttcagcggcaactgcaccatggaggatgccaagctggcccaggacttcctggacagccagaacctgagcgcctacaacaccaggctcttctag

SEQ ID NO: 150085 - DNA, 2274 bp, synthetic construct
  misc_feature 1..2274: note = Description of Artificial Sequence: Synthetic coding sequence
  source 1..2274: mol_type = other DNA
atgggagagcctgaggccggcagcgagtttgccaacggggctgctgctgctgctggccccatggctgacacccagtacatcctgcccaatgacatcggcgtgagcagcctggactgccgggaggccttccggctgctgagccccacagagcggctgtatgcctaccacctgagccgggccgcctggtatggaggcctggccgtgctgctgcagaccagccctgaggccccctacatctatgccctgctgagccgcctcttccgggcccaggaccctgaccagctgcggcagcacgccctggccgagggcctgacagaggaggagtaccaggccttcctggtgtatgctgctggggtgtacagcaacatgggcaactacaagagctttggagacaccaagtttgtgcccaacctgcccaaggagaagctggagagggtcatcctgggcagcgaggccgcccagcagcaccctgaggaggtgcggggcctgtggcagacctgtggggagctgatgttcagcctggagccccggctgcggcacctgggcctgggcaaggagggcatcaccacctacttcagcggcaactgcaccatggaggatgccaagctggcccaggacttcctggacagccagaacctgagcgcctacaacaccaggctcttcaaggaggtggatggagagggcaagccctactatgaggtgcggctggcctctgtgctgggcagcgagcccagcctggacagcgaggtgaccagcaagctgaagagctatgagttccggggcagccccttccaggtgaccaggggggactatgcccccatcctgcagaaggtggtggagcagctggagaaggccaaggcctatgctgccaacagccaccagggccagatgctggcccagtacatcgagagcttcacccagggcagcattgaggcccacaagaggggcagccgcttctggatccaggacaagggccccatcgtggagagctacatcggcttcatcgagagctacagagaccccttcggcagcagaggagaatttgagggctttgtggccgtggtgaacaaggccatgtctgccaagtttgagcggctggtggccagcgctgagcagctgctgaaggagctgccctggccacccacctttgagaaggacaagttcctgaccccagacttcaccagcctggatgtgctgacctttgctggcagcggcatcccagctggcatcaacatccccaactatgatgacctgcggcagacagagggcttcaagaatgtgtccctgggcaatgtgctggccgtggcctatgccacccagcgggagaagctgaccttcctggaggaggatgacaaggacctgtacatcctgtggaagggccccagctttgatgtgcaggtgggcctgcacgagctgctgggccacggcagcggcaagctgtttgtgcaggatgagaagggggccttcaactttgaccaggagaccgtcatcaaccctgagactggagagcagatccagagctggtacagaagtggagagacctgggacagcaagttcagcaccatcgccagcagctatgaggagtgcagagctgagagcgtgggcctgtacctgtgcctgcacccccaggtgctggagatcttcggctttgagggcgcagatgctgaagatgtgatctacgtgaactggctgaacatggtgcgggccggcctgctggccctggagttctacaccccagaggccttcaactggaggcaggcccacatgcaggccaggtttgtgatcctgcgggtgctgctggaggccggggagggcctggtgaccatcacccccaccactggaagtgatggccgcccagatgcccgggtgcggctggacaggagcaagatccgctctgtgggcaagccagccctggagcgcttcctgcggcggctgcaggtgctgaagagcactggagatgtggccggcggccgggccctgtatgagggctacgccaccgtgacagatgcccccccagagtgcttcctgaccctgcgggacacagtgctgctgaggaaggagagcaggaagctgattgtgcagcccaacacccggctggagggcagtgatgtgcagctgctggagtatgaggccagcgctgctggcctcatccgctccttcagcgagcgcttcccagaagatggccctgagctggaggagatcctgacccagctggccacagcagatgcccgcttctggaagggccccagcgaggcccccagcggccaggcctag

SEQ ID NO: 150086 - DNA, 2271 bp, synthetic construct
  misc_feature 1..2271: note = Description of Artificial Sequence: Synthetic coding sequence
  source 1..2271: mol_type = other DNA
atgggagagcctgaggccggcagcgagtttgccaacggggctgctgctgctggccccatggctgacacccagtacatcctgcccaatgacattggagtgagcagcctggactgccgggaggccttccggctgctgagccccacagagcggctgtatgcctaccacctgagcagagctgcctggtacggcggcctggccgtgctgctgcagaccagccctgaggccccctacatctatgccctgctgagccgcctcttccgggcccaggaccctgaccagctgcggcagcacgccctggccgagggcctgacagaggaggagtaccaggccttcctggtgtatgctgctggggtgtacagcaacatgggcaactacaagagctttggagacaccaagtttgtgcccaacctgcccaaggagaagctggagagggtcatcctgggcagcgaggccgcccagcagcaccctgaggaggtgcggggcctgtggcagacctgtggggagctgatgttcagcctggagccccggctgcggcacctgggcctgggcaaggagggcatcaccacctacttcagcggcaactgcaccatggaggatgccaagctggcccaggacttcctggacagccagaacctgagcgcctacaacaccaggctcttcaaggaggtggatggagagggcaagccctactatgaggtgcggctggcctctgtgctgggcagcgagcccagcctggacagcgaggtgaccagcaagctgaagagctatgagttccggggcagccccttccaggtgaccaggggggactatgcccccatcctgcagaaggtggtggagcagctggagaaggccaaggcctatgctgccaacagccaccagggccagatgctggcccagtacatcgagagcttcacccagggcagcattgaggcccacaagaggggcagccgcttctggatccaggacaagggccccatcgtggagagctacatcggcttcatcgagagctacagagaccccttcggcagcagaggagaatttgagggctttgtggccgtggtgaacaaggccatgtctgccaagtttgagcggctggtggccagcgctgagcagctgctgaaggagctgccctggccacccacctttgagaaggacaagttcctgaccccagacttcaccagcctggatgtgctgacctttgctggcagcggcatcccagctggcatcaacatccccaactatgatgacctgcggcagacagagggcttcaagaatgtgtccctgggcaatgtgctggccgtggcctatgccacccagcgggagaagctgaccttcctggaggaggatgacaaggacctgtacatcctgtggaagggccccagctttgatgtgcaggtgggcctgcacgagctgctgggccacggcagcggcaagctgtttgtgcaggatgagaagggggccttcaactttgaccaggagaccgtcatcaaccctgagaccggggagcagatccagagctggtaccgcagcggggagacctgggacagcaagttcagcaccatcgccagcagctatgaagaatgtagagctgagagcgtgggcctgtacctgtgcctgcacccccaggtgctggagatctttggatttgaaggagcagatgctgaagatgtgatctacgtgaactggctgaacatggtgcgggccggcctgctggccctggagttctacaccccagaggccttcaactggaggcaggcccacatgcaggcccgcttcgtcatcctgcgggtgctgctggaggccggggagggcctggtgaccatcacccccaccaccggcagtgatggccgcccagatgcccgggtgcggctggacaggagcaagatccgctctgtgggcaagccagccctggagcgcttcctgcggcggctgcaggtgctgaagagcactggagatgtggccggcggccgggccctgtatgagggctacgccaccgtgacagatgcccctcctgagtgcttcctgaccctgcgggacacagtgctgctgaggaaggagagcaggaagctgattgtgcagcccaacacccggctggagggcagtgatgtgcagctgctggagtatgaggccagcgctgctggcctcatccgctccttcagcgagcgcttcccagaagatggccctgagctggaggagatcctgacccagctggccacagcagatgcccgcttctggaagggccccagcgaggcccccagcggccaggcctag

SEQ ID NO: 150087 - DNA, 2214 bp, synthetic construct; identical to SEQ ID NO: 150081
  misc_feature 1..2214: note = Description of Artificial Sequence: Synthetic coding sequence
  source 1..2214: mol_type = other DNA

SEQ ID NO: 150088 - DNA, 1908 bp, synthetic construct
  misc_feature 1..1908: note = Description of Artificial Sequence: Synthetic coding sequence
  source 1..1908: mol_type = other DNA
atgggcaactacaagagctttggagacaccaagtttgtgcccaacctgcccaaggagaagctggagagggtcatcctgggcagcgaggccgcccagcagcaccctgaggaggtgcggggcctgtggcagacctgtggggagctgatgttcagcctggagccccggctgcggcacctgggcctgggcaaggagggcatcaccacctacttcagcggcaactgcaccatggaggatgccaagctggcccaggacttcctggacagccagaacctgagcgcctacaacaccaggctcttcaaggaggtggatggagagggcaagccctactatgaggtgcggctggcctctgtgctgggcagcgagcccagcctggacagcgaggtgaccagcaagctgaagagctatgagttccggggcagccccttccaggtgaccaggggggactatgcccccatcctgcagaaggtggtggagcagctggagaaggccaaggcctatgctgccaacagccaccagggccagatgctggcccagtacatcgagagcttcacccagggcagcattgaggcccacaagaggggcagccgcttctggatccaggacaagggccccatcgtggagagctacatcggcttcatcgagagctacagagaccccttcggcagcagaggagaatttgagggctttgtggccgtggtgaacaaggccatgtctgccaagtttgagcggctggtggccagcgctgagcagctgctgaaggagctgccctggccacccacctttgagaaggacaagttcctgaccccagacttcaccagcctggatgtgctgacctttgctggcagcggcatcccagctggcatcaacatccccaactatgatgacctgcggcagacagagggcttcaagaatgtgtccctgggcaatgtgctggccgtggcctatgccacccagcgggagaagctgaccttcctggaggaggatgacaaggacctgtacatcctgtggaagggccccagctttgatgtgcaggtgggcctgcacgagctgctgggccacggcagcggcaagctgtttgtgcaggatgagaagggggccttcaactttgaccaggagaccgtcatcaaccctgagactggagagcagatccagagctggtacagaagtggagagacctgggacagcaagttcagcaccatcgccagcagctatgaggagtgcagagctgagagcgtgggcctgtacctgtgcctgcacccccaggtgctggagatcttcggctttgagggcgcagatgctgaagatgtgatctacgtgaactggctgaacatggtgcgggccggcctgctggccctggagttctacaccccagaggccttcaactggaggcaggcccacatgcaggccaggtttgtgatcctgcgggtgctgctggaggccggggagggcctggtgaccatcacccccaccactggaagtgatggccgcccagatgcccgggtgcggctggacaggagcaagatccgctctgtgggcaagccagccctggagcgcttcctgcggcggctgcaggtgctgaagagcactggagatgtggccggcggccgggccctgtatgagggctacgccaccgtgacagatgcccccccagagtgcttcctgaccctgcgggacacagtgctgctgaggaaggagagcaggaagctgattgtgcagcccaacacccggctggagggcagtgatgtgcagctgctggagtatgaggccagcgctgctggcctcatccgctccttcagcgagcgcttcccagaagatggccctgagctggaggagatcctgacccagctggccacagcagatgcccgcttctggaagggccccagcgaggcccccagcggccaggcctag

SEQ ID NO: 150089 - DNA, 2412 bp, synthetic construct
  misc_feature 1..2412: note = Description of Artificial Sequence: Synthetic coding sequence
  source 1..2412: mol_type = other DNA
atgaccacagccaaggagcccagcgccagcggcaagtctgtgcagcagcaggagcaggagctggtgggcagcaaccccccccagaggaactggaagggcatcgccatcgccctgctggtgatcctggtgatctgcagcctcatcgtgaccagcgtcatcctgctgaccccagctgaggacaacagcctgagccagaagaagaaggtgacagtggaggacctcttcagcgaggacttcaagatccatgaccctgaggccaagtggatcagtgacacagagttcatctaccgggagcagaagggcaccgtgcggctgtggaatgtggagaccaacaccagcacagtgctgattgagggcaagaagattgagagcctgcgggccatccgctatgagatcagcccagaccgggagtatgccctcttctcctacaacgtggagcccatctaccagcacagctacacaggctactacgtgctgagcaagatcccccacggggacccccagagcctggaccccccagaggtgtccaatgccaagctgcagtatgccggctggggccccaagggccagcagctgatcttcatctttgagaacaacatctactactgtgcccacgtgggcaagcaggccatccgggtggtgtccacaggcaaggagggcgtcatctacaacggcctgagtgactggctgtatgaggaggagatcctgaagacccacatcgcccactggtggagcccagatggcacccggctggcctatgctgccatcaatgacagccgggtgcccatcatggagctgcccacctacacaggcagcatctaccccaccgtgaagccctaccactaccccaaggccggcagcgagaaccccagcatcagcctgcacgtgattggcctgaatggccccacccatgacctggagatgatgcccccagatgaccccaggatgagggagtactacatcaccatggtgaagtgggccaccagcaccaaggtggccgtgacctggctgaacagagcccagaatgtgtccatcctgaccctgtgtgatgccaccactggagtgtgcaccaagaagcatgaagatgagagcgaggcctggctgcaccggcagaatgaggagcctgtgttcagcaaggatggcaggaagttcttcttcatccgggccatcccccagggcggccggggcaagttctaccacatcaccgtgagcagcagccagcccaacagcagcaatgacaacatccagagcatcaccagcggggactgggatgtgaccaagatcctggcctatgatgagaagggcaacaagatctacttcctgagcacagaggacctgccccggcggcggcagctgtacagcgccaacacagtgggcaacttcaaccggcagtgcctgagctgtgacctggtggagaactgcacctacttcagcgccagcttcagccacagcatggacttcttcctgctgaagtgtgagggccctggggtgcccatggtgacagtgcacaacaccacagacaagaagaagatgtttgacctggagaccaatgaacatgtgaagaaggccatcaatgaccggcagatgcccaaggtggagtacagagacattgaaattgatgactacaacctgcccatgcagatcctgaagccagccaccttcacagacaccacccactaccccctgctgctggtggtggatggcaccccaggcagccagagcgtggccgagaagtttgaggtgtcctgggagaccgtgatggtgagcagccatggagctgtggtggtgaagtgtgatggccggggcagcggcttccagggcaccaagctgctgcacgaggtgagaagaaggctgggcctgctggaggagaaggaccagatggaggccgtgaggaccatgctgaaggagcagtacatcgacaggaccagggtggccgtgtttgggaaggactatggaggctacctgagcacctacatcctgcctgccaagggggagaaccagggccagaccttcacctgtggcagcgccctgagccccatcacagacttcaagctgtatgccagcgccttcagcgagcgctacctgggcctgcacggcctggacaacagagcctatgagatgaccaaggtggcccaccgggtgtctgccctggaggagcagcagttcctgatcatccaccccacagcagatgagaagatccacttccagcacacagctgagctgatcacccagctgatccggggcaaggccaactacagcctgcagatctacccagatgagagccactacttcaccagcagcagcctgaagcagcacctgtaccgcagcatcatcaacttctttgtggagtgcttccgcatccaggacaagctgctgactgtgacagccaaggaggatgaggaggaggactag

SEQ ID NO: 150090 - DNA, 2598 bp, synthetic construct
  misc_feature 1..2598: note = Description of Artificial Sequence: Synthetic coding sequence
  source 1..2598: mol_type = other DNA
atggccagcctgtaccagcgcttcaccgggaagatcaacaccagccgctccttccctgcccctcctgaggccagccacctgctgggcggccagggcccagaagaagatggaggagctggggccaagcccctgggcccccgggcccaggccgccgccccccgggagcggggcggcggcggcggcggggccggcggccggccccgcttccagtaccaggcccggagtgatggagatgaggaggatgagctggtgggcagcaaccccccccagaggaactggaagggcatcgccatcgccctgctggtgatcctggtgatctgcagcctcatcgtgaccagcgtcatcctgctgaccccagctgaggacaacagcctgagccagaagaagaaggtgacagtggaggacctcttcagcgaggacttcaagatccatgaccctgaggccaagtggatcagtgacacagagttcatctaccgggagcagaagggcaccgtgcggctgtggaatgtggagaccaacaccagcacagtgctgattgagggcaagaagattgagagcctgcgggccatccgctatgagatcagcccagaccgggagtatgccctcttctcctacaacgtggagcccatctaccagcacagctacacaggctactacgtgctgagcaagatcccccacggggacccccagagcctggaccccccagaggtgtccaatgccaagctgcagtatgccggctggggccccaagggccagcagctgatcttcatctttgagaacaacatctactactgtgcccacgtgggcaagcaggccatccgggtggtgtccacaggcaaggagggcgtcatctacaacggcctgagtgactggctgtatgaggaggagatcctgaagacccacatcgcccactggtggagcccagatggcacccggctggcctatgctgccatcaatgacagccgggtgcccatcatggagctgcccacctacacaggcagcatctaccccaccgtgaagccctaccactaccccaaggccggcagcgagaaccccagcatcagcctgcacgtgattggcctgaatggccccacccatgacctggagatgatgcccccagatgaccccaggatgagggagtactacatcaccatggtgaagtgggccaccagcaccaaggtggccgtgacctggctgaacagagcccagaatgtgtccatcctgaccctgtgtgatgccaccactggagtgtgcaccaagaagcatgaagatgagagcgaggcctggctgcaccggcagaatgaggagcctgtgttcagcaaggatggcaggaagttcttcttcatccgggccatcccccagggcggccggggcaagttctaccacatcaccgtgagcagcagccagcccaacagcagcaatgacaacatccagagcatcaccagcggggactgggatgtgaccaagatcctggcctatgatgagaagggcaacaagatctacttcctgagcacagaggacctgccccggcggcggcagctgtacagcgccaacacagtgggcaacttcaaccggcagtgcctgagctgtgacctggtggagaactgcacctacttcagcgccagcttcagccacagcatggacttcttcctgctgaagtgtgagggccctggggtgcccatggtgacagtgcacaacaccacagacaagaagaagatgtttgacctggagaccaatgaacatgtgaagaaggccatcaatgaccggcagatgcccaaggtggagtacagagacattgaaattgatgactacaacctgcccatgcagatcctgaagccagccaccttcacagacaccacccactaccccctgctgctggtggtggatggcaccccaggcagccagagcgtggccgagaagtttgaggtgtcctgggagaccgtgatggtgagcagccatggagctgtggtggtgaagtgtgatggccggggcagcggcttccagggcaccaagctgctgcacgaggtgagaagaaggctgggcctgctggaggagaaggaccagatggaggccgtgaggaccatgctgaaggagcagtacatcgacaggaccagggtggccgtgtttgggaaggactatggaggctacctgagcacctacatcctgcctgccaagggggagaaccagggccagaccttcacctgtggcagcgccctgagccccatcacagacttcaagctgtatgccagcgccttcagcgagcgctacctgggcctgcacggcctggacaacagagcctatgagatgaccaaggtggcccaccgggtgtctgccctggaggagcagcagttcctgatcatccaccccacagcagatgagaagatccacttccagcacacagctgagctgatcacccagctgatccggggcaaggccaactacagcctgcagatctacccagatgagagccactacttcaccagcagcagcctgaagcagcacctgtaccgcagcatcatcaacttctttgtggagtgcttccgcatccaggacaagctgctgactgtgacagccaaggaggatgaggaggaggactag

SEQ ID NO: 150091 - DNA, 2406 bp, synthetic construct
  misc_feature 1..2406: note = Description of Artificial Sequence: Synthetic coding sequence
  source 1..2406: mol_type = other DNA
atgaaggagaaggccatgatcaagacagccaagatgcagggcaatgtgatggagctggtgggcagcaaccccccccagaggaactggaagggcatcgccatcgccctgctggtgatcctggtgatctgcagcctcatcgtgaccagcgtcatcctgctgaccccagctgaggacaacagcctgagccagaagaagaaggtgacagtggaggacctcttcagcgaggacttcaagatccatgaccctgaggccaagtggatcagtgacacagagttcatctaccgggagcagaagggcaccgtgcggctgtggaatgtggagaccaacaccagcacagtgctgattgagggcaagaagattgagagcctgcgggccatccgctatgagatcagcccagaccgggagtatgccctcttctcctacaacgtggagcccatctaccagcacagctacacaggctactacgtgctgagcaagatcccccacggggacccccagagcctggaccccccagaggtgtccaatgccaagctgcagtatgccggctggggccccaagggccagcagctgatcttcatctttgagaacaacatctactactgtgcccacgtgggcaagcaggccatccgggtggtgtccacaggcaaggagggcgtcatctacaacggcctgagtgactggctgtatgaggaggagatcctgaagacccacatcgcccactggtggagcccagatggcacccggctggcctatgctgccatcaatgacagccgggtgcccatcatggagctgcccacctacacaggcagcatctaccccaccgtgaagccctaccactaccccaaggccggcagcgagaaccccagcatcagcctgcacgtgattggcctgaatggccccacccatgacctggagatgatgcccccagatgaccccaggatgagggagtactacatcaccatggtgaagtgggccaccagcaccaaggtggccgtgacctggctgaacagagcccagaatgtgtccatcctgaccctgtgtgatgccaccactggagtgtgcaccaagaagcatgaagatgagagcgaggcctggctgcaccggcagaatgaggagcctgtgttcagcaaggatggcaggaagttcttcttcatccgggccatcccccagggcggccggggcaagttctaccacatcaccgtgagcagcagccagcccaacagcagcaatgacaacatccagagcatcaccagcggggactgggatgtgaccaagatcctggcctatgatgagaagggcaacaagatctacttcctgagcacagaggacctgccccggcggcggcagctgtacagcgccaacacagtgggcaacttcaaccggcagtgcctgagctgtgacctggtggagaactgcacctacttcagcgccagcttcagccacagcatggacttcttcctgctgaagtgtgagggccctggggtgcccatggtgacagtgcacaacaccacagacaagaagaagatgtttgacctggagaccaatgaacatgtgaagaaggccatcaatgaccggcagatgcccaaggtggagtacagagacattgaaattgatgactacaacctgcccatgcagatcctgaagccagccaccttcacagacaccacccactaccccctgctgctggtggtggatggcaccccaggcagccagagcgtggccgagaagtttgaggtgtcctgggagaccgtgatggtgagcagccatggagctgtggtggtgaagtgtgatggccggggcagcggcttccagggcaccaagctgctgcacgaggtgagaagaaggctgggcctgctggaggagaaggaccagatggaggccgtgaggaccatgctgaaggagcagtacatcgacaggaccagggtggccgtgtttgggaaggactatggaggctacctgagcacctacatcctgcctgccaagggggagaaccagggccagaccttcacctgtggcagcgccctgagccccatcacagacttcaagctgtatgccagcgccttcagcgagcgctacctgggcctgcacggcctggacaacagagcctatgagatgaccaaggtggcccaccgggtgtctgccctggaggagcagcagttcctgatcatccaccccacagcagatgagaagatccacttccagcacacagctgagctgatcacccagctgatccggggcaaggccaactacagcctgcagatctacccagatgagagccactacttcaccagcagcagcctgaagcagcacctgtaccgcagcatcatcaacttctttgtggagtgcttccgcatccaggacaagctgctgactgtgacagccaaggaggatgaggaggaggactag

SEQ ID NO: 150092 - DNA, 2277 bp, synthetic construct
  misc_feature 1..2277: note = Description of Artificial Sequence: Synthetic coding sequence
  source 1..2277: mol_type = other DNA
atgaccacagccaaggagcccagcgccagcggcaagtctgtgcagcagcaggagcaggagctggtgggcagcaaccccccccagaggaactggaagggcatcgccatcgccctgctggtgatcctggtgatctgcagcctcatcgtgaccagcgtcatcctgctgaccccagctgaggacaacagcctgagccagaagaagaaggtgacagtggaggacctcttcagcgaggacttcaagatccatgaccctgaggccaagtggatcagtgacacagagttcatctaccgggagcagaagggcaccgtgcggctgtggaatgtggagaccaacaccagcacagtgctgattgagggcaagaagattgagagcctgcgggccatccgctatgagatcagcccagaccgggagtatgccctcttctcctacaacgtggagcccatcttcatctttgagaacaacatctactactgtgcccacgtgggcaagcaggccatccgggtggtgtccacaggcaaggagggcgtcatctacaacggcctgagtgactggctgtatgaggaggagatcctgaagacccacatcgcccactggtggagcccagatggcacccggctggcctatgctgccatcaatgacagccgggtgcccatcatggagctgcccacctacacaggcagcatctaccccaccgtgaagccctaccactaccccaaggccggcagcgagaaccccagcatcagcctgcacgtgattggcctgaatggccccacccatgacctggagatgatgcccccagatgaccccaggatgagggagtactacatcaccatggtgaagtgggccaccagcaccaaggtggccgtgacctggctgaacagagcccagaatgtgtccatcctgaccctgtgtgatgccaccaccggggtgtgcaccaagaagcatgaagatgaaagtgaggcctggctgcaccggcagaatgaggagcccgtcttcagcaaggatggcaggaagttcttcttcatccgggccatcccccagggcggccggggcaagttctaccacatcaccgtgagcagcagccagcccaacagcagcaatgacaacatccagagcatcaccagcggggactgggatgtgaccaagatcctggcctatgatgagaagggcaacaagatctacttcctgagcacagaggacctgccccggcggcggcagctgtacagcgccaacacagtgggcaacttcaaccggcagtgcctgagctgtgacctggtggagaactgcacctacttcagcgccagcttcagccacagcatggacttcttcctgctgaagtgtgagggccctggggtgcccatggtgacagtgcacaacaccacagacaagaagaagatgtttgacctggagaccaatgagcacgtgaagaaggccatcaatgaccggcagatgcccaaggtggagtacagagacatcgagattgatgactacaacctgcccatgcagatcctgaagccagccaccttcacagacaccacccactaccccctgctgctggtggtggatggcaccccaggcagccagagcgtggccgagaagtttgaggtgtcctgggagaccgtgatggtgagcagccacggggctgtggtggtgaagtgtgatggccggggcagcggcttccagggcaccaagctgctgcacgaggtgagaagaaggctgggcctgctggaggagaaggaccagatggaggccgtgaggaccatgctgaaggagcagtacatcgacaggaccagggtggccgtgtttgggaaggactatggaggctacctgagcacctacatcctgcctgccaagggggagaaccagggccagaccttcacctgtggcagcgccctgagccccatcacagacttcaagctgtatgccagcgccttcagcgagcgctacctgggcctgcacggcctggacaacagagcctatgagatgaccaaggtggcccaccgggtgtctgccctggaggagcagcagttcctgatcatccaccccacagcagatgagaagatccacttccagcacacagctgagctgatcacccagctgatccggggcaaggccaactacagcctgcagatctacccagatgagagccactacttcaccagcagcagcctgaagcagcacctgtaccgcagcatcatcaacttctttgtggagtgcttccgcatccaggacaagctgctgactgtgacagccaaggaggatgaggaggaggactag

SEQ ID NO: 150093 - DNA, 2649 bp, synthetic construct
  misc_feature 1..2649: note = Description of Artificial Sequence: Synthetic coding sequence
  source 1..2649: mol_type = other DNA
atggctgctgccatggagacagagcagctgggcgtggagatctttgaaacagctgactgtgaggagaacatcgagagccaggaccggcccaagctggagcccttctacgtggagcgctacagctggagccagctgaagaagctgctggccgacaccaggaagtaccacggctacatgatggccaaggcccctcatgacttcatgtttgtgaagagaaatgaccctgatggcccccacagcgaccgcatctactacctggccatgtctggagaaaatcgggagaacaccctcttctacagcgagatccccaagaccatcaacagagctgctgtgctgatgctgtcctggaagcccctgctggacctcttccaggccaccctggactatggcatgtacagccgggaggaggagctgctgcgggagaggaagagaattggaacagtgggcatcgccagctatgactaccaccagggcagcggcaccttcctgttccaggccggcagcggcatctaccacgtgaaggatggcggcccccagggcttcacccagcagcccctgcggcccaacctggtggagaccagctgccccaacatccgcatggaccccaagctgtgcccagctgaccctgactggatcgccttcatccacagcaatgacatctggatcagcaacatcgtgacccgggaggagcggcggctgacctacgtgcacaatgagctggccaacatggaggaggatgcccggtctgctggggtggccacctttgtgctgcaggaggagtttgaccgctacagcggctactggtggtgccccaaggccgagaccacccccagcggcggcaagatcctgcgcatcctgtatgaagaaaatgatgaaagtgaggtggagatcatccacgtgaccagccccatgctggagacccggcgggctgacagcttccgctaccccaagacaggaacagccaaccccaaggtgaccttcaagatgtctgagatcatgattgatgctgagggccgcatcattgatgtgattgacaaggagctgatccagccctttgagatcctgtttgagggcgtggagtacatcgcccgggccggctggaccccagagggcaagtatgcctggagcatcctgctggacaggagccagacccggctgcagatcgtgctgatcagccctgagctgttcatccctgtggaggatgatgtgatggagcggcagaggctcatcgagagcgtgcctgacagcgtgacccccctcatcatctatgaggagaccacagacatctggatcaacatccatgacatcttccacgtgttcccccagagccatgaggaggagattgagttcatctttgccagcgagtgcaagacaggcttccgccacctgtacaagatcaccagcatcctgaaggagagcaagtacaagaggagcagcggcggcctgcctgcccccagcgacttcaagtgccccatcaaggaggagatcgccatcaccagcggggagtgggaggtgctgggcagacatggcagcaacatccaggtggatgaggtgcggcggctggtgtactttgagggcaccaaggacagccccctggagcaccacctgtatgtggtgtcctatgtgaaccctggagaggtgacccggctgacagaccggggctacagccacagctgctgcatcagccagcactgtgacttcttcatcagcaagtacagcaaccagaagaacccccactgtgtgtccctgtacaagctgagcagcccagaagatgaccccacctgcaagaccaaggagttctgggccaccatcctggacagcgctggccccctgcctgactacaccccacctgagatcttctcctttgagagcaccaccggcttcaccctgtatggcatgctgtacaagccccatgacctgcagcccgggaagaagtaccccaccgtgctcttcatctatggaggcccccaggtgcagctggtgaacaaccgcttcaagggcgtgaagtacttccggctgaacaccctggccagcctgggctacgtggtggtggtgattgacaacagaggcagctgccaccggggcctgaagtttgagggcgccttcaagtacaagatgggccagattgaaattgatgaccaggtggagggcctgcagtacctggccagccgctatgacttcatcgacctggacagagtgggcatccacggctggagctatggaggctacctgagcctgatggccctgatgcagaggagtgacatcttccgggtggccatcgccggggcccctgtgaccctgtggatcttctatgacaccggctacacagagcgctacatgggccacccagaccagaatgagcagggctactacctgggctctgtggccatgcaggccgagaagttccccagcgagcccaaccggctgctgctgctgcacggcttcctggatgaaaatgtgcactttgcccacaccagcatcctgctgtccttcctggtgcgggccggcaagccctatgacctgcagatctacccccaggagcggcacagcatccgggtgcctgagagcggggagcactatgagctgcacctgctgcactacctgcaggagaacctgggcagcagaattgctgccctgaaggtgatctag

SEQ ID NO: 150094 - DNA, 2550 bp, synthetic construct
  misc_feature 1..2550: note = Description of Artificial Sequence: Synthetic coding sequence
  source 1..2550: mol_type = other DNA
atgtggaagaggtctgagcagatgaagatcaagagcggcaagtgcaacatggctgctgccatggagacagagcagctgggcgtggagatctttgaaacagctgactgtgaggagaacatcgagagccaggaccggcccaagctggagcccttctacgtggagcgctacagctggagccagctgaagaagctgctggccgacaccaggaagtaccacggctacatgatggccaaggcccctcatgacttcatgtttgtgaagagaaatgaccctgatggcccccacagcgaccgcatctactacctggccatgtctggagaaaatcgggagaacaccctcttctacagcgagatccccaagaccatcaacagagctgctgtgctgatgctgtcctggaagcccctgctggacctcttccaggccaccctggactatggcatgtacagccgggaggaggagctgctgcgggagaggaagagaattggaacagtgggcatcgccagctatgactaccaccagggcagcggcaccttcctgttccaggccggcagcggcatctaccacgtgaaggatggcggcccccagggcttcacccagcagcccctgcggcccaacctggtggagaccagctgccccaacatccgcatggaccccaagctgtgcccagctgaccctgactggatcgccttcatccacagcaatgacatctggatcagcaacatcgtgacccgggaggagcggcggctgacctacgtgcacaatgagctggccaacatggaggaggatgcccggtctgctggggtggccacctttgtgctgcaggaggagtttgaccgctacagcggctactggtggtgccccaaggccgagaccacccccagcggcggcaagatcctgcgcatcctgtatgaagaaaatgatgaaagtgaggtggagatcatccacgtgaccagccccatgctggagacccggcgggctgacagcttccgctaccccaagacaggaacagccaaccccaaggtgaccttcaagatgtctgagatcatgattgatgctgagggccgcatcattgatgtgattgacaaggagctgatccagccctttgagatcctgtttgagggcgtggagtacatcgcccgggccggctggaccccagagggcaagtatgcctggagcatcctgctggacaggagccagacccggctgcagatcgtgctgatcagccctgagctgttcatccctgtggaggatgatgtgatggagcggcagaggctcatcgagagcgtgcctgacagcgtgacccccctcatcatctatgaggagaccacagacatctggatcaacatccatgacatcttccacgtgttcccccagagccatgaggaggagattgagttcatctttgccagcgagtgcaagacaggcttccgccacctgtacaagatcaccagcatcctgaaggagagcaagtacaagaggagcagcggcggcctgcctgcccccagcgacttcaagtgccccatcaaggaggagatcgccatcaccagcggggagtgggaggtgctgggcagacatggcagcaacatccaggtggatgaggtgcggcggctggtgtactttgagggcaccaaggacagccccctggagcaccacctgtatgtggtgtcctatgtgaaccctggagaggtgacccggctgacagaccggggctacagccacagctgctgcatcagccagcactgtgacttcttcatcagcaagtacagcaaccagaagaacccccactgtgtgtccctgtacaagctgagcagcccagaagatgaccccacctgcaagaccaaggagttctgggccaccatcctggacagcgctggccccctgcctgactacaccccacctgagatcttctcctttgagagcaccaccggcttcaccctgtatggcatgctgtacaagccccatgacctgcagcccgggaagaagtaccccaccgtgctcttcatctatggaggcccccagggccagatcgagattgatgaccaggtggagggcctgcagtacctggccagccgctatgacttcatcgacctggacagagtgggcatccacggctggagctatggaggctacctgagcctgatggccctgatgcagaggagtgacatcttccgggtggccatcgccggggcccctgtgaccctgtggatcttctatgacaccggctacacagagcgctacatgggccacccagaccagaatgagcagggctactacctgggctctgtggccatgcaggccgagaagttccccagcgagcccaaccggctgctgctgctgcacggcttcctggatgaaaatgtgcactttgcccacaccagcatcctgctgtccttcctggtgcgggccggcaagccctatgacctgcagatctacccccaggagcggcacagcatccgggtgcctgagagcggggagcactatgagctgcacctgctgcactacctgcaggagaacctgggcagcagaattgctgccctgaaggtgatctag

SEQ ID NO: 150095 - DNA, 2544 bp, synthetic construct
  misc_feature 1..2544: note = Description of Artificial Sequence: Synthetic coding sequence
  source 1..2544: mol_type = other DNA
atgtggaagaggtctgagcagatgaagatcaagagcggcaagtgcaacatggctgctgccatggagacagagcagctgggcgtggagatctttgaaacagctgactgtgaggagaacatcgagagccaggaccggcccaagctggagcccttctacgtggagcgctacagctggagccagctgaagaagctgctggccgacaccaggaagtaccacggctacatgatggccaaggcccctcatgacttcatgtttgtgaagagaaatgaccctgatggcccccacagcgaccgcatctactacctggccatgtctggagaaaatcgggagaacaccctcttctacagcgagatccccaagaccatcaacagagctgctgtgctgatgctgtcctggaagcccctgctggacctcttccaggccaccctggactatggcatgtacagccgggaggaggagctgctgcgggagaggaagagaattggaacagtgggcatcgccagctatgactaccaccagggcagcggcaccttcctgttccaggccggcagcggcatctaccacgtgaaggatggcggcccccagggcttcacccagcagcccctgcggcccaacctggtggagaccagctgccccaacatccgcatggaccccaagctgtgcccagctgaccctgactggatcgccttcatccacagcaatgacatctggatcagcaacatcgtgacccgggaggagcggcggctgacctacgtgcacaatgagctggccaacatggaggaggatgcccggtctgctggggtggccacctttgtgctgcaggaggagtttgaccgctacagcggctactggtggtgccccaaggccgagaccacccccagcggcggcaagatcctgcgcatcctgtatgaagaaaatgatgaaagtgaggtggagatcatccacgtgaccagccccatgctggagacccggcgggctgacagcttccgctaccccaagacaggaacagccaaccccaaggtgaccttcaagatgtctgagatcatgattgatgctgagggccgcatcattgatgtgattgacaaggagctgatccagccctttgagatcctgtttgagggcgtggagtacatcgcccgggccggctggaccccagagggcaagtatgcctggagcatcctgctggacaggagccagacccggctgcagatcgtgctgatcagccctgagctgttcatccctgtggaggatgatgtgatggagcggcagaggctcatcgagagcgtgcctgacagcgtgacccccctcatcatctatgaggagaccacagacatctggatcaacatccatgacatcttccacgtgttcccccagagccatgaggaggagattgagttcatctttgccagcgagtgcaagacaggcttccgccacctgtacaagatcaccagcatcctgaaggagagcaagtacaagaggagcagcggcggcctgcctgcccccagcgacttcaagtgccccatcaaggaggagatcgccatcaccagcggggagtgggaggtgctgggcagacatggcagcaacatccaggtggatgaggtgcggcggctggtgtactttgagggcaccaaggacagccccctggagcaccacctgtatgtggtgtcctatgtgaaccctggagaggtgacccggctgacagaccggggctacagccacagctgctgcatcagccagcactgtgacttcttcatcagcaagtacagcaaccagaagaacccccactgtgtgtccctgtacaagctgagcagcccagaagatgaccccacctgcaagaccaaggagttctgggccaccatcctggacagcgctggccccctgcctgactacaccccacctgagatcttctcctttgagagcaccaccggcttcaccctgtatggcatgctgtacaagccccatgacctgcagcccgggaagaagtaccccaccgtgctcttcatctatggaggcccccaggtgcagctggtgaacaaccgcttcaagggcgtgaagtacttccggctgaacaccctggccagcctgggctacgtggtggtggtgattgacaacagaggcagctgccaccggggcctgaagtttgagggcgccttcaagtacaagatggtggccatcgccggggcccctgtgaccctgtggatcttctatgacaccggctacacagagcgctacatgggccacccagaccagaatgagcagggctactacctgggctctgtggccatgcaggccgagaagttccccagcgagcccaaccggctgctgctgctgcacggcttcctggatgaaaatgtgcactttgcccacaccagcatcctgctgtccttcctggtgcgggccggcaagccctatgacctgcagatctacccccaggagcggcacagcatccgggtgcctgagagcggggagcactatgagctgcacctgctgcactacctgcaggagaacctgggcagcagaattgctgccctgaaggtgatctag

SEQ ID NO: 150096 - DNA, 2178 bp, synthetic construct
  misc_feature 1..2178: note = Description of Artificial Sequence: Synthetic coding sequence
  source 1..2178: mol_type = other DNA
atgtggaagaggtctgagcagatgaagatcaagagcggcaagtgcaacatggctgctgccatggagacagagcagctgggcgtggagatctttgaaacagctgactgtgaggagaacatcgagagccaggaccggcccaagctggagcccttctacgtggagcgctacagctggagccagctgaagaagctgctggccgacaccaggaagtaccacggctacatgatggccaaggcccctcatgacttcatgtttgtgaagagaaatgaccctgatggcccccacagcgaccgcatctactacctggccatgtctggagaaaatcgggagaacaccctcttctacagcgagatccccaagaccatcaacagagctgctgtgctgatgctgtcctggaagcccctgctggacctcttccaggccaccctggactatggcatgtacagccgggaggaggagctgctgcgggagaggaagagaattggaacagtgggcatcgccagctatgactaccaccagggcagcggcaccttcctgttccaggccggcagcggcatctaccacgtgaaggatggcggcccccagggcttcacccagcagcccctgcggcccaacctggtggagaccagctgccccaacatccgcatggaccccaagctgtgcccagctgaccctgactggatcgccttcatccacagcaatgacatctggatcagcaacatcgtgacccgggaggagcggcggctgacctacgtgcacaatgagctggccaacatggaggaggatgcccggtctgctggggtggccacctttgtgctgcaggaggagtttgaccgctacagcggctactggtggtgccccaaggccgagaccacccccagcggcggcaagatcctgcgcatcctgtatgaagaaaatgatgaaagtgaggtggagatcatccacgtgaccagccccatgctggagacccggcgggctgacagcttccgctaccccaagacaggaacagccaaccccaaggtgaccttcaagatgtctgagatcatgattgatgctgagggccgcatccaggtggatgaggtgcggcggctggtgtactttgagggcaccaaggacagccccctggagcaccacctgtatgtggtgtcctatgtgaaccctggagaggtgacccggctgacagaccggggctacagccacagctgctgcatcagccagcactgtgacttcttcatcagcaagtacagcaaccagaagaacccccactgtgtgtccctgtacaagctgagcagcccagaagatgaccccacctgcaagaccaaggagttctgggccaccatcctggacagcgctggccccctgcctgactacaccccacctgagatcttctcctttgagagcaccaccggcttcaccctgtatggcatgctgtacaagccccatgacctgcagcccgggaagaagtaccccaccgtgctcttcatctacggcggcccccaggtgcagctggtgaacaaccgcttcaagggcgtgaagtacttccggctgaacaccctggccagcctgggctacgtggtggtggtgattgacaacagaggcagctgccaccggggcctgaagtttgaaggagccttcaagtacaagatgggccagatcgagattgatgaccaggtggagggcctgcagtacctggccagccgctatgacttcatcgacctggacagagtgggcatccacggctggagctatggaggctacctgagcctgatggccctgatgcagaggagtgacatcttccgggtggccatcgccggggcccctgtgaccctgtggatcttctatgacaccggctacacagagcgctacatgggccacccagaccagaatgagcagggctactacctgggctctgtggccatgcaggccgagaagttccccagcgagcccaaccggctgctgctgctgcacggcttcctggatgaaaatgtgcactttgcccacaccagcatcctgctgtccttcctggtgcgggccggcaagccctatgacctgcagatctacccccaggagcggcacagcatccgggtgcctgagagcggggagcactatgagctgcacctgctgcactacctgcaggagaacctgggcagcagaattgctgccctgaaggtgatctag

SEQ ID NO: 150097 - DNA, 2697 bp, synthetic construct
  misc_feature 1..2697: note = Description of Artificial Sequence: Synthetic coding sequence
  source 1..2697: mol_type = other DNA
atgtggaagaggtctgagcagatgaagatcaagagcggcaagtgcaacatggctgctgccatggagacagagcagctgggcgtggagatctttgaaacagctgactgtgaggagaacatcgagagccaggaccggcccaagctggagcccttctacgtggagcgctacagctggagccagctgaagaagctgctggccgacaccaggaagtaccacggctacatgatggccaaggcccctcatgacttcatgtttgtgaagagaaatgaccctgatggcccccacagcgaccgcatctactacctggccatgtctggagaaaatcgggagaacaccctcttctacagcgagatccccaagaccatcaacagagctgctgtgctgatgctgtcctggaagcccctgctggacctcttccaggccaccctggactatggcatgtacagccgggaggaggagctgctgcgggagaggaagagaattggaacagtgggcatcgccagctatgactaccaccagggcagcggcaccttcctgttccaggccggcagcggcatctaccacgtgaaggatggcggcccccagggcttcacccagcagcccctgcggcccaacctggtggagaccagctgccccaacatccgcatggaccccaagctgtgcccagctgaccctgactggatcgccttcatccacagcaatgacatctggatcagcaacatcgtgacccgggaggagcggcggctgacctacgtgcacaatgagctggccaacatggaggaggatgcccggtctgctggggtggccacctttgtgctgcaggaggagtttgaccgctacagcggctactggtggtgccccaaggccgagaccacccccagcggcggcaagatcctgcgcatcctgtatgaagaaaatgatgaaagtgaggtggagatcatccacgtgaccagccccatgctggagacccggcgggctgacagcttccgctaccccaagacaggaacagccaaccccaaggtgaccttcaagatgtctgagatcatgattgatgctgagggccgcatcattgatgtgattgacaaggagctgatccagccctttgagatcctgtttgagggcgtggagtacatcgcccgggccggctggaccccagagggcaagtatgcctggagcatcctgctggacaggagccagacccggctgcagatcgtgctgatcagccctgagctgttcatccctgtggaggatgatgtgatggagcggcagaggctcatcgagagcgtgcctgacagcgtgacccccctcatcatctatgaggagaccacagacatctggatcaacatccatgacatcttccacgtgttcccccagagccatgaggaggagattgagttcatctttgccagcgagtgcaagacaggcttccgccacctgtacaagatcaccagcatcctgaaggagagcaagtacaagaggagcagcggcggcctgcctgcccccagcgacttcaagtgccccatcaaggaggagatcgccatcaccagcggggagtgggaggtgctgggcagacatggcagcaacatccaggtggatgaggtgcggcggctggtgtactttgagggcaccaaggacagccccctggagcaccacctgtatgtggtgtcctatgtgaaccctggagaggtgacccggctgacagaccggggctacagccacagctgctgcatcagccagcactgtgacttcttcatcagcaagtacagcaaccagaagaacccccactgtgtgtccctgtacaagctgagcagcccagaagatgaccccacctgcaagaccaaggagttctgggccaccatcctggacagcgctggccccctgcctgactacaccccacctgagatcttctcctttgagagcaccaccggcttcaccctgtatggcatgctgtacaagccccatgacctgcagcccgggaagaagtaccccaccgtgctcttcatctatggaggcccccaggtgcagctggtgaacaaccgcttcaagggcgtgaagtacttccggctgaacaccctggccagcctgggctacgtggtggtggtgattgacaacagaggcagctgccaccggggcctgaagtttgagggcgccttcaagtacaagatgggccagattgaaattgatgaccaggtggagggcctgcagtacctggccagccgctatgacttcatcgacctggacagagtgggcatccacggctggagctatggaggctacctgagcctgatggccctgatgcagaggagtgacatcttccgggtggccatcgccggggcccctgtgaccctgtggatcttctatgacaccggctacacagagcgctacatgggccacccagaccagaatgagcagggctactacctgggctctgtggccatgcaggccgagaagttccccagcgagcccaaccggctgctgctgctgcacggcttcctggatgaaaatgtgcactttgcccacaccagcatcctgctgtccttcctggtgcgggccggcaagccctatgacctgcagatctacccccaggagcggcacagcatccgggtgcctgagagcggggagcactatgagctgcacctgctgcactacctgcaggagaacctgggcagcagaattgctgccctgaaggtgatctag

SEQ ID NO: 150098 - DNA, 2349 bp, synthetic construct
  misc_feature 1..2349: note = Description of Artificial Sequence: Synthetic coding sequence
  source 1..2349: mol_type = other DNA
atggctgctgccatggagacagagcagctgggcgtggagatctttgaaacagctgactgtgaggagaacatcgagagccaggaccggcccaagctggagcccttctacgtggagcgctacagctggagccagctgaagaagctgctggccgacaccaggaagtaccacggctacatgatggccaaggcccctcatgacttcatgtttgtgaagagaaatgaccctgatggcccccacagcgaccgcatctactacctggccatgtctggagaaaatcgggagaacaccctcttctacagcgagatccccaagaccatcaacagagctgctgtgctgatgctgtcctggaagcccctgctggacctcttccaggccaccctggactatggcatgtacagccgggaggaggagctgctgcgggagaggaagagaattggaacagtgggcatcgccagctatgactaccaccagggcagcggcaccttcctgttccaggccggcagcggcatctaccacgtgaaggatggcggcccccagggcttcacccagcagcccctgcggcccaacctggtggagaccagctgccccaacatccgcatggaccccaagctgtgcccagctgaccctgactggatcgccttcatccacagcaatgacatctggatcagcaacatcgtgacccgggaggagcggcggctgacctacgtgcacaatgagctggccaacatggaggaggatgcccggtctgctggggtggccacctttgtgctgcaggaggagtttgaccgctacagcggctactggtggtgccccaaggccgagaccacccccagcggcggcaagatcctgcgcatcctgtatgaagaaaatgatgaaagtgaggtggagatcatccacgtgaccagccccatgctggagacccggcgggctgacagcttccgctaccccaagacaggaacagccaaccccaaggtgaccttcaagatgtctgagatcatgattgatgctgagggccgcatcattgatgtgattgacaaggagctgatccagccctttgagatcctgtttgagggcgtggagtacatcgcccgggccggctggaccccagagggcaagtatgcctggagcatcctgctggacaggagccagacccggctgcagatcgtgctgatcagccctgagctgttcatccctgtggaggatgatgtgatggagcggcagaggctcatcgagagcgtgcctgacagcgtgacccccctcatcatctatgaggagaccacagacatctggatcaacatccatgacatcttccacgtgttcccccagagccatgaggaggagattgagttcatctttgccagcgagtgcaagacaggcttccgccacctgtacaagatcaccagcatcctgaaggagagcaagtacaagaggagcagcggcggcctgcctgcccccagcgacttcaagtgccccatcaaggaggagatcgccatcaccagcggggagtgggaggtgctgggcagacatggcagcaacatccaggtggatgaggtgcggcggctggtgtactttgagggcaccaaggacagccccctggagcaccacctgtatgtggtgtcctatgtgaaccctggagaggtgacccggctgacagaccggggctacagccacagctgctgcatcagccagcactgtgacttcttcatcagcaagtacagcaaccagaagaacccccactgtgtgtccctgtacaagctgagcagcccagaagatgaccccacctgcaagaccaaggagttctgggccaccatcctggacagcgctggccccctgcctgactacaccccacctgagatcttctcctttgagagcaccaccggcttcaccctgtatggcatgctgtacaagccccatgacctgcagcccgggaagaagtaccccaccgtgctcttcatctatggaggcccccaggtggccatcgccggggcccctgtgaccctgtggatcttctatgacaccggctacacagagcgctacatgggccacccagaccagaatgagcagggctactacctgggctctgtggccatgcaggccgagaagttccccagcgagcccaaccggctgctgctgctgcacggcttcctggatgaaaatgtgcactttgcccacaccagcatcctgctgtccttcctggtgcgggccggcaagccctatgacctgcagatctacccccaggagcggcacagcatccgggtgcctgagagcggggagcactatgagctgcacctgctgcactacctgcaggagaacctgggcagcagaattgctgccctgaaggtgatctag

SEQ ID NO: 150099 - DNA, 2697 bp, synthetic construct; identical to SEQ ID NO: 150097
  misc_feature 1..2697: note = Description of Artificial Sequence: Synthetic coding sequence
  source 1..2697: mol_type = other DNA

SEQ ID NO: 150100 - DNA, 3669 bp, synthetic construct
  misc_feature 1..3669: note = Description of Artificial Sequence: Synthetic coding sequence
  source 1..3669: mol_type = other DNA
atgtctgaggccccccgcttctttgtgggccctgaggacacagagatcaaccctggcaactaccgccacttcttccaccacgcagatgaagatgatgaggaggaggatgacagccccccagagcggcagatcgtggtgggcatctgcagcatggccaagaagagcaagagcaagcccatgaaggagatcctggagcgcatcagcctcttcaagtacatcaccgtggtggtgtttgaggaggaggtgatcctgaatgaacctgtggagaactggcccctgtgtgactgcctgatctccttccacagcaagggcttccccctggacaaggctgtggcctatgccaagctgaggaaccccttcgtcatcaatgacctgaacatgcagtacctgatccaggaccggcgggaggtgtacagcatcctgcaggccgagggcatcctgctgcccaggtatgccatcctgaacagagaccccaacaaccccaaggagtgcaacctgattgaaggagaggaccacgtggaggtgaatggagaggtgttccagaagccctttgtggagaagcctgtgtctgctgaggaccacaacgtgtacatctactaccccaccagcgctgggggcggcagccagaggctcttcaggaagattggcagccgcagctctgtgtacagccctgagagcaatgtgaggaagacaggcagctacatctatgaggagttcatgcccacagatggaacagatgtgaaggtgtacacagtgggccctgactatgcccatgctgaggccaggaagagccctgccctggatggcaaggtggagcgggacagcgagggcaaggaggtgcgctaccctgtgatcctgaatgcccgggagaagctgattgcctggaaggtgtgcctggccttcaagcagacagtgtgtggctttgacctgctgcgggccaacggccagagctatgtgtgtgatgtgaatggcttctcctttgtgaagaacagcatgaagtactatgatgactgtgccaagatcctgggcaacatcgtgatgagggagctggccccccagttccacatcccctggagcatccccctggaggccgaggacatccccatcgtgcccaccaccagcggcaccatgatggagctgcgctgtgtgattgctgtgatcagacatggagacaggacccccaagcagaagatgaagatggaggtgcgccaccagaagttctttgacctgtttgagaagtgtgatggctacaagagcggcaagctgaagctgaagaagcccaagcagctgcaggaggtgctggacatcgcccggcagctgctgatggagctgggccagaacaatgacagcgagattgaggagaacaagcccaagctggagcagctgaagacagtgctggagatgtatggccacttcagcggcatcaacaggaaggtgcagctgacctacctgccccacggctgccccaagaccagcagcgaggaggaggacagcagaagagaggagcccagcctgctgctggtgctgaagtggggcggggagctgaccccagctggccgggtgcaggccgaggagctgggccgggccttccgctgcatgtacccaggcggccagggcgactatgccggcttccctggctgcggcctgctgcggctgcacagcacctacagacatgacctgaagatctatgccagtgatgagggccgggtgcagatgacagctgctgcctttgccaagggcctgctggccctggagggggagctgacccccatcctggtgcagatggtgaagagcgccaacatgaatggcctgctggacagcgacagcgacagcctgagcagctgccagcagagggtgaaggcccggctgcacgagatcctgcagaaggaccgggacttcaccgctgaggactatgagaagctgacccccagcggcagcatcagcctcatcaagtccatgcacctgatcaagaaccctgtgaagacctgtgacaaggtgtacagcctcatccagagcctgaccagccagatccgccacaggatggaggaccccaagagcagtgacatccagctgtaccacagcgagaccctggagctgatgctgcggcgctggagcaagctggagaaggacttcaagaccaagaatggccgctatgacatcagcaagatcccagacatctatgactgcatcaagtatgatgtgcagcacaacggcagcctgaagctggagaacaccatggagctgtaccgcctgagcaaggccctggccgacatcgtcatcccccaggagtatggcatcaccaaggccgagaagctggagatcgccaagggctactgcacccccctggtgaggaagatccgcagtgacctgcagaggacccaggatgatgacacagtgaacaagctgcaccctgtgtacagcagaggagtgctgagccctgagcggcacgtgaggacccggctgtacttcaccagcgagagccacgtgcacagcctgctgagcatcctgcgctacggggccctgtgcaatgaaagcaaggatgagcagtggaagagggccatggactacctgaatgtggtgaatgagctgaactacatgacccagatcgtcatcatgctgtatgaggaccccaacaaggacctgagcagcgaggagcgcttccacgtggagctgcacttcagccctggggccaagggctgtgaggaggacaagaacctgcccagcggctacggctacagacctgccagccgggagaatgaaggccggcggcccttcaagattgacaatgatgatgagccccacaccagcaagagagatgaggtggaccgggccgtcatcctcttcaagcccatggtgtctgagcccatccacatccacaggaagagccccctgcccaggagcaggaagacagccaccaatgatgaggagagccccctgtctgtgagcagccctgagggcaccggcacctggctgcactacaccagcggcgtgggcactggaagaagaagaagaagaagtggagagcagatcaccagcagccctgtgagccccaagagcctggccttcaccagcagcatcttcggctcctggcagcaggtggtgtctgaaaatgccaactacctgcggacccccaggaccctggtggagcagaagcagaaccccaccgtgggcagccactgtgccggcctcttcagcacctctgtgctgggcggcagcagcagcgcccccaacctgcaggactatgcccggacccacaggaagaagctgaccagcagcggctgcattgatggctttgagctgtacagcatggtgcccagcatctgccccctggagaccctgcacaatgccctgagcctgaagcaggtggatgagttcctggccagcatcgccagccccagcagtgatgtgcccaggaagacagctgagatcagcagcacagccctgcggagcagccccatcatgaggaagaaggtgtccctgaacacctacaccccagccaagatcctgcccaccccaccagccaccctgaagagcaccaaggccagcagcaagccagccaccagcggccccagcagcgctgtggtgcccaacaccagcagcaggaagaagaacatcaccagcaagacagagacccatgagcacaagaagaacacaggcaagaagaagtag

SEQ ID NO: 150101 - DNA, 3732 bp, synthetic construct
  misc_feature 1..3732: note = Description of Artificial Sequence: Synthetic coding sequence
  source 1..3732: mol_type = other DNA
atgtctgaggccccccgcttctttgtgggccctgaggacacagagatcaaccctggcaactaccgccacttcttccaccacgcagatgaagatgatgaggaggaggatgacagccccccagagcggcagatcgtggtgggcatctgcagcatggccaagaagagcaagagcaagcccatgaaggagatcctggagcgcatcagcctcttcaagtacatcaccgtggtggtgtttgaggaggaggtgatcctgaatgaacctgtggagaactggcccctgtgtgactgcctgatctccttccacagcaagggcttccccctggacaaggctgtggcctatgccaagctgaggaaccccttcgtcatcaatgacctgaacatgcagtacctgatccaggaccggcgggaggtgtacagcatcctgcaggccgagggcatcctgctgcccaggtatgccatcctgaacagagaccccaacaaccccaaggagtgcaacctgattgaaggagaggaccacgtggaggtgaatggagaggtgttccagaagccctttgtggagaagcctgtgtctgctgaggaccacaacgtgtacatctactaccccaccagcgctgggggcggcagccagaggctcttcaggaagattggcagccgcagctctgtgtacagccctgagagcaatgtgaggaagacaggcagctacatctatgaggagttcatgcccacagatggaacagatgtgaaggtgtacacagtgggccctgactatgcccatgctgaggccaggaagagccctgccctggatggcaaggtggagcgggacagcgagggcaaggaggtgcgctaccctgtgatcctgaatgcccgggagaagctgattgcctggaaggtgtgcctggccttcaagcagacagtgtgtggctttgacctgctgcgggccaacggccagagctatgtgtgtgatgtgaatggcttctcctttgtgaagaacagcatgaagtactatgatgactgtgccaagatcctgggcaacatcgtgatgagggagctggccccccagttccacatcccctggagcatccccctggaggccgaggacatccccatcgtgcccaccaccagcggcaccatgatggagctgcgctgtgtgattgctgtgatcagacatggagacaggacccccaagcagaagatgaagatggaggtgcgccaccagaagttctttgacctgtttgagaagtgtgatggctacaagagcggcaagctgaagctgaagaagcccaagcagctgcaggaggtgctggacatcgcccggcagctgctgatggagctgggccagaacaatgacagcgagattgaggagaacaagcccaagctggagcagctgaagacagtgctggagatgtatggccacttcagcggcatcaacaggaaggtgcagctgacctacctgccccacggctgccccaagaccagcagcgaggaggaggacagcagaagagaggagcccagcctgctgctggtgctgaagtggggcggggagctgaccccagctggccgggtgcaggccgaggagctgggccgggccttccgctgcatgtacccaggcggccagggcgactatgccggcttccctggctgcggcctgctgcggctgcacagcacctacagacatgacctgaagatctatgccagtgatgagggccgggtgcagatgacagctgctgcctttgccaagggcctgctggccctggagggggagctgacccccatcctggtgcagatggtgaagagcgccaacatgaatggcctgctggacagcgacagcgacagcctgagcagctgccagcagagggtgaaggcccggctgcacgagatcctgcagaaggaccgggacttcaccgctgaggactatgagaagctgacccccagcggcagcatcagcctcatcaagtccatgcacctgatcaagaaccctgtgaagacctgtgacaaggtgtacagcctcatccagagcctgaccagccagatccgccacaggatggaggaccccaagagcagtgacatccagctgtaccacagcgagaccctggagctgatgctgcggcgctggagcaagctggagaaggacttcaagaccaagaatggccgctatgacatcagcaagatcccagacatctatgactgcatcaagtatgatgtgcagcacaacggcagcctgaagctggagaacaccatggagctgtaccgcctgagcaaggccctggccgacatcgtcatcccccaggagtatggcatcaccaaggccgagaagctggagatcgccaagggctactgcacccccctggtgaggaagatccgcagtgacctgcagaggacccaggatgatgacacagtgaacaagctgcaccctgtgtacagcagaggagtgctgagccctgagcggcacgtgaggacccggctgtacttcaccagcgagagccacgtgcacagcctgctgagcatcctgcgctacggggccctgtgcaatgaaagcaaggatgagcagtggaagagggccatggactacctgaatgtggtgaatgagctgaactacatgacccagatcgtcatcatgctgtatgaggaccccaacaaggacctgagcagcgaggagcgcttccacgtggagctgcacttcagccctggggccaagggctgtgaggaggacaagaacctgcccagcggctacggctacagacctgccagccgggagaatgaaggccggcggcccttcaagattgacaatgatgatgagccccacaccagcaagagagatgaggtggaccgggccgtcatcctcttcaagcccatggtgtctgagcccatccacatccacaggaagagccccctgcccaggagcaggaagacagccaccaatgatgaggagagccccctgtctgtgagcagccctgagggcaccggcacctggctgcactacaccagcggcgtgggcactggaagaagaagaagaagaagtggagagcagatcaccagcagccctgtgagccccaagagcctggccttcaccagcagcatcttcggctcctggcagcaggtggtgtctgaaaatgccaactacctgcggacccccaggaccctggtggagcagaagcagaaccccaccgtgggcagccactgtgccggcctcttcagcacctctgtgctgggcggcagcagcagcgcccccaacctgcaggactatgcccggacccacaggaagaagctgaccagcagcggctgcattgatgatgccacccggggcagcgctgtgaagcgcttcagcatcagctttgcccggcaccccaccaatggatttgagctgtacagcatggtgcccagcatctgccccctggagaccctgcacaatgccctgagcctgaagcaggtggatgagttcctggccagcatcgccagccccagcagtgatgtgcccaggaagacagctgagatcagcagcacagccctgcggagcagccccatcatgaggaagaaggtgtccctgaacacctacaccccagccaagatcctgcccaccccaccagccaccctgaagagcaccaaggccagcagcaagccagccaccagcggccccagcagcgctgtggtgcccaacaccagcagcaggaagaagaacatcaccagcaagacagagacccatgagcacaagaagaacacaggcaagaagaagtag

SEQ ID NO: 150102 - DNA, 3669 bp, synthetic construct; identical to SEQ ID NO: 150100
  misc_feature 1..3669: note = Description of Artificial Sequence: Synthetic coding sequence
  source 1..3669: mol_type = other DNA

SEQ ID NO: 150103 - DNA, 3837 bp, synthetic construct
  misc_feature 1..3837: note = Description of Artificial Sequence: Synthetic coding sequence
  source 1..3837: mol_type = other DNA
atgtctgaggccccccgcttctttgtgggccctgaggacacagagatcaaccctggcaactaccgccacttcttccaccacgcagatgaagatgatgaggaggaggatgacagccccccagagcggcagatcgtggtgggcatctgcagcatggccaagaagagcaagagcaagcccatgaaggagatcctggagcgcatcagcctcttcaagtacatcaccgtggtggtgtttgaggaggaggtgatcctgaatgaacctgtggagaactggcccctgtgtgactgcctgatctccttccacagcaagggcttccccctggacaaggctgtggcctatgccaagctgaggaaccccttcgtcatcaatgacctgaacatgcagtacctgatccaggaccggcgggaggtgtacagcatcctgcaggccgagggcatcctgctgcccaggtatgccatcctgaacagagaccccaacaaccccaaggagtgcaacctgattgaaggagaggaccacgtggaggtgaatggagaggtgttccagaagccctttgtggagaagcctgtgtctgctgaggaccacaacgtgtacatctactaccccaccagcgctgggggcggcagccagaggctcttcaggaagattggcagccgcagctctgtgtacagccctgagagcaatgtgaggaagacaggcagctacatctatgaggagttcatgcccacagatggaacagatgtgaaggtgtacacagtgggccctgactatgcccatgctgaggccaggaagagccctgccctggatggcaaggtggagcgggacagcgagggcaaggaggtgcgctaccctgtgatcctgaatgcccgggagaagctgattgcctggaaggtgtgcctggccttcaagcagacagtgtgtggctttgacctgctgcgggccaacggccagagctatgtgtgtgatgtgaatggcttctcctttgtgaagaacagcatgaagtactatgatgactgtgccaagatcctgggcaacatcgtgatgagggagctggccccccagttccacatcccctggagcatccccctggaggccgaggacatccccatcgtgcccaccaccagcggcaccatgatggagctgcgctgtgtgattgctgtgatcagacatggagacaggacccccaagcagaagatgaagatggaggtgcgccaccagaagttctttgacctgtttgagaagtgtgatggctacaagagcggcaagctgaagctgaagaagcccaagcagctgcaggaggtgctggacatcgcccggcagctgctgatggagctgggccagaacaatgacagcgagattgaggagaacaagcccaagctggagcagctgaagacagtgctggagatgtatggccacttcagcggcatcaacaggaaggtgcagctgacctacctgccccacggctgccccaagaccagcagcgaggaggaggacagcagaagagaggagcccagcctgctgctggtgctgaagtggggcggggagctgaccccagctggccgggtgcaggccgaggagctgggccgggccttccgctgcatgtacccaggcggccagggcgactatgccggcttccctggctgcggcctgctgcggctgcacagcacctacagacatgacctgaagatctatgccagtgatgagggccgggtgcagatgacagctgctgcctttgccaagggcctgctggccctggagggggagctgacccccatcctggtgcagatggtgaagagcgccaacatgaatggcctgctggacagcgacagcgacagcctgagcagctgccagcagagggtgaaggcccggctgcacgagatcctgcagaaggaccgggacttcaccgctgaggactatgagaagctgacccccagcggcagcatcagcctcatcaagtccatgcacctgatcaagaaccctgtgaagacctgtgacaaggtgtacagcctcatccagagcctgaccagccagatccgccacaggatggaggaccccaagagcagtgacatccagctgtaccacagcgagaccctggagctgatgctgcggcgctggagcaagctggagaaggacttcaagaccaagaatggccgctatgacatcagcaagatcccagacatctatgactgcatcaagtatgatgtgcagcacaacggcagcctgaagctggagaacaccatggagctgtaccgcctgagcaaggccctggccgacatcgtcatcccccaggagtatggcatcaccaaggccgagaagctggagatcgccaagggctactgcacccccctggtgaggaagatccgcagtgacctgcagaggacccaggatgatgacacagtgaacaagctgcaccctgtgtacagcagaggagtgctgagccctgagcggcacgtgaggacccggctgtacttcaccagcgagagccacgtgcacagcctgctgagcatcctgcgctacggggccctgtgcaatgaccatgacagccagaatgaagatggcggcatggtgaaggagatggagagcaaggatgagcagtggaagagggccatggactacctgaatgtggtgaatgagctgaactacatgacccagatcgtcatcatgctgtatgaggaccccaacaaggacctgagcagcgaggagcgcttccacgtggagctgcacttcagccctggggccaagggctgtgaggaggacaagaacctgcccagcggctacggctacagacctgccagcagagaaaatgaaggaagaagacccttcaagattgacaatgatgatgagccccacaccagcaagagagatgaggtggacagagctgtgatcctcttcaagcccatggtgtctgagcccatccacatccacaggaagagccccctgcccaggagcaggaagacagccaccaatgatgaggagagccccctgtctgtgagcagccctgagggcaccggcacctggctgcactacaccagcggcgtgggcaccggcagaagaagaagaagaagtggagagcagatcaccagcagccctgtgagccccaagagcctggccttcaccagcagcatcttcggctcctggcagcaggtggtgtctgaaaatgccaactacctgcggacccccaggaccctggtggagcagaagcagaaccccaccgtgggcagccactgtgccggcctcttcagcacctctgtgctgggcggcagcagcagcgcccccaacctgcaggactatgcccggacccacaggaagaagctgaccagcagcggctgcattgatgatgccacccggggcagcgctgtgaagcgcttcagcatcagctttgcccggcaccccaccaatgagcacctgcacctgtaccgctgctggagcgtgtcctctgtggagttcctgggcagcagcggctttgagctgtacagcatggtgcccagcatctgccccctggagaccctgcacaatgccctgagcctgaagcaggtggatgagttcctggccagcatcgccagccccagcagtgatgtgcccaggaagacagctgagatcagcagcacagccctgcggagcagccccatcatgaggaagaaggtgtccctgaacacctacaccccagccaagatcctgcccaccccaccagccaccctgaagagcaccaaggccagcagcaagccagccaccagcggccccagcagcgctgtggtgcccaacaccagcagcaggaagaagaacatcaccagcaagacagagacccatgagcacaagaagaacacaggcaagaagaagtag

SEQ ID NO: 150104 - DNA, 177 bp, synthetic construct
  misc_feature 1..177: note = Description of Artificial Sequence: Synthetic coding sequence
  source 1..177: mol_type = other DNA
atgtctgaggccccccgcttctttgtgggccctgaggacacagagatcaaccctggcaactaccgccacttcttccaccacgcagatgaagatgatgaggaggaggatgacagccccccagagcggcagatcgtggtgggcatctgcagcatggccaagaagagcaagagcaagtag

SEQ ID NO: 150105 - DNA, 2877 bp, synthetic construct
  misc_feature 1..2877: note = Description of Artificial Sequence: Synthetic coding sequence
  source 1..2877: mol_type = other DNA
atgctgaagagcaagaccttcctgaagaagaccagggctggaggagtgatgaagatcgtgcgggagcactacctgagagatgacatcggctgtggggcccctggctgtgccgcctgtggcggggcccacgagggccctgccctggagccccagccccaggaccctgccagctctgtgtgcccccagccccactacctgctgcctgacaccaacgtgctgctgcaccagattgatgtgctggaggaccctgccatcagaaatgtgattgtgctgcagacagtgctgcaggaggtgaggaacagaagtgcccctgtgtacaagaggatcagagatgtgaccaacaaccaggagaagcacttctacaccttcaccaatgagcaccaccgggagacctacgtggagcaggagcagggagaaaatgccaatgacagaaatgaccgggccatccgggtggccgccaagtggtacaatgagcacctgaagaagatgtctgctgacaaccagctgcaggtgatcttcatcaccaatgacagaagaaacaaggagaaggccatcgaggagggcatcccagccttcacctgtgaggagtatgtgaagagcctgacagccaaccctgagctgattgaccggctggcctgcctgtctgaggagggcaatgaaattgaaagtggcaagatcatcttcagcgagcacctgcccctgagcaagctgcagcagggcatcaagagcggcacctacctgcagggcaccttccgggccagccgggagaactacctggaggccaccgtgtggatccacggggacaatgaggagaacaaggagatcatcctgcagggcctgaagcacctgaacagagctgtgcatgaagatattgtggccgtggagctgctgcccaagagccagtgggtggcccccagctctgtggtgctgcatgatgagggccagaatgaggaggatgtggagaaggaggaggagacagagaggatgctgaagacagctgtgtctgagaagatgctgaagcccaccggccgggtggtgggcatcatcaagaggaactggaggccctactgcggcatgctgagcaagagtgacatcaaggagagcagaagacacctgttcaccccagctgacaagaggatcccccgcatcagaattgagacccggcaggccagcaccctggagggccgccgcatcatcgtggccattgatggctggcccaggaacagccgctacccaaatggccactttgtgaggaacctgggagatgtgggggagaaggagacagaaacagaggtgctgctgctggagcatgatgtgccccaccagcccttcagccaggccgtgctgtccttcctgcccaagatgccctggagcatcacagagaaggacatgaagaaccgggaggacctgcggcacctgtgcatctgcagcgtggaccccccaggctgcacagacattgatgatgccctgcactgccgggagctggagaatggaaacctggaggtgggcgtgcacatcgcagatgtgagccacttcatccggcctggaaatgccctggaccaggagagcgcccggcggggcaccaccgtgtacctgtgtgagaagagaattgacatggtgcctgagctgctgagcagcaacctgtgcagcctgaagtgtgatgtggaccggctggccttcagctgcatctgggagatgaaccacaatgctgagatcctgaagaccaagttcaccaagagcgtcatcaacagcaaggccagcctgacctatgcagaggcccagctgagaattgattctgccaacatgaatgatgacatcaccaccagcctgcggggcctgaacaagctggccaagatcctgaagaagagaagaattgaaaaaggagccctgaccctgagcagccctgaggtgcgcttccacatggattctgagacccatgaccccatcgacctgcagaccaaggagctgcgggagaccaacagcatggtggaggagttcatgctgctggccaacatctctgtggccaagaagatccacgaggagttcagcgagcacgccctgctgaggaagcacccagcccccccacccagcaactatgagatcctggtgaaggccgcccggagcaggaacctggagatcaagacagacacagccaagagcctggccgagagcctggaccaggccgagagccccaccttcccctacctgaacaccctgctgcgcatcctggccacccgctgcatgatgcaggccgtgtacttctgcagcggcatggacaatgacttccaccactacggcctggccagccccatctacacccacttcaccagccccatccgccgctatgcagatgtgattgtgcaccggctgctggccgtggccatcggggctgactgcacctacccagagctgacagacaagcacaagctggccgacatctgcaagaacctgaacttccgccacaagatggcccagtatgcccagagggcctctgtggccttccacacccagctgttcttcaagagcaaaggaattgtgtctgaggaggcctacatcctgtttgtgaggaagaatgccatcgtggtgctgatccccaagtatggcctggagggcaccgtcttctttgaggagaaggacaagcccaacccccagctgatctatgatgatgagatccccagcctgaagattgaagatactgtgttccacgtgtttgacaaggtgaaggtgaagatcatgctggacagcagcaacctgcagcaccagaagatccgcatgagcctggtggagccccagatccctggcatcagcatccccacagacaccagcaacatggacctgaatggccccaagaagaagaagatgaagctgggcaagtag

SEQ ID NO: 150106 - DNA, 2391 bp, synthetic construct
  misc_feature 1..2391: note = Description of Artificial Sequence: Synthetic coding sequence
  source 1..2391: mol_type = other DNA
atgtctgctgacaaccagctgcaggtgatcttcatcaccaatgacagaagaaacaaggagaaggccatcgaggagggcatcccagccttcacctgtgaggagtatgtgaagagcctgacagccaaccctgagctgattgaccggctggcctgcctgtctgaggagggcaatgaaattgaaagtggcaagatcatcttcagcgagcacctgcccctgagcaagctgcagcagggcatcaagagcggcacctacctgcagggcaccttccgggccagccgggagaactacctggaggccaccgtgtggatccacggggacaatgaggagaacaaggagatcatcctgcagggcctgaagcacctgaacagagctgtgcatgaagatattgtggccgtggagctgctgcccaagagccagtgggtggcccccagctctgtggtgctgcatgatgagggccagaatgaggaggatgtggagaaggaggaggagacagagaggatgctgaagacagctgtgtctgagaagatgctgaagcccaccggccgggtggtgggcatcatcaagaggaactggaggccctactgcggcatgctgagcaagagtgacatcaaggagagcagaagacacctgttcaccccagctgacaagaggatcccccgcatcagaattgagacccggcaggccagcaccctggagggccgccgcatcatcgtggccattgatggctggcccaggaacagccgctacccaaatggccactttgtgaggaacctgggagatgtgggggagaaggagacagaaacagaggtgctgctgctggagcatgatgtgccccaccagcccttcagccaggccgtgctgtccttcctgcccaagatgccctggagcatcacagagaaggacatgaagaaccgggaggacctgcggcacctgtgcatctgcagcgtggaccccccaggctgcacagacattgatgatgccctgcactgccgggagctggagaatggaaacctggaggtgggcgtgcacatcgcagatgtgagccacttcatccggcctggaaatgccctggaccaggagagcgcccggcggggcaccaccgtgtacctgtgtgagaagagaattgacatggtgcctgagctgctgagcagcaacctgtgcagcctgaagtgtgatgtggaccggctggccttcagctgcatctgggagatgaaccacaatgctgagatcctgaagaccaagttcaccaagagcgtcatcaacagcaaggccagcctgacctatgcagaggcccagctgagaattgattctgccaacatgaatgatgacatcaccaccagcctgcggggcctgaacaagctggccaagatcctgaagaagagaagaattgaaaaaggagccctgaccctgagcagccctgaggtgcgcttccacatggattctgagacccatgaccccatcgacctgcagaccaaggagctgcgggagaccaacagcatggtggaggagttcatgctgctggccaacatctctgtggccaagaagatccacgaggagttcagcgagcacgccctgctgaggaagcacccagcccccccacccagcaactatgagatcctggtgaaggccgcccggagcaggaacctggagatcaagacagacacagccaagagcctggccgagagcctggaccaggccgagagccccaccttcccctacctgaacaccctgctgcgcatcctggccacccgctgcatgatgcaggccgtgtacttctgcagcggcatggacaatgacttccaccactacggcctggccagccccatctacacccacttcaccagccccatccgccgctatgcagatgtgattgtgcaccggctgctggccgtggccatcggggctgactgcacctacccagagctgacagacaagcacaagctggccgacatctgcaagaacctgaacttccgccacaagatggcccagtatgcccagagggcctctgtggccttccacacccagctgttcttcaagagcaaaggaattgtgtctgaggaggcctacatcctgtttgtgaggaagaatgccatcgtggtgctgatccccaagtatggcctggagggcaccgtcttctttgaggagaaggacaagcccaacccccagctgatctatgatgatgagatccccagcctgaagattgaagatactgtgttccacgtgtttgacaaggtgaaggtgaagatcatgctggacagcagcaacctgcagcaccagaagatccgcatgagcctggtggagccccagatccctggcatcagcatccccacagacaccagcaacatggacctgaatggccccaagaagaagaagatgaagctgggcaagtag

SEQ ID NO: 150107 - DNA, 2787 bp, synthetic construct
  misc_feature 1..2787: note = Description of Artificial Sequence: Synthetic coding sequence
  source 1..2787: mol_type = other DNA
atgctgaagagcaagaccttcctgaagaagaccagggctggaggagtgatgaagatcgtgcgggagcactacctgagagatgacatcggctgtggggcccctggctgtgccgcctgtggcggggcccacgagggccctgccctggagccccagccccaggaccctgccagctctgtgtgcccccagccccactacctgctgcctgacaccaacgtgctgctgcaccagatcgtgtctgcctggaggcctggcacctgggcctctgtggccagcagcctgcggctgcccggcagcctggagacctacgtggagcaggagcagggagaaaatgccaatgacagaaatgaccgggccatccgggtggccgccaagtggtacaatgagcacctgaagaagatgtctgctgacaaccagctgcaggtgatcttcatcaccaatgacagaagaaacaaggagaaggccatcgaggagggcatcccagccttcacctgtgaggagtatgtgaagagcctgacagccaaccctgagctgattgaccggctggcctgcctgtctgaggagggcaatgaaattgaaagtggcaagatcatcttcagcgagcacctgcccctgagcaagctgcagcagggcatcaagagcggcacctacctgcagggcaccttccgggccagccgggagaactacctggaggccaccgtgtggatccacggggacaatgaggagaacaaggagatcatcctgcagggcctgaagcacctgaacagagctgtgcatgaagatattgtggccgtggagctgctgcccaagagccagtgggtggcccccagctctgtggtgctgcatgatgagggccagaatgaggaggatgtggagaaggaggaggagacagagaggatgctgaagacagctgtgtctgagaagatgctgaagcccaccggccgggtggtgggcatcatcaagaggaactggaggccctactgcggcatgctgagcaagagtgacatcaaggagagcagaagacacctgttcaccccagctgacaagaggatcccccgcatcagaattgagacccggcaggccagcaccctggagggccgccgcatcatcgtggccattgatggctggcccaggaacagccgctacccaaatggccactttgtgaggaacctgggagatgtgggggagaaggagacagaaacagaggtgctgctgctggagcatgatgtgccccaccagcccttcagccaggccgtgctgtccttcctgcccaagatgccctggagcatcacagagaaggacatgaagaaccgggaggacctgcggcacctgtgcatctgcagcgtggaccccccaggctgcacagacattgatgatgccctgcactgccgggagctggagaatggaaacctggaggtgggcgtgcacatcgcagatgtgagccacttcatccggcctggaaatgccctggaccaggagagcgcccggcggggcaccaccgtgtacctgtgtgagaagagaattgacatggtgcctgagctgctgagcagcaacctgtgcagcctgaagtgtgatgtggaccggctggccttcagctgcatctgggagatgaaccacaatgctgagatcctgaagaccaagttcaccaagagcgtcatcaacagcaaggccagcctgacctatgcagaggcccagctgagaattgattctgccaacatgaatgatgacatcaccaccagcctgcggggcctgaacaagctggccaagatcctgaagaagagaagaattgaaaaaggagccctgaccctgagcagccctgaggtgcgcttccacatggattctgagacccatgaccccatcgacctgcagaccaaggagctgcgggagaccaacagcatggtggaggagttcatgctgctggccaacatctctgtggccaagaagatccacgaggagttcagcgagcacgccctgctgaggaagcacccagcccccccacccagcaactatgagatcctggtgaaggccgcccggagcaggaacctggagatcaagacagacacagccaagagcctggccgagagcctggaccaggccgagagccccaccttcccctacctgaacaccctgctgcgcatcctggccacccgctgcatgatgcaggccgtgtacttctgcagcggcatggacaatgacttccaccactacggcctggccagccccatctacacccacttcaccagccccatccgccgctatgcagatgtgattgtgcaccggctgctggccgtggccatcggggctgactgcacctacccagagctgacagacaagcacaagctggccgacatctgcaagaacctgaacttccgccacaagatggcccagtatgcccagagggcctctgtggccttccacacccagctgttcttcaagagcaaaggaattgtgtctgaggaggcctacatcctgtttgtgaggaagaatgccatcgtggtgctgatccccaagtatggcctggagggcaccgtcttctttgaggagaaggacaagcccaacccccagctgatctatgatgatgagatccccagcctgaagattgaagatactgtgttccacgtgtttgacaaggtgaaggtgaagatcatgctggacagcagcaacctgcagcaccagaagatccgcatgagcctggtggagccccagatccctggcatcagcatccccacagacaccagcaacatggacctgaatggccccaagaagaagaagatgaagctgggcaagtag

SEQ ID NO: 150108 - DNA, 2916 bp, synthetic construct
  misc_feature 1..2916: note = Description of Artificial Sequence: Synthetic coding sequence
  source 1..2916: mol_type = other DNA
atgcagacagcctgccaggccgtgcagcaccagaggggccggcggcagtacaacaagctgaggaacctgctgaaggatgcccggcatgactgcatcctgtttgccaatgagttccagcagtgctgctacctgccccgggagcggggggagagcatggagaagtggcagaccaggagcatctacaatgctgctgtgtggtactaccaccactgccaggacaggatgcccatcgtgatggtgacagaagatgaggaggccatccagcagtatggcagcgagacagagggcgtgtttgtgatcaccttcaagaactacctggacaacttctggccagacctgaaggccgcccacgagctgtgtgacagcatcctgcagagcagaagagaaagagaaaatgaaagccaggagagccacggcaaggagtacccagagcacctgcccctggaggtgctggaggccggcatcaagagcggccgctacatccagggcatcctgaatgtgaacaagcaccgggcccagatcgaggcctttgtgcggctgcagggcgccagcagcaaggacagcgacctggtgtctgacatcctgattcatggcatgaaggccaggaacagaagcatccatggagatgtggtggtggtggagctgctgcccaagaatgagtggaagggccgcacagtggccctgtgtgaaaatgactgtgatgacaaggccagcggggagagccccagcgagcccatgcccaccggccgggtggtgggcatcctgcagaagaactggagggactatgtggtgaccttccccagcaaggaggaggtgcagagccagggcaagaatgcccagaagatcctggtgaccccctgggactaccgcatccccaagatccgcatcagcacccagcaggccgagaccctgcaggacttccgggtggtggtgagaattgacagctgggagagcacctctgtgtaccccaacggccactttgtgcgggtgctgggccgcatcggggacctggagggggagatcgccaccatcctggtggagaacagcatcagcgtcatccccttcagcgaggcccagatgtgtgagatgcctgtgaacaccccagagagcccctggaaggtgtccccagaggaggagcagaagaggaaggacctgaggaagagccacctggtgttcagcattgaccccaagggctgtgaagatgtggatgacaccctgtctgtgaggaccctgaacaatggaaacctggagctgggcgtgcacatcgcagatgtgacccactttgtggcccccaacagctacattgatattgaggcccggacccgggccaccacctactacctggccgacagaagatatgacatgctgcccagcgtgctgtctgctgacctgtgcagcctgctgggcggcgtggacagatatgctgtgtccatcatgtgggagctggacaaggccagctatgagatcaagaaggtgtggtacggccgcaccatcatccgcagcgcctacaagctgttctatgaagctgcccaggagctgctggatggcaacctgtctgtggtggatgacatccctgagttcaaggacctggatgagaagagccggcaggccaagctggaggagctggtgtgggccatcggcaagctgacagacatcgcccggcacgtgcgggccaagagagatggctgtggggccctggagctggagggcgtggaggtgtgtgtgcagctggatgacaagaagaacatccatgacctgatccccaagcagcccctggaggtgcatgaaacagtggccgagtgcatgatcctggccaaccactgggtggccaagaagatctgggagagcttcccccaccaggccctgctgcggcagcaccccccaccccaccaggagttcttcagcgagctgagagaatgtgccaaggccaagggcttcttcatcgacaccaggagcaacaagaccctggccgacagcctggacaatgccaatgacccccatgaccccatcgtgaaccggctgctgcgctccatggccacccaggccatgagcaatgccctgtacttcagcacaggcagctgtgccgaggaggagttccaccactacggcctggccctggacaagtacacccacttcaccagccccatccgccgctacagcgacatcgtggtgcaccggctgctgatggccgccatcagcaaggacaagaagatggagatcaagggcaacctcttcagcaacaaggacctggaggagctgtgccgccacatcaacaacagaaaccaggccgcccagcacagccagaagcagagcacagagctgttccagtgcatgtacttcaaggacaaggaccctgccacagaggagcgctgcatcagtgatggagtcatctacagcatccgcaccaatggagtgctgctcttcatcccccgcttcggcatcaagggagctgcctacctgaagaacaaggatggcctggtgatcagctgtggccctgacagctgcagcgagtggaagccaggcagcctgcagcgcttccagaacaagatcaccagcaccaccacagatggagagagcgtgaccttccacctgtttgaccacgtgacagtgcgcatcagcatccaggccagccgctgccacagcgacaccatccggctggagatcatcagcaacaagccctacaagatccccaacacagagctgatccaccagagcagccccctgctgaagtctgagctggtgaaggaggtgaccaagtctgtggaggaggcccagctggcccaggaggtgaaggtgaacatcatccaggaggagtaccaggagtaccggcagaccaagggccgcagcctgtacaccctgctggaggagatccgggacctggccctgctggatgtgagcaacaactacggcatctag

SEQ ID NO: 150109 - DNA, 3165 bp, synthetic construct
  misc_feature 1..3165: note = Description of Artificial Sequence: Synthetic coding sequence
  source 1..3165: mol_type = other DNA
atgctgcagaagcgggagaaggtgctgctgctgcggaccttccagggccgcaccctgagaattgtgcgggagcactacctgcggccctgtgtgccctgccacagccccctgtgcccccagcctgctgcctgcagccatgatggcaagctgctgagcagtgatgtgacccactacgtgatcccagactggaaggtggtgcaggactacctggagatcctggagttccctgagctgaagggcatcatcttcatgcagacagcctgccaggccgtgcagcaccagagaggaagacggcagtacaacaagctgaggaacctgctgaaggatgcccggcatgactgcatcctgtttgccaatgagttccagcagtgctgctacctgccccgggagcggggggagagcatggagaagtggcagaccaggagcatctacaatgctgctgtgtggtactaccaccactgccaggacaggatgcccatcgtgatggtgacagaagatgaggaggccatccagcagtatggcagcgagacagaaggagtgtttgtgatcaccttcaagaactacctggacaacttctggccagacctgaaggccgcccacgagctgtgtgacagcatcctgcagagccggcgggagcgggagaatgaaagccaggagagccacggcaaggagtacccagagcacctgcccctggaggtgctggaggccggcatcaagagcggccgctacatccagggcatcctgaatgtgaacaagcaccgggcccagatcgaggcctttgtgcggctgcagggcgccagcagcaaggacagcgacctggtgtctgacatcctgatccacggcatgaaggccaggaacagaagcatccatggagatgtggtggtggtggagctgctgcccaagaatgagtggaagggccgcacagtggccctgtgtgaaaatgactgtgatgacaaggccagcggggagagccccagcgagcccatgcccaccggccgggtggtgggcatcctgcagaagaactggagggactatgtggtgaccttccccagcaaggaggaggtgcagagccagggcaagaatgcccagaagatcctggtgaccccctgggactaccgcatccccaagatccgcatcagcacccagcaggccgagaccctgcaggacttccgggtggtggtgagaattgacagctgggagagcacctctgtgtacccaaatggccactttgtgcgggtgctgggcagaattggagacctggagggggagatcgccaccatcctggtggagaacagcatcagcgtcatccccttcagcgaggcccagatgtgtgagatgcctgtgaacaccccagagagcccctggaaggtgtccccagaggaggagcagaagaggaaggacctgaggaagagccacctggtgttcagcattgaccccaagggctgtgaagatgtggatgacaccctgtctgtgaggaccctgaacaacggcaacctggagctgggcgtgcacatcgcagatgtgacccactttgtggcccccaacagctacatcgacatcgaggcccggacccgggccaccacctactacctggccgaccggcgctatgacatgctgcccagcgtgctgtctgctgacctgtgcagcctgctgggcggcgtggacagatatgctgtgtccatcatgtgggagctggacaaggccagctatgagatcaagaaggtgtggtacggccgcaccatcatccgcagcgcctacaagctgttctatgaggccgcccaggagctgctggatggcaacctgtctgtggtggatgacatccctgagttcaaggacctggatgagaagagccggcaggccaagctggaggagctggtgtgggccatcggcaagctgacagacatcgcccggcacgtgcgggccaagagagatggctgtggggccctggagctggagggcgtggaggtgtgtgtgcagctggatgacaagaagaacatccatgacctgatccccaagcagcccctggaggtgcatgagaccgtggccgagtgcatgatcctggccaaccactgggtggccaagaagatctgggagagcttcccccaccaggccctgctgcggcagcaccccccaccccaccaggagttcttcagcgagctgcgggagtgtgccaaggccaagggcttcttcatcgacaccaggagcaacaagaccctggccgacagcctggacaatgccaatgacccccatgaccccatcgtgaaccggctgctgcgctccatggccacccaggccatgagcaatgccctgtacttcagcacaggcagctgtgccgaggaggagttccaccactacggcctggccctggacaagtacacccacttcaccagccccatccgccgctacagcgacatcgtggtgcaccggctgctgatggccgccatcagcaaggacaagaagatggagatcaagggcaacctcttcagcaacaaggacctggaggagctgtgccgccacatcaacaacagaaaccaggccgcccagcacagccagaagcagagcacagagctgttccagtgcatgtacttcaaggacaaggaccctgccacagaggagcgctgcatcagtgatggagtcatctacagcatccgcaccaacggggtgctgctcttcatccccaggtttggcatcaagggggccgcctacctgaagaacaaggatggcctggtgatcagctgtggccctgacagctgcagcgagtggaagccaggcagcctgcagcgcttccagaacaagatcaccagcaccaccacagatggagagagcgtgaccttccacctgtttgaccacgtgacagtgcgcatcagcatccaggccagccgctgccacagcgacaccatccggctggagatcatcagcaacaagccctacaagatccccaacacagagctgatccaccagagcagccccctgctgaagtctgagctggtgaaggaggtgaccaagtctgtggaggaggcccagctggcccaggaggtgaaggtgaacatcatccaggaggagtaccaggagtaccggcagaccaagggccgcagcctgtacaccctgctggaggagatccgggacctggccctgctggatgtgagcaacaactacggcatctag

SEQ ID NO: 150110 - DNA, 762 bp, synthetic construct
  misc_feature 1..762: note = Description of Artificial Sequence: Synthetic coding sequence
  source 1..762: mol_type = other DNA
atggagaagtggcagaccaggagcatctacaatgctgctgtgtggtactaccaccactgccaggacaggatgcccatcgtgatggtgacagaagatgaggaggccatccagcagtatggcagcgagacagaaggagtgtttgtgatcaccttcaagaactacctggacaacttctggccagacctgaaggccgcccacgagctgtgtgacagcatcctgcagagccggcgggagcgggagaatgaaagccaggagagccacggcaaggagtacccagagcacctgcccctggaggtgctggaggccggcatcaagagcggccgctacatccagggcatcctgaatgtgaacaagcaccgggcccagatcgaggcctttgtgcggctgcagggcgccagcagcaaggacagcgacctggtgtctgacatcctgatccacggcatgaaggccaggaacagaagcatccatggagatgtggtggtggtggagctgctgcccaagaatgagtggaagggccgcacagtggccctgtgtgaaaatgactgtgatgacaaggccagcggggagagccccagcgagcccatgcccaccggcctgcagggcggccgggcccaccgcttcctgggcgtgaacatctgtgtgtccaagtggaccttctgtgcctgcttcaggaagaacagaagaagtggccggggcaactgcaaccaccctgggggcaagcagtacttctcctacagcttcctgcggagcagtgatgtgtag

SEQ ID NO: 150111 - DNA, 453 bp, synthetic construct
  misc_feature 1..453: note = Description of Artificial Sequence: Synthetic coding sequence
  source 1..453: mol_type = other DNA
atggagaagtggcagaccaggagcatctacaatgctgctgtgtggtactaccaccactgccaggacaggatgcccatcgtgatggtgacagaagatgaggaggccatccagcagtatggcagcgagacagaaggagtgtttgtgatcaccttcaagaactacctggacaacttctggccagacctgaaggccgcccacgagctgtgtgacagcatcctgcagagccggcgggagcgggagaatgaaagccaggagagccacggcaaggagtacccagagcacctgcccctggaggtgctggaggccggcatcaagagcggccgctacatccagggcatcctgaatgtgaacaagcaccgggcccagatcgaggcctttgtgcggctgcagggcgccagcagcaaggacagcgacctggtgtctgacatcctgatccacggcatgaaggcctag

SEQ ID NO: 150112 - DNA, 174 bp, synthetic construct
  misc_feature 1..174: note = Description of Artificial Sequence: Synthetic coding sequence
  source 1..174: mol_type = other DNA
atgcagacagcctgccaggccgtgcagcaccagaggggccggcggcagtacaacaagctgaggaacctgctgaaggatgcccggcatgactgcatcctgtttgccaatgagttccagcagtgctgctacctgccccgggagcggggggagagcatggagaagtggcagacctag

SEQ ID NO: 150113 - DNA, 294 bp, synthetic construct
  misc_feature 1..294: note = Description of Artificial Sequence: Synthetic coding sequence
  source 1..294: mol_type = other DNA
atgcagacagcctgccaggccgtgcagcaccagaggggccggcggcagtacaacaagctgaggaacctgctgaaggatgcccggcatgactgcatcctgtttgccaatgagttccagcagtgctgctacctgccccgggagcggggggagagcatggagaagtggcagaccaggagcatctacaatgctgctgtgtggtactaccaccactgccaggacaggatgcccatcgtgatggtgacagaagatgaggaggccatccagcagtatggcagcgagacagagggcgtgtag

SEQ ID NO: 150114 - DNA, 312 bp, synthetic construct
  misc_feature 1..312: note = Description of Artificial Sequence: Synthetic coding sequence
  source 1..312: mol_type = other DNA
atgcagacagcctgccaggccgtgcagcaccagaggggccggcggcagtacaacaagctgaggaacctgctgaaggatgcccggcatgactgcatcctgtttgccaatgagttccagcagtgctgctacctgccccgggagcggggggagagcatggagaagtggcagaccaggagcatctacaatgctgctgtgtggtactaccaccactgccaggacaggatgcccatcgtgatggtgacagaagatgaggaggccatccagcagtatggcagcgagacagagggcgtgtttgtgatcaccttcaagtag

SEQ ID NO: 150115 - DNA, 1812 bp, synthetic construct
  misc_feature 1..1812: note = Description of Artificial Sequence: Synthetic coding sequence
  source 1..1812: mol_type = other DNA
atgagccacccagactacaggatgaacctgcggcccctgggcaccccccggggcgtgtctgctgtggccggcccccatgacatcggggccagccctggggacaagaagagcaagaacagaagcacccggggcaagaagaagagcatctttgagacctacatgagcaaagaagatgtgtctgagggcctgaagaggggcaccctcatccagggcgtgctgcgcatcaaccccaagaagttccacgaggccttcatccccagcccagatggagaccgggacatcttcattgatggagtggtggccaggaacagagccctgaatggagacctggtggtggtgaagctgctgcctgaggagcactggaaggtggtgaagccagagagcaatgacaaggagacagaagctgcctatgaaagtgacatccctgaggagctgtgtggccaccacctgccccagcagagcctgaagagctacaatgacagcccagatgtgattgtggaggcccagtttgatggcagtgacagtgaagatggccacggcatcacccagaatgtgctggtggatggagtgaagaagctgtctgtgtgtgtgtctgagaagggcagagaagatggagatgcccctgtgaccaaggatgagaccacctgcatcagccaggacacccgggccctgtctgagaagagcctgcagaggtctgccaaggtggtgtacatcctggagaagaagcacagccgggccgccaccggcttcctgaagctgctggccgacaagaacagcgagctgttcagaaaatatgccctcttcagccccagcgaccaccgggtgccccgcatctacgtgcccctgaaggactgcccccaggactttgtggcccggcccaaggactatgccaacaccctcttcatctgcagaattgtggactggaaggaggactgcaactttgccctgggccagctggccaagagcctgggccaggccggggagattgagcctgagacagagggcatcctgacagaatatggagtggacttcagtgacttcagcagcgaggtgctggagtgcctgccccagggcctgccctggaccatccccccagaggagttcagcaagagaagagacctgaggaaggactgcatcttcaccatcgaccccagcacagcccgggacctggatgatgccctgagctgcaagcccctggctgatggcaacttcaaggtgggcgtgcacatcgcagatgtgtcctactttgtgcctgagggcagtgacctggacaaggtggccgctgagcgggccacctctgtgtacctggtgcagaaggtggtgcccatgctgccccggctgctgtgtgaggagctgtgcagcctgaaccccatgtctgacaagctgaccttcagcgtcatctggaccctgaccccagagggcaagatcctggatgagtggtttggaagaaccatcatccgcagctgcaccaagctgtcctatgagcacgcccagagcatgattgagagccccacagagaagatcccagccaaggagctgccccccatcagccctgagcacagcagcgaggaggtgcaccagcagaatgctgacaaggatggagctgcccacctgcaggccagccacagccccagcgcagaagatgctgaggcccagcccagcacagaggagcggctgcctgagacccggggcatctgtgaccgggaccctgacaccaggctcttcttcctgcagcagcagagccgggtgctggaggccaagccccagaacaccatccgggtggaggagcagaccacccagctgcagatctag

SEQ ID NO: 150116 - DNA, 2658 bp, synthetic construct
  misc_feature 1..2658: note = Description of Artificial Sequence: Synthetic coding sequence
  source 1..2658: mol_type = other DNA
atgagccacccagactacaggatgaacctgcggcccctgggcaccccccggggcgtgtctgctgtggccggcccccatgacatcggggccagccctggggacaagaagagcaagaacagaagcacccggggcaagaagaagagcatctttgagacctacatgagcaaagaagatgtgtctgagggcctgaagaggggcaccctcatccagggcgtgctgcgcatcaaccccaagaagttccacgaggccttcatccccagcccagatggagaccgggacatcttcattgatggagtggtggccaggaacagagccctgaatggagacctggtggtggtgaagctgctgcctgaggagcactggaaggtggtgaagccagagagcaatgacaaggagacagaagctgcctatgaaagtgacatccctgaggagctgtgtggccaccacctgccccagcagagcctgaagagctacaatgacagcccagatgtgattgtggaggcccagtttgatggcagtgacagtgaagatggccacggcatcacccagaatgtgctggtggatggagtgaagaagctgtctgtgtgtgtgtctgagaagggcagagaagatggagatgcccctgtgaccaaggatgagaccacctgcatcagccaggacacccgggccctgtctgagaagagcctgcagaggtctgccaaggtggtgtacatcctggagaagaagcacagccgggccgccaccggcttcctgaagctgctggccgacaagaacagcgagctgttcagaaaatatgccctcttcagccccagcgaccaccgggtgccccgcatctacgtgcccctgaaggactgcccccaggactttgtggcccggcccaaggactatgccaacaccctcttcatctgcagaattgtggactggaaggaggactgcaactttgccctgggccagctggccaagagcctgggccaggccggggagattgagcctgagacagagggcatcctgacagaatatggagtggacttcagtgacttcagcagcgaggtgctggagtgcctgccccagggcctgccctggaccatccccccagaggagttcagcaagagaagagacctgaggaaggactgcatcttcaccatcgaccccagcacagcccgggacctggatgatgccctgagctgcaagcccctggctgatggcaacttcaaggtgggcgtgcacatcgcagatgtgtcctactttgtgcctgagggcagtgacctggacaaggtggccgctgagcgggccacctctgtgtacctggtgcagaaggtggtgcccatgctgccccggctgctgtgtgaggagctgtgcagcctgaaccccatgtctgacaagctgaccttcagcgtcatctggaccctgaccccagagggcaagatcctggatgagtggtttggaagaaccatcatccgcagctgcaccaagctgtcctatgagcacgcccagagcatgattgagagccccacagagaagatcccagccaaggagctgccccccatcagccctgagcacagcagcgaggaggtgcaccaggccgtgctgaacctgcatggaattgccaagcagctgcggcagcagagatttgtggatggagccctgcggctggaccagctgaagctggccttcaccctggaccacgagaccggcctgccccagggctgccacatctatgagtaccgggagagcaacaagctggtggaggagttcatgctgctggccaacatggctgtggcccacaagatccaccgggccttccctgagcaggccctgctgcggcggcaccccccaccccagaccaggatgctgagtgacctggtggagttctgtgaccagatgggcctgcctgtggacttcagcagcgctggggccctgaacaagagcctgacccagacctttggagatgacaagtacagcctggccaggaaggaggtgctgaccaacatgtgcagccggcccatgcagatggccctgtacttctgcagcggcctgctgcaggaccctgcccagttccgccactacgccctgaatgtgcccctgtacacccacttcaccagccccatccgccgctttgctgatgtgctggtgcaccggctgctggccgccgccctgggctaccgggagcggctggacatggccccagacaccctgcagaagcaggccgaccactgcaatgacaggaggatggccagcaagagggtgcaggagctgagcaccagcctcttctttgctgtgctggtgaaggagagcggccccctggagagcgaggccatggtgatgggcatcctgaagcaggcctttgatgtgctggtgctgcgctatggagtgcagaagaggatctactgcaatgccctggccctgcggagccaccacttccagaaggtgggcaagaagccagagctgaccctggtgtgggagcctgaggacatggagcaggagcccgcccagcaggtgatcaccatcttcagcctggtggaggtggtgctgcaggccgagagcacagccctgaagtacagcgccatcctgaagaggcctggcacccagggccacctgggccctgagaaggaggaggaggagagtgatggagagcctgaggacagcagcaccagctag

SEQ ID NO: 150117 - DNA, 1071 bp, synthetic construct
  misc_feature 1..1071: note = Description of Artificial Sequence: Synthetic coding sequence
  source 1..1071: mol_type = other DNA
atgagccacccagactacaggatgaacctgcggcccctgggcaccccccggggcgtgtctgctgtggccggcccccatgacatcggggccagccctggggacaagaagagcaagaacagaagcacccggggcaagaagaagagcatctttgagacctacatgagcaaagaagatgtgtctgagggcctgaagaggggcaccctcatccagggcgtgctgcgcatcaaccccaagaagttccacgaggccttcatccccagcccagatggagaccgggacatcttcattgatggagtggtggccaggaacagagccctgaatggagacctggtggtggtgaagctgctgcctgaggagcactggaaggtggtgaagccagagagcaatgacaaggagacagaagctgcctatgaaagtgacatccctgaggagctgtgtggccaccacctgccccagcagagcctgaagagctacaatgacagcccagatgtgattgtggaggcccagtttgatggcagtgacagtgaagatggccacggcatcacccagaatgtgctggtggatggagtgaagaagctgtctgtgtgtgtgtctgagaaggacaatgaaattgaggcccagaggagctcctgggcctaccctgtgagccacaggaagtctgaggagaggatggtgatgcaccggctgcagaagatgaggcccccagccttccacaagacccaggagctgtacagaagaaacccctgcaaggaccagcagcgctggttcacctcctggaggaagaacatcctggagcagcagcctgccagcagcaacagctggctgatcagaacagccaactgcctgggcaacaccccctgcttcctgccccagaccacagagtgcctggagttcatgtgcctgagcaggacagtgcccaggaccctgtggcacggcctgaagatcatgcccacccactgcagcagcgctgccctgtggacaggaagaagaacagccatcctgccctggggctcctggctgcgggtgctgggccgcctggtgaagctgagcctgaagcagaaggagtactag

SEQ ID NO: 150118 - DNA, 2658 bp, synthetic construct; identical to SEQ ID NO: 150116
  misc_feature 1..2658: note = Description of Artificial Sequence: Synthetic coding sequence
  source 1..2658: mol_type = other DNA

SEQ ID NO: 150119 - DNA, 750 bp, synthetic construct
  misc_feature 1..750: note = Description of Artificial Sequence: Synthetic coding sequence
  source 1..750: mol_type = other DNA
atgagccacccagactacaggatgaacctgcggcccctgggcaccccccggggcgtgtctgctgtggccggcccccatgacatcggggccagccctggggacaagaagagcaagaacagaagcacccggggcaagaagaagagcatctttgagacctacatgagcaaagaagatgtgtctgagggcctgaagaggggcaccctcatccagggcgtgctgcgcatcaaccccaagaagttccacgaggccttcatccccagcccagatggagaccgggacatcttcattgatggagtggtggccaggaacagagccctgaatggagacctggtggtggtgaagctgctgcctgaggagcactggaaggtggtgaagccagagagcaatgacaaggagacagaagctgcctatgaaagtgacatccctgaggagctgtgtggccaccacctgccccagcagagcctgaagagctacaatgacagcccagatgtgattgtggaggcccagtttgatggcagtgacagtgaagatggccacggcatcacccagaatgtgctggtggatggagtgaagaagctgtctgtgtgtgtgtctgagaagggcagagaagatggagatgcccctgtgaccaaggatgagaccacctgcatcagccaggacacccgggccctgtctgagaagagcctgcagaggtctgccaaggtgattgcctaccgcttcagcccccgggtgcagatggccttcacctag

SEQ ID NO: 150120 - DNA, 2028 bp, synthetic construct
  misc_feature 1..2028: note = Description of Artificial Sequence: Synthetic coding sequence
  source 1..2028: mol_type = other DNA
atgagccacccagactacaggatgaacctgcggcccctgggcaccccccggggcgtgtctgctgtggccggcccccatgacatcggggccagccctggggacaagaagagcaagaacagaagcacccggggcaagaagaagagcatctttgagacctacatgagcaaagaagatgtgtctgagggcctgaagaggggcaccctcatccagggcgtgctgcgcatcaaccccaagaagttccacgaggccttcatccccagcccagatggagaccgggacatcttcattgatggagtggtggccaggaacagagccctgaatggagacctggtggtggtgaagctgctgcctgaggagcactggaaggtggtgaagccagagagcaatgacaaggagacagaagctgcctatgaaagtgacatccctgaggagctgtgtggccaccacctgccccagcagagcctgaagagctacaatgacagcccagatgtgattgtggaggcccagtttgatggcagtgacagtgaagatggccacggcatcacccagaatgtgctggtggatggagtgaagaagctgtctgtgtgtgtgtctgagaagggcagagaagatggagatgcccctgtgaccaaggatgagaccacctgcatcagccaggacacccgggccctgtctgagaagagcctgcagaggtctgccaaggtggtgtacatcctggagaagaagcacagccgggccgccaccggcttcctgaagctgctggccgacaagaacagcgagctgttcagaaaatatgccctcttcagccccagcgaccaccgggtgccccgcatctacgtgcccctgaaggactgcccccaggactttgtggcccggcccaaggactatgccaacaccctcttcatctgcagaattgtggactggaaggaggactgcaactttgccctgggccagctggccaagagcctgggccaggccggggagattgagcctgagacagagggcatcctgacagaatatggagtggacttcagtgacttcagcagcgaggtgctggagtgcctgccccagggcctgccctggaccatccccccagaggagttcagcaagagaagagacctgaggaaggactgcatcttcaccatcgaccccagcacagcccgggacctggatgatgccctgagctgcaagcccctggctgatggcaacttcaaggtgggcgtgcacatcgcagatgtgtcctactttgtgcctgagggcagtgacctggacaaggtggccgctgagcgggccacctctgtgtacctggtgcagaaggtggtgcccatgctgccccggctgctgtgtgaggagctgtgcagcctgaaccccatgtctgacaagctgaccttcagcgtcatctggaccctgaccccagagggcaagatcctggatgagtggtttggaagaaccatcatccgcagctgcaccaagctgtcctatgagcacgcccagagcatgattgagagccccacagagaagatcccagccaaggagctgccccccatcagccctgagcacagcagcgaggaggtgcaccaggccgtgctgaacctgcatggaattgccaagcagctgcggcagcagagatttgtggatggagccctgcggctggaccagctgaagctggccttcaccctggaccacgagaccggcctgccccagggctgccacatctatgagtaccgggagagcaacaagctggtggaggagttcatgctgctggccaacatggctgtggcccacaagatccaccgggccttccctgagcaggccctgctgcggcggcaccccccaccccagaccaggatgctgagtgacctggtggagttctgtgaccagatgggcctgcctgtggacttcagcagcgctggggccctgaacaagagcctgacccagacctttggagatgacaagtacagcctggccaggaaggaggtgctgaccaacatgtgcagccggctgcctgtgcccccccactggctgtag

SEQ ID NO: 150121 - DNA, 435 bp, synthetic construct
  misc_feature 1..435: note = Description of Artificial Sequence: Synthetic coding sequence
  source 1..435: mol_type = other DNA
atgagccacccagactacaggatgaacctgcggcccctgggcaccccccggggcgtgtctgctgtggccggcccccatgacatcggggccagccctggggacaagaagagcaagaacagaagcacccggggcaagaagaagagcatctttgagacctacatgagcaaagaagatgtgtctgagggcctgaagaggggcaccctcatccagggcgtgctgcgcatcaaccccaagaagttccacgaggccttcatccccagcccagatggagaccgggacatcttcattgatggagtggtggccaggaacagagccctgaatggagacctggtggtggtgaagctgctgcctgaggagcactggaaggtggtgaagccagagagcaatgacaaggagacagaagctgcctatgaaagtgacatccctgaggagtag

SEQ ID NO: 150122 - DNA, 1860 bp, synthetic construct
  misc_feature 1..1860: note = Description of Artificial Sequence: Synthetic coding sequence
  source 1..1860: mol_type = other DNA
atgagccacccagactacaggatgaacctgcggcccctgggcaccccccggggcgtgtctgctgtggccggcccccatgacatcggggccagccctggggacaagaagagcaagaacagaagcacccggggcaagaagaagagcatctttgagacctacatgagcaaagaagatgtgtctgagggcctgaagaggggcaccctcatccagggcgtgctgcgcatcaaccccaagaagttccacgaggccttcatccccagcccagatggagaccgggacatcttcattgatggagtggtggccaggaacagagccctgaatggagacctggtggtggtgaagctgctgcctgaggagcactggaaggtggtgaagccagagagcaatgacaaggagacagaagctgcctatgaaagtgacatccctgaggagctgtgtggccaccacctgccccagcagagcctgaagagctacaatgacagcccagatgtgattgtggaggcccagtttgatggcagtgacagtgaagatggccacggcatcacccagaatgtgctggtggatggagtgaagaagctgtctgtgtgtgtgtctgagaagggcagagaagatggagatgcccctgtgaccaaggatgagaccacctgcatcagccaggacacccgggccctgtctgagaagagcctgcagaggtctgccaaggtggtgtacatcctggagaagaagcacagccgggccgccaccggcttcctgaagctgctggccgacaagaacagcgagctgttcagaaaatatgccctcttcagccccagcgaccaccgggtgccccgcatctacgtgcccctgaaggactgcccccaggactttgtggcccggcccaaggactatgccaacaccctcttcatctgcagaattgtggactggaaggaggactgcaactttgccctgggccagctggccaagagcctgggccaggccggggagattgagcctgagacagagggcatcctgacagaatatggagtggacttcagtgacttcagcagcgaggtgctggagtgcctgccccagggcctgccctggaccatccccccagaggagttcagcaagagaagagacctgaggaaggactgcatcttcaccatcgaccccagcacagcccgggacctggatgatgccctgagctgcaagcccctggctgatggcaacttcaaggtgggcgtgcacatcgcagatgtgtcctactttgtgcctgagggcagtgacctggacaaggtggccgctgagcgggccacctctgtgtacctggtgcagaaggtggtgcccatgctgccccggctgctgtgtgaggagctgtgcagcctgaaccccatgtctgacaagctgaccttcagcgtcatctggaccctgaccccagagggcaagatcctggatgagtggtttggaagaaccatcatccgcagctgcaccaagctgtcctatgagcacgcccagagcatgattgagagccccacagagaagatcccagccaaggagctgccccccatcagccctgagcacagcagcgaggaggtgcaccaggccgtgctgaacctgcatggaattgccaagcagctgcggcagcagagatttgtggatggagccctgcggctggaccagctgaagctggccttcaccctggaccacgagaccggcctgccccagggctgccacatctatgagtaccgggagagcaacaagccctgctgtgccggcaccccccggcccaagcagggctgcagcgtgacctggtggaacagcgccacccgctggggctgcccctggaccagcgccccccaggagcccagcatgaaggcctag

SEQ ID NO: 150123 - DNA, 615 bp, synthetic construct
  misc_feature 1..615: note = Description of Artificial Sequence: Synthetic coding sequence
  source 1..615: mol_type = other DNA
atgagcacagaaacagagctgcaggtggccgtgaagaccagcgccaagaaggacagcaggaagaagggccaggacagaagtgaggccaccctcatcaagcgcttcaagggggagggcgtgcgctacaaggccaagctgattggaattgatgaggtgtctgctgcccggggggacaagctgtgccaggacagcatgatgaagctgaagggcgtggtggccggggcccggagcaagggggagcacaagcagaagatcttcctgaccatcagctttggaggcatcaagatctttgatgagaagacaggagccctgcagcaccaccacgctgtgcatgagatctcctacatcgccaaggacatcacagaccaccgggccttcggctacgtgtgtgggaaggagggcaaccacagatttgtggccatcaagacagcccaggccgctgagcctgtgatcctggacctgcgggacctcttccagctgatctatgagctgaagcagcgggaggagctggagaagaaggcccagaaggacaagcagtgtgagcaggccgtgtaccaggtgcccaccagccagaagaaggagggcgtgtatgatgtgcccaagagccagccctag

SEQ ID NO: 150124 - DNA, 642 bp, synthetic construct
  misc_feature 1..642: note = Description of Artificial Sequence: Synthetic coding sequence
  source 1..642: mol_type = other DNA
atgagcacagaaacagagctgcaggtggccgtgaagaccagcgccaagaaggacagcaggaagaagggccaggacagaagtgaggccaccctcatcaagcgcttcaagggggagggcgtgcgctacaaggccaagctgattggaattgatgaggtgtctgctgcccggggggacaagctgtgccaggacagcatgatgaagctgaagggcgtggtggccggggcccggagcaagggggagcacaagcagaagatcttcctgaccatcagctttggaggcatcaagatctttgatgagaagacaggagccctgcagcaccaccacgctgtgcatgagatctcctacatcgccaaggacatcacagaccaccgggccttcggctacgtgtgtgggaaggagggcaaccacagatttgtggccatcaagacagcccaggccgctgagcctgtgatcctggacctgcgggacctcttccagctgatctatgagctgaagcagcgggaggagctggagaagaaggcccagaaggacaagcagtgtgagcaggccgtgtaccagaccatcctggaggaggatgtggaggaccctgtgtaccaggtgatcagcgagaccagccggggcttccgcttcaagagtgactag

SEQ ID NO: 150125 - DNA, 1767 bp, synthetic construct
  misc_feature 1..1767: note = Description of Artificial Sequence: Synthetic coding sequence
  source 1..1767: mol_type = other DNA
atgagcacagaaacagagctgcaggtggccgtgaagaccagcgccaagaaggacagcaggaagaagggccaggacagaagtgaggccaccctcatcaagcgcttcaagggggagggcgtgcgctacaaggccaagctgattggaattgatgaggtgtctgctgcccggggggacaagctgtgccaggacagcatgatgaagctgaagggcgtggtggccggggcccggagcaagggggagcacaagcagaagatcttcctgaccatcagctttggaggcatcaagatctttgatgagaagacaggagccctgcagcaccaccacgctgtgcatgagatctcctacatcgccaaggacatcacagaccaccgggccttcggctacgtgtgtgggaaggagggcaaccacagatttgtggccatcaagacagcccaggccgctgagcctgtgatcctggacctgcgggacctcttccagctgatctatgagctgaagcagcgggaggagctggagaagaaggcccagaaggacaagcagtgtgagcaggccgtgtaccagaccatcctggaggaggatgtggaggaccctgtgtaccagtacatcgtgtttgaagctggccacgagcccatccgggaccctgagacagaggagaacatctaccaggtgcccaccagccagaagaaggagggcgtgtatgatgtgcccaagagccagcctgtgtccaatggctacagctttgaagattttgaggagagatttgctgctgccacccccaacagaaacctgcccacagactttgatgagatctttgaggccaccaaggctgtgacccagctggagctgtttggagacatgagcaccccaccagacatcaccagcccccccaccccagccaccccaggagatgccttcatccccagcagcagccagaccctgcctgccagcgcagatgtgttcagctctgtgcccttcggcacagctgctgtgcccagcggctacgtggccatgggcgctgtgctgcccagcttctggggccagcagcccctggtgcagcagcagatggtgatgggcgcccagccccctgtggcccaggtgatgcctggggcccagcccatcgcctggggccagcccggcctcttccctgccacccagcagccctggcccaccgtggccggccagtttcctcctgctgccttcatgcccacccagacagtgatgcccctgcctgctgccatgttccagggccccctgacccccctggccaccgtgcccggcaccagtgacagcaccaggagcagcccccagacagacaagccccggcagaagatgggcaaggagaccttcaaggacttccagatggcccagcccccacctgtgcccagcaggaagccagaccagcccagcctgacctgcaccagcgaggccttcagcagctacttcaacaaggtgggcgtggcccaggacacagatgactgtgatgactttgacatcagccagctgaacctgacccctgtgaccagcaccacccccagcaccaacagcccccccaccccagccccccggcagagcagccccagcaagagcagcgccagccacgccagtgaccccaccacagatgacatctttgaggagggctttgagagccccagcaagtctgaggagcaggaggccccagatggcagccaggccagcagcaacagcgacccctttggagagcccagcggggagcccagcggggacaacatcagcccccaggccggcagctag

SEQ ID NO: 150126 - DNA, 720 bp, synthetic construct
  misc_feature 1..720: note = Description of Artificial Sequence: Synthetic coding sequence
  source 1..720: mol_type = other DNA
atgagcacagaaacagagctgcaggtggccgtgaagaccagcgccaagaaggacagcaggaagaagggccaggacagaagtgaggccaccctcatcaagcgcttcaagggggagggcgtgcgctacaaggccaagctgattggaattgatgaggtgtctgctgcccggggggacaagctgtgccaggacagcatgatgaagctgaagggcgtggtggccggggcccggagcaagggggagcacaagcagaagatcttcctgaccatcagctttggaggcatcaagatctttgatgagaagacaggagtgcccaccagccagaagaaggagggcgtgtatgatgtgcccaagagccagcctgtgtccaatggctacagctttgaggactttgaggagagatttgctgctgccacccccaacagaaacctgcccacagactttgatgagatctttgaggccaccaaggctgtgacccagctggagctgtttggagacatgagcaccccaccagacatcaccagcccccccaccccagccaccccaggagatgccttcatccccagcagcagccagaccctgcctgccagcgcagatgtgttcagctctgtgccctttggaacagctgctgtgcccagcggctacgtggccatgggcgctgtgctgcccagcttctggggccagcagcccctggtgcagcagcagatggtgatgggcgcctag

SEQ ID NO: 150127 - DNA, 1668 bp, synthetic construct
  misc_feature 1..1668: note = Description of Artificial Sequence: Synthetic coding sequence
  source 1..1668: mol_type = other DNA
atgagcacagaaacagagctgcaggtggccgtgaagaccagcgccaagaaggacagcaggaagaagggccaggacagaagtgaggccaccctcatcaagcgcttcaagggggagggcgtgcgctacaaggccaagctgattggaattgatgaggtgtctgctgcccggggggacaagctgtgccaggacagcatgatgaagctgaagggcgtggtggccggggcccggagcaagggggagcacaagcagaagatcttcctgaccatcagctttggaggcatcaagatctttgatgagaagacaggagccctgcagcaccaccacgctgtgcatgagatctcctacatcgccaaggacatcacagaccaccgggccttcggctacgtgtgtgggaaggagggcaaccacagatttgtggccatcaagacagcccaggccgctgagcctgtgatcctggacctgcgggacctcttccagctgatctatgagctgaagcagcgggaggagctggagaagaaggcccagaaggacaagcagtgtgagcaggccgtgtaccagaccatcctggaggaggatgtggaggaccctgtgtaccagtacatcgtgtttgaagctggccacgagcccatccgggaccctgagacagaggagaacatctaccaggtgcccaccagccagaagaaggagggcgtgtatgatgtgcccaagagccagcctgtgtctgctgtgacccagctggagctgtttggagacatgagcaccccaccagacatcaccagcccccccaccccagccaccccaggagatgccttcatccccagcagcagccagaccctgcctgccagcgcagatgtgttcagctctgtgccctttggaacagctgctgtgcccagcggctacgtggccatgggcgctgtgctgcccagcttctggggccagcagcccctggtgcagcagcagatggtgatgggcgcccagccccctgtggcccaggtgatgcctggggcccagcccatcgcctggggccagcccggcctcttccctgccacccagcagccctggcccaccgtggccggccagttccccccagctgccttcatgcccacccagacagtgatgcccctgcctgctgccatgttccagggccccctgacccccctggccaccgtgcccggcaccagtgacagcaccaggagcagcccccagacagacaagccccggcagaagatgggcaaggagaccttcaaggacttccagatggcccagcccccacctgtgcccagcaggaagccagaccagcccagcctgacctgcaccagcgaggccttcagcagctacttcaacaaggtgggcgtggcccaggacacagatgactgtgatgactttgacatcagccagctgaacctgacccctgtgaccagcaccacccccagcaccaacagcccccccaccccagccccccggcagagcagccccagcaagagcagcgccagccacgccagtgaccccaccacagatgacatctttgaggagggctttgagagccccagcaagtctgaggagcaggaggccccagatggcagccaggccagcagcaacagcgacccctttggagagcccagcggggagcccagcggggacaacatcagcccccaggccggcagctag

SEQ ID NO: 150128 - DNA, 1668 bp, synthetic construct; identical to SEQ ID NO: 150127
  misc_feature 1..1668: note = Description of Artificial Sequence: Synthetic coding sequence
  source 1..1668: mol_type = other DNA

SEQ ID NO: 150129 - DNA, 1668 bp, synthetic construct; identical to SEQ ID NO: 150127
  misc_feature 1..1668: note = Description of Artificial Sequence: Synthetic coding sequence
  source 1..1668: mol_type = other DNA

SEQ ID NO: 150130 - DNA, 1614 bp, synthetic construct
  misc_feature 1..1614: note = Description of Artificial Sequence: Synthetic coding sequence
  source 1..1614: mol_type = other DNA
atgagcacagaaacagagctgcaggtggccgtgaagaccagcgccaagaaggacagcaggaagaagggccaggacagaagtgaggccaccctcatcaagcgcttcaagggggagggcgtgcgctacaaggccaagctgattggaattgatgaggtgtctgctgcccggggggacaagctgtgccaggacagcatgatgaagctgaagggcgtggtggccggggcccggagcaagggggagcacaagcagaagatcttcctgaccatcagctttggaggcatcaagatctttgatgagaagacaggagccctgcagcaccaccacgctgtgcatgagatctcctacatcgccaaggacatcacagaccaccgggccttcggctacgtgtgtgggaaggagggcaaccacagatttgtggccatcaagacagcccaggccgctgagcctgtgatcctggacctgcgggacctcttccagctgatctatgagctgaagcagcgggaggagctggagaagaaggcccagaaggacaagcagtgtgagcaggccgtgtaccaggtgcccaccagccagaagaaggagggcgtgtatgatgtgcccaagagccagcctgtgtccaatggctacagctttgaggactttgaggagagatttgctgctgccaccccagctgtgacccagctggagctgtttggagacatgagcaccccaccagacatcaccagcccccccaccccagccaccccaggagatgccttcatccccagcagcagccagaccctgcctgccagcgcagatgtgttcagctctgtgccctttggaacagctgctgtgcccagcggctacgtggccatgggcgctgtgctgcccagcttctggggccagcagcccctggtgcagcagcagatggtgatgggcgcccagccccctgtggcccaggtgatgcctggggcccagcccatcgcctggggccagcccggcctcttccctgccacccagcagccctggcccaccgtggccggccagttccccccagctgccttcatgcccacccagacagtgatgcccctgcctgctgccatgttccagggccccctgacccccctggccaccgtgcccggcaccagtgacagcaccaggagcagcccccagacagacaagccccggcagaagatgggcaaggagaccttcaaggacttccagatggcccagcccccacctgtgcccagcaggaagccagaccagcccagcctgacctgcaccagcgaggccttcagcagctacttcaacaaggtgggcgtggcccaggacacagatgactgtgatgactttgacatcagccagctgaacctgacccctgtgaccagcaccacccccagcaccaacagcccccccaccccagccccccggcagagcagccccagcaagagcagcgccagccacgccagtgaccccaccacagatgacatctttgaggagggctttgagagccccagcaagtctgaggagcaggaggccccagatggcagccaggccagcagcaacagcgacccctttggagagcccagcggggagcccagcggggacaacatcagcccccaggccggcagctag

SEQ ID NO: 150131 - DNA, 1662 bp, synthetic construct
  misc_feature 1..1662: note = Description of Artificial Sequence: Synthetic coding sequence
  source 1..1662: mol_type = other DNA
atgagcacagaaacagagctgcaggtggccgtgaagaccagcgccaagaaggacagcaggaagaagggccaggacagaagtgaggccaccctcatcaagcgcttcaagggggagggcgtgcgctacaaggccaagctgattggaattgatgaggtgtctgctgcccggggggacaagctgtgccaggacagcatgatgaagctgaagggcgtggtggccggggcccggagcaagggggagcacaagcagaagatcttcctgaccatcagctttggaggcatcaagatctttgatgagaagacaggagccctgcagcaccaccacgctgtgcatgagatctcctacatcgccaaggacatcacagaccaccgggccttcggctacgtgtgtgggaaggagggcaaccacagatttgtggccatcaagacagcccaggccgctgagcctgtgatcctggacctgcgggacctcttccagctgatctatgagctgaagcagcgggaggagctggagaagaaggcccagaaggacaagcagtgtgagcaggccgtgtaccaggtgcccaccagccagaagaaggagggcgtgtatgatgtgcccaagagccagcctgtgtccaatggctacagctttgaggactttgaggagagatttgctgctgccacccccaacagaaacctgcccacagactttgatgagatctttgaggccaccaaggctgtgacccagctggagctgtttggagacatgagcaccccaccagacatcaccagcccccccaccccagccaccccaggagatgccttcatccccagcagcagccagaccctgcctgccagcgcagatgtgttcagctctgtgccctttggaacagctgctgtgcccagcggctacgtggccatgggcgctgtgctgcccagcttctggggccagcagcccctggtgcagcagcagatggtgatgggcgcccagccccctgtggcccaggtgatgcctggggcccagcccatcgcctggggccagcccggcctcttccctgccacccagcagccctggcccaccgtggccggccagttccccccagctgccttcatgcccacccagacagtgatgcccctgcctgctgccatgttccagggccccctgacccccctggccaccgtgcccggcaccagtgacagcaccaggagcagcccccagacagacaagccccggcagaagatgggcaaggagaccttcaaggacttccagatggcccagcccccacctgtgcccagcaggaagccagaccagcccagcctgacctgcaccagcgaggccttcagcagctacttcaacaaggtgggcgtggcccaggacacagatgactgtgatgactttgacatcagccagctgaacctgacccctgtgaccagcaccacccccagcaccaacagcccccccaccccagccccccggcagagcagccccagcaagagcagcgccagccacgccagtgaccccaccacagatgacatctttgaggagggctttgagagccccagcaagtctgaggagcaggaggccccagatggcagccaggccagcagcaacagcgacccctttggagagcccagcggggagcccagcggggacaacatcagcccccaggccggcagctag

SEQ ID NO: 150132 - DNA, 1410 bp, synthetic construct
  misc_feature 1..1410: note = Description of Artificial Sequence: Synthetic coding sequence
  source 1..1410: mol_type = other DNA
atgagcacagaaacagagctgcaggtggccgtgaagaccagcgccaagaaggacagcaggaagaagggccaggacagaagtgaggccaccctcatcaagcgcttcaagggggagggcgtgcgctacaaggccaagctgattggaattgatgaggtgtctgctgcccggggggacaagctgtgccaggacagcatgatgaagctgaagggcgtggtggccggggcccggagcaagggggagcacaagcagaagatcttcctgaccatcagctttggaggcatcaagatctttgatgagaagacaggagtgcccaccagccagaagaaggagggcgtgtatgatgtgcccaagagccagcctgtgtccaatggctacagctttgaggactttgaggagagatttgctgctgccacccccaacagaaacctgcccacagactttgatgagatctttgaggccaccaaggctgtgacccagctggagctgtttggagacatgagcaccccaccagacatcaccagcccccccaccccagccaccccaggagatgccttcatccccagcagcagccagaccctgcctgccagcgcagatgtgttcagctctgtgccctttggaacagctgctgtgcccagcggctacgtggccatgggcgctgtgctgcccagcttctggggccagcagcccctggtgcagcagcagatggtgatgggcgcccagccccctgtggcccaggtgatgcctggggcccagcccatcgcctggggccagcccggcctcttccctgccacccagcagccctggcccaccgtggccggccagttccccccagctgccttcatgcccacccagacagtgatgcccctgcctgctgccatgttccagggccccctgacccccctggccaccgtgcccggcaccagtgacagcaccaggagcagcccccagacagacaagccccggcagaagatgggcaaggagaccttcaaggacttccagatggcccagcccccacctgtgcccagcaggaagccagaccagcccagcctgacctgcaccagcgaggccttcagcagctacttcaacaaggtgggcgtggcccaggacacagatgactgtgatgactttgacatcagccagctgaacctgacccctgtgaccagcaccacccccagcaccaacagcccccccaccccagccccccggcagagcagccccagcaagagcagcgccagccacgccagtgaccccaccacagatgacatctttgaggagggctttgagagccccagcaagtctgaggagcaggaggccccagatggcagccaggccagcagcaacagcgacccctttggagagcccagcggggagcccagcggggacaacatcagcccccaggccggcagctag

SEQ ID NO: 150133 - DNA, 2313 bp, synthetic construct
  misc_feature 1..2313: note = Description of Artificial Sequence: Synthetic coding sequence
  source 1..2313: mol_type = other DNA
atgagcaatgaggtggagaccagcgccaccaacggccagcctgaccagcaggccgcccccaaggcccccagcaagaaggagaagaagaagggccctgagaagacagatgagtacctgctggcccgcttcaagggagatggagtgaagtacaaggccaagctgattggaattgatgatgtgcctgatgcccggggggacaagatgagccaggacagcatgatgaagctgaagggcatggctgctgctggccgcagccagggccagcacaagcagaggatctgggtgaacatcagcctgagcggcatcaagatcattgatgagaagacaggagtcatcgagcacgagcaccctgtgaacaagatctccttcatcgccagagatgtgacagacaacagagccttcggctacgtgtgtggcggggagggccagcaccagttctttgccatcaagacaggccagcaggccgagcccctggtggtggacctgaaggacctcttccaggtgatctacaacgtgaagaagaaggaggaggagaagaagaagattgaggaggccagcaaggctgtggagaatggaagtgaggccctgatgatcctggatgaccagaccaacaagctgaagagcggcgtggaccagatggacctgtttggagacatgagcaccccaccagacctgaacagccccacagagagcaaggacatcctgctggtggacctgaacagcgagattgacaccaaccagaacagcctgcgggagaaccccttcctgaccaacggcatcaccagctgcagcctgccccggcccaccccccaggccagcttcctgcctgaaaatgccttcagcgccaacctgaacttcttccccacccccaacccagaccccttcagagatgaccccttcacccagcctgaccagagcacccccagcagctttgacagcctgaagagcccagaccagaagaaggagaacagcagcagcagcagcacccccctgagcaatggccccctgaatggagatgtggactacttcggccagcagtttgaccagatcagcaacagaacaggcaagcaggaggcccaggccggcccctggcccttcagcagcagccagacccagcctgctgtgaggacccagaatggagtgtctgagcgggagcagaatggcttctctgtgaagagcagccccaacccctttgtgggcagcccccccaagggcctgagcatccagaatggagtgaagcaggacctggagagctctgtgcagagcagcccccatgacagcatcgccatcatccccccaccccagagcaccaagccaggccggggcagaagaacagccaagagcagcgccaatgacctgctggccagtgacatctttgcccctcctgtgtctgagcccagcggccaggccagccccaccggccagcccacagccctgcagcccaaccccctggacctcttcaagaccagcgccccagcccctgtgggccccctggtgggcctgggcggcgtgacagtgaccctgccccaggccggcccctggaacacagccagcctggtgttcaaccagagccccagcatggcccctggggccatgatgggcggccagcccagcggcttcagccagcctgtgatcttcggcaccagccctgctgtgtctggctggaaccagcccagcccctttgctgccagcaccccacctcctgtgcctgtggtgtggggccccagcgcctctgtggccccaaatgcctggagcaccaccagccccctgggcaaccccttccagagcaacatcttccctgccccagctgtgtccacccagccccccagcatgcacagcagcctgctggtgaccccaccccagcccccaccccgggccggcccccccaaggacatcagcagtgatgccttcaccgccctggaccccctgggggacaaggagatcaaggatgtgaaggagatgttcaaggacttccagctgcggcagcccccagctgtgcctgccaggaagggggagcagaccagcagcggcaccctgagcgcctttgccagctacttcaacagcaaggtgggcatcccccaggagaatgctgaccatgatgactttgatgccaaccagctgctgaacaagatcaatgagccccccaagccagccccccggcaggtgtccctgcctgtgaccaagagcacagacaatgcctttgagaaccccttcttcaaggacagctttggcagcagccaggcctctgtggccagcagccagcctgtgagcagcgagatgtacagagacccctttggaaacccctttgcctag

SEQ ID NO: 150134 - DNA, 1659 bp, synthetic construct
  misc_feature 1..1659: note = Description of Artificial Sequence: Synthetic coding sequence
  source 1..1659: mol_type = other DNA
atgagcaatgaggtggagaccagcgccaccaacggccagcctgaccagcaggccgcccccaaggcccccagcaagaaggagaagaagaagggccctgagaagacagatgagtacctgctggcccgcttcaagggagatggagtgaagtacaaggccaagctgattggaattgatgatgtgcctgatgcccggggggacaagatgagccaggacagcatgatgaagctgaagggcatggctgctgctggccgcagccagggccagcacaagcagaggatctgggtgaacatcagcctgagcggcatcaagatcattgatgagaagacaggagtcatcgagcacgagcaccctgtgaacaagatctccttcatcgccagagatgtgacagacaacagagccttcggctacgtgtgtggcggggagggccagcaccagttctttgccatcaagacaggccagcaggccgagcccctggtggtggacctgaaggacctcttccaggtgatctacaacgtgaagaagaaggaggaggagaagaagaagattgaggaggccagcaaggctgtggagaatggaagtgaggccctgatgatcctggatgaccagaccaacaagctgaagagcggcgtggaccagatggacctgtttggagacatgagcaccccaccagacctgaacagccccaccagcagcgccaatgacctgctggccagtgacatctttgcccctcctgtgtctgagcccagcggccaggccagccccaccggccagcccacagccctgcagcccaaccccctggacctcttcaagaccagcgccccagcccctgtgggccccctggtgggcctgggcggcgtgacagtgaccctgccccaggccggcccctggaacacagccagcctggtgttcaaccagagccccagcatggcccctggggccatgatgggcggccagcccagcggcttcagccagcctgtgatcttcggcaccagccctgctgtgtctggctggaaccagcccagcccctttgctgccagcaccccacctcctgtgcctgtggtgtggggccccagcgcctctgtggccccaaatgcctggagcaccaccagccccctgggcaaccccttccagagcaacatcttccctgccccagctgtgtccacccagccccccagcatgcacagcagcctgctggtgaccccaccccagcccccaccccgggccggcccccccaaggacatcagcagtgatgccttcaccgccctggaccccctgggggacaaggagatcaaggatgtgaaggagatgttcaaggacttccagctgcggcagcccccagctgtgcctgccaggaagggggagcagaccagcagcggcaccctgagcgcctttgccagctacttcaacagcaaggtgggcatcccccaggagaatgctgaccatgatgactttgatgccaaccagctgctgaacaagatcaatgagccccccaagccagccccccggcaggtgtccctgcctgtgaccaagagcacagacaatgcctttgagaaccccttcttcaaggacagctttggcagcagccaggcctctgtggccagcagccagcctgtgagcagcgagatgtacagagacccctttggaaacccctttgcctag

SEQ ID NO: 150135 - DNA, 204 bp, synthetic construct
  misc_feature 1..204: note = Description of Artificial Sequence: Synthetic coding sequence
  source 1..204: mol_type = other DNA
atgagcaatgaggtggagaccagcgccaccaacggccagcctgaccagcaggccgcccccaaggcccccagcaagaaggagaagaagaagggccctgagaagacagatgagtacctgctggcccgcttcaagggagatggagtgaagtacaaggccaagctgattggaattgatgatgtgcctgatgcccggggggacaagtag

SEQ ID NO: 150136 - DNA, 231 bp, synthetic construct
  misc_feature 1..231: note = Description of Artificial Sequence: Synthetic coding sequence
  source 1..231: mol_type = other DNA
atgagcaatgaggtggagaccagcgccaccaacggccagcctgaccagcaggccgcccccaaggcccccagcaagaaggagaagaagaagggccctgagaagacagatgagtacctgctggcccgcttcaagggagatggagtgaagtacaaggccaagctgattggaattgatgatgtgcctgatgcccggggggacaagatgagccaggacagcatgatgaagctgtag

SEQ ID NO: 150137 - DNA, 120 bp, synthetic construct
  misc_feature 1..120: note = Description of Artificial Sequence: Synthetic coding sequence
  source 1..120: mol_type = other DNA
atgagcaatgaggtggagaccagcgccaccaacggccagcctgaccagcaggccgcccccaaggcccccagcaagaaggagaagaagaagggccctgagaagacagatgagtacctgtag

SEQ ID NO: 150138 - DNA, 2250 bp, synthetic construct
  misc_feature 1..2250: note = Description of Artificial Sequence: Synthetic coding sequence
  source 1..2250: mol_type = other DNA
atgagcaatgaggtggagaccagcgccaccaacggccagcctgaccagcaggccgcccccaaggcccccagcaagaaggagaagaagaagggccctgagaagacagatgagtacctgctggcccgcttcaagggagatggagtgaagtacaaggccaagctgattggaattgatgatgtgcctgatgcccggggggacaagatgagccaggacagcatgatgaagctgaagggcatggctgctgctggccgcagccagggccagcacaagcagaggatctgggtgaacatcagcctgagcggcatcaagatcattgatgagaagacaggagtcatcgagcacgagcaccctgtgaacaagatctccttcatcgccagagatgtgacagacaacagagccttcggctacgtgtgtggcggggagggccagcaccagttctttgccatcaagacaggccagcaggccgagcccctggtggtggacctgaaggacctcttccaggtgatctacaacgtgaagaagaaggaggaggagaagaagaagattgaggaggccagcaaggctgtggagaatggaagtgaggccctgatgatcctggatgaccagaccaacaagctgaagtctgagagcaaggacatcctgctggtggacctgaacagcgagattgacaccaaccagaacagcctgcgggagaaccccttcctgaccaacggcatcaccagctgcagcctgccccggcccaccccccaggccagcttcctgcctgaaaatgccttcagcgccaacctgaacttcttccccacccccaacccagaccccttcagagatgaccccttcacccagcctgaccagagcacccccagcagctttgacagcctgaagagcccagaccagaagaaggagaacagcagcagcagcagcacccccctgagcaatggccccctgaatggagatgtggactacttcggccagcagtttgaccagatcagcaacagaacaggcaagcaggaggcccaggccggcccctggcccttcagcagcagccagacccagcctgctgtgaggacccagaatggagtgtctgagcgggagcagaatggcttctctgtgaagagcagccccaacccctttgtgggcagcccccccaagggcctgagcatccagaatggagtgaagcaggacctggagagctctgtgcagagcagcccccatgacagcatcgccatcatccccccaccccagagcaccaagccaggccggggccgcaggacagccaagagcagcgccaatgacctgctggccagtgacatctttgcccctcctgtgtctgagcccagcggccaggccagccccaccggccagcccacagccctgcagcccaaccccctggacctcttcaagaccagcgccccagcccctgtgggccccctggtgggcctgggcggcgtgacagtgaccctgccccaggccggcccctggaacacagccagcctggtgttcaaccagagccccagcatggcccctggggccatgatgggcggccagcccagcggcttcagccagcccgtcatcttcggcaccagccctgctgtgtctggctggaaccagcccagcccctttgctgccagcaccccacctcctgtgcctgtggtgtggggccccagcgcctctgtggccccaaatgcctggagcaccaccagccccctgggcaaccccttccagagcaacatcttccctgccccagctgtgtccacccagcccccatccatgcacagcagcctgctggtgaccccaccccagcccccacccagggctggcccccccaaggacatcagcagtgatgccttcaccgccctggaccccctgggggacaaggagatcaaggatgtgaaggagatgttcaaggacttccagctgcggcagcccccagctgtgcctgccaggaaaggagagcagaccagcagcggcaccctgagcgcctttgccagctacttcaacagcaaggtgggcatcccccaggagaatgctgaccatgatgactttgatgccaaccagctgctgaacaagatcaatgaaccacccaagccagccccccggcaggtgtccctgcctgtgaccaagagcacagacaatgcctttgagaaccccttcttcaaggacagctttggcagcagccaggcctctgtggccagcagccagcctgtgtcctctgagatgtacagagaccccttcggcaacccctttgcctag

SEQ ID NO: 150139 - DNA, 2568 bp, synthetic construct
  misc_feature 1..2568: note = Description of Artificial Sequence: Synthetic coding sequence
  source 1..2568: mol_type = other DNA
atgatcctgatccccaggatgctgctggtgctcttcctgctgctgcccatcctgagcagcgccaaggcccaggtgaacccagccatctgccgctaccccctgggcatgtctgggggccagatcccagatgaggacatcacagccagcagccagtggagcgagagcacagctgccaagtatggccgcctggacagcgaggagggagatggagcctggtgcccagagatccctgtggagccagatgacctgaaggagttcctgcagattgacctgcacaccctgcacttcatcaccctggtgggcacccagggcagacatgctgggggccacggcatcgagtttgcccccatgtacaagatcaactacagcagagatggcacccgctggatctcctggaggaacagacatggcaagcaggtgctggatggcaacagcaacccctatgacatcttcctgaaggacctggagccccccatcgtggccaggtttgtgcgcttcatccctgtgacagaccacagcatgaatgtgtgcatgagggtggagctgtatggctgtgtgtggctggatggcctggtgtcctacaatgccccagctggccagcagtttgtgctgcccggcggcagcatcatctacctgaatgattctgtgtatgatggagctgtgggctacagcatgacagagggcctgggccagctgacagatggagtgtctggcctggatgacttcacccagacccatgagtaccacgtgtggccaggctatgactatgtgggctggagaaatgaaagtgccaccaacggctacatcgagatcatgtttgaatttgaccgcatccggaacttcaccaccatgaaggtgcactgcaacaacatgtttgccaagggcgtgaagatcttcaaggaggtgcagtgctacttccgctctgaggccagcgagtgggagcccaatgccatctccttccccctggtgctggatgatgtgaaccccagcgccaggtttgtgacagtgcccctgcaccacaggatggccagcgccatcaagtgccagtaccactttgctgacacctggatgatgttcagcgagatcaccttccagagtgatgctgccatgtacaacaacagcgaggccctgcccaccagccccatggcccccaccacctatgaccccatgctgaaggtggatgacagcaacacccgcatcctgattggctgcctggtggccatcatcttcatcctgctggccatcatcgtcatcatcctgtggaggcagttctggcagaagatgctggagaaggccagcaggaggatgctggatgatgagatgacagtgtccctgagcctgcccagcgacagctccatgttcaacaacaacagaagcagcagccccagcgagcagggcagcaacagcacctatgaccgcatcttccccctgcggccagactaccaggagcccagccgcctcatcaggaagctgcctgagtttgcccctggagaggaggagagcggctgcagcggcgtggtgaagcctgtgcagcccagcggccctgagggcgtgccccactacgccgaggccgacatcgtgaacctgcagggcgtgactggaggcaacacctacagcgtgcctgctgtgaccatggacctgctgagcggcaaggatgtggccgtggaggagttccccaggaagctgctgaccttcaaggagaagctgggggagggccagtttggagaggtgcacctgtgtgaggtggagggcatggagaagttcaaggacaaggactttgccctggatgtgtctgccaaccagcctgtgctggtggccgtgaagatgctgcgggcagatgccaacaagaatgccagaaatgacttcctgaaggagatcaagatcatgagccggctgaaggaccccaacatcatccacctgctggccgtgtgcatcacagatgaccccctgtgcatgatcacagagtacatggagaatggagacctgaaccagttcctgagcagacatgagccccccaacagcagcagcagtgatgtgaggacagtgtcctacaccaacctgaagttcatggccacccagatcgccagcggcatgaagtacctgagcagcctgaactttgtgcaccgggacctggccaccaggaactgcctggtgggcaagaactacaccatcaagattgctgactttggcatgagcaggaacctgtacagcggggactactaccgcatccagggccgggctgtgctgcccatccgctggatgtcctgggagagcatcctgctgggcaagttcaccacagccagtgatgtgtgggcctttggagtgaccctgtgggagaccttcaccttctgccaggagcagccctacagccagctgagtgatgagcaggtgattgaaaatactggagagttcttccgggaccagggccggcagacctacctgccccagcctgccatctgcccagattctgtgtacaagctgatgctgagctgctggaggcgggacaccaagaaccggcccagcttccaggagatccacctgctgctgctgcagcagggagatgaatag

SEQ ID NO: 150140 - DNA, 2568 bp, synthetic construct; identical to SEQ ID NO: 150139
  misc_feature 1..2568: note = Description of Artificial Sequence: Synthetic coding sequence
  source 1..2568: mol_type = other DNA

SEQ ID NO: 150141 - DNA, 447 bp, synthetic construct
  misc_feature 1..447: note = Description of Artificial Sequence: Synthetic coding sequence
  source 1..447: mol_type = other DNA
atgatcctgatccccaggatgctgctggtgctcttcctgctgctgcccatcctgagcagcgccaaggcccaggtgaacccagccatctgccgctaccccctgggcatgtctgggggccagatcccagatgaggacatcacagccagcagccagtggagcgagagcacagctgccaagtatggccgcctggacagcgaggagggagatggagcctggtgcccagagatccctgtggagccagatgacctgaaggagttcctgcagattgacctgcacaccctgcacttcatcaccctggtgggcacccagggcagacatgctgggggccacggcatcgagtttgcccccatgtacaagatcaactacagcagagatggcacccgctggatctcctggaggaacagacatggcaagcaggtgctggatggcaacagcaacccctactag

SEQ ID NO: 150142 - DNA, 516 bp, synthetic construct
  misc_feature 1..516: note = Description of Artificial Sequence: Synthetic coding sequence
  source 1..516: mol_type = other DNA
tgaatcttcatcctgctggccatcatcgtcatcatcctgtggaggcagttctggcagaagatgctggagaaggccagcaggaggatgctggatgatgagatgacagtgtccctgagcctgcccagcgacagctccatgttcaacaacaacagaagcagcagccccagcgagcagggcagcaacagcacctatgaccgcatcttccccctgcggccagactaccaggagcccagccgcctcatcaggaagctgcctgagtttgcccctggagaggaggagagcggctgcagcggcgtggtgaagcctgtgcagcccagcggccctgagggcgtgccccactatgcagaggccgacatcgtgaacctgcagggcgtgactggaggcaacacctacagcgtgcctgctgtgaccatggacctgctgagcggcaaggatgtggccgtggaggagttccccaggaagctgctgaccttcaaggagaagctgggggagggccagtttggagaggtgtcctag

SEQ ID NO: 150143 - DNA, 393 bp, synthetic construct
  misc_feature 1..393: note = Description of Artificial Sequence: Synthetic coding sequence
  source 1..393: mol_type = other DNA
atgatcctgatccccaggatgctgctggtgctcttcctgctgctgcccatcctgagcagcgccaaggcccaggtgaacccagccatctgccgctaccccctgggcatgtctgggggccagatcccagatgaggacatcacagccagcagccagtggagcgagagcacagctgccaagtatggccgcctggacagcgaggagggagatggagcctggtgcccagagatccctgtggagccagatgacctgaaggagttcctgcagattgacctgcacaccctgcacttcatcaccctggtgggcacccagggcagacatgctgggggccacggcatcgagtttgcccccatgtacaagatcaactacagcagagatggcacccgctggatctag

SEQ ID NO: 150144 - DNA, 501 bp, synthetic construct
  misc_feature 1..501: note = Description of Artificial Sequence: Synthetic coding sequence
  source 1..501: mol_type = other DNA
ctgaaggtggatgacagcaacacccgcatcctgattggctgcctggtggccatcatcttcatcctgctggccatcatcgtcatcatcctgtggaggcagttctggcagaagatgctggagaaggccagcaggaggatgctggatgatgagatgacagtgtccctgagcctgcccagcgacagctccatgttcaacaacaacagaagcagcagccccagcgagcagggcagcaacagcacctatgaccgcatcttccccctgcggccagactaccaggagcccagccgcctcatcaggaagctgcctgagtttgcccctggagaggaggagagcggagaagatgatgtggtgggccgggtgtcccgggagaagccccagcaggccagcggccgctatgacaccccagcccccagcagcctgcacctgttcctggtgtctgccaacctgctgcggagcccccacagcctgagcagatttggcctgcccctgctgctggcctag

SEQ ID NO: 150145 - DNA, 447 bp, synthetic construct; identical to SEQ ID NO: 150141
  misc_feature 1..447: note = Description of Artificial Sequence: Synthetic coding sequence
  source 1..447: mol_type = other DNA

SEQ ID NO: 150146 - DNA, 2403 bp, synthetic construct
  misc_feature 1..2403: note = Description of Artificial Sequence: Synthetic coding sequence
  source 1..2403: mol_type = other DNA
atgaactacatctttggaaacaacaccctgctgtacagccggggcagccggggcggcaacaccagcagcagccacggcagcgctggccccaagcagaagcactgggccaagaagggcagcagtgatgagctgcaggccgagcctgagcccagccgctggcagcagatcgtggccttcttcacccggcggcacagcttcatcgactgcatctctgtggccaccagcagcacccaggccaaccccccacctgtgctggtgaacacagacagcctggagacccccacctacgtgaatggaacagatgctgactatgaatatgaggagatcaccctggagcggggcaacagcggcctgggcttcagcattgctgggggcacagacaacccccacatcggagatgacagcagcatcttcatcaccaagatcatcaccggcggggccgccgcccaggacggccgcctgcgggtgaatgactgcatcctgcgggtgaatgaggtggatgtgagagatgtgacccacagcaaggctgtggaggccctgaaggaggccggcagcatcgtgcggctgtatgtgaagaggaggaagcctgtgtctgagaagatcatggagatcaagctgatcaagggccccaagggcctgggcttcagcattgctgggggcgtgggcaaccagcacatccctggggacaacagcatctacgtgaccaagatcatcgagggcggggccgcccacaaggatggcaagctgcagattggagacaagctgctggccgtgaacaacgtgtgcctggaggaggtgacccatgaggaggccgtgacagccctgaagaacaccagtgactttgtgtacctgaaggtggccaagcccacctccatgtacatgaatgatggctacgcccccccagacatcaccaacagcagcagccagcctgtggacaaccacgtgagccccagcagcttcctgggccagaccccagccagccctgcccgctacagccctgtgtccaaggctgtgctgggagatgatgagatcacccgggagcccaggaaggtggtgctgcaccggggcagcacaggcctgggcttcaacatcgtgggcggggaggatggagagggcatcttcatctccttcatcctggccggcggccctgctgacctgtctggagagctgaggaagggggaccgcatcatctctgtgaacagcgtggacctgcgggccgccagccatgagcaggccgccgccgccctgaagaatgccggccaggccgtgaccatcgtggcccagtacagacctgaggagtacagcagatttgaggccaagatccatgacctgcgggagcagatgatgaacagcagcatcagcagcggcagcggcagcctgcggaccagccagaagaggagcctgtatgtgcgggccctgtttgattatgacaagaccaaggacagcggcctgcccagccagggcctgaacttcaagtttggagacatcctgcacgtgatcaatgccagtgatgatgagtggtggcaggcccggcaggtgaccccagatggagagagtgatgaggtgggcgtcatccccagcaagagaagagtggagaagaaggagcgggcccggctgaagacagtgaagttcaacagcaagacccgggacaagggggagatcccagatgacatgggcagcaagggcctgaagcacgtgaccagcaatgccagtgacagcgagagcagctacctgatcctgatcacagatgaatatggctgcagcaaaggaggccaggaggagtatgtgctgtcctatgagcctgtgaaccagcaggaggtgaactacaccaggcctgtgatcatcctgggccccatgaaggaccgcatcaatgatgacctgatcagcgagttcccagacaagtttggcagctgtgtgccccacaccacccggcccaagagggactatgaggtggatggccgggactaccactttgtgaccagccgggagcagatggagaaggacatccaggagcacaagttcattgaagctggccagtacaacaaccacctgtatggcacctctgtgcagagcgtgcgggaggtggccgagaagggcaagcactgcatcctggatgtgtctggaaatgccatcaagaggctgcagatcgcccagctgtaccccatcagcatcttcatcaagcccaagtccatggagaacatcatggagatgaacaagaggctgacagaggagcaggccaggaagacctttgagcgggccatgaagctggagcaggagttcacagagcacttcaccgccatcgtgcagggcgacaccctggaggacatctacaaccaggtgaagcagatcatcgaggagcagagcggcagctacatctgggtgcctgccaaggagaagctgtag

SEQ ID NO: 150147 - DNA, 2367 bp, synthetic construct
  misc_feature 1..2367: note = Description of Artificial Sequence: Synthetic coding sequence
  source 1..2367: mol_type = other DNA
atgaactacatctttggaaacaacaccctgctgtacagccggggcagccggggcggcaacaccagcagcagccacggcagcgctggccccaagcagaagcactgggccaagaagggcagcagtgatgagctgcaggccgagcctgagcccagccgctggcagcagatcgtggccttcttcacccggcggcacagcttcatcgactgcatctctgtggccaccagcagcacccaggccaaccccccacctgtgctggtgaacacagacagcctggagacccccacctacgtgaatggaacagatgctgactatgaatatgaggagatcaccctggagcggggcaacagcggcctgggcttcagcattgctgggggcacagacaacccccacatcggagatgacagcagcatcttcatcaccaagatcatcaccggcggggccgccgcccaggacggccgcctgcgggtgaatgactgcatcctgcgggtgaatgaggtggatgtgagagatgtgacccacagcaaggctgtggaggccctgaaggaggccggcagcatcgtgcggctgtatgtgaagaggaggaagcctgtgtctgagaagatcatggagatcaagctgatcaagggccccaagggcctgggcttcagcattgctgggggcgtgggcaaccagcacatccctggggacaacagcatctacgtgaccaagatcatcgagggcggggccgcccacaaggatggcaagctgcagattggagacaagctgctggccgtgaacaacgtgtgcctggaggaggtgacccatgaggaggccgtgacagccctgaagaacaccagtgactttgtgtacctgaaggtggccaagcccacctccatgtacatgaatgatggctacgcccccccagacatcaccaacagcagcagccagcctgtggacaaccacgtgagccccagcagcttcctgggccagaccccagccagccctgcccgctacagccctgtgtccaaggctgtgctgggagatgatgagatcacccgggagcccaggaaggtggtgctgcaccggggcagcacaggcctgggcttcaacatcgtgggcggggaggatggagagggcatcttcatctccttcatcctggccggcggccctgctgacctgtctggagagctgaggaagggggaccgcatcatctctgtgaacagcgtggacctgcgggccgccagccatgagcaggccgccgccgccctgaagaatgccggccaggccgtgaccatcgtggcccagtacagacctgaggagtacagcagatttgaggccaagatccatgacctgcgggagcagatgatgaacagcagcatcagcagcggcagcggcagcctgcggaccagccagaagaggagcctgtatgtgcgggccctgtttgattatgacaagaccaaggacagcggcctgcccagccagggcctgaacttcaagtttggagacatcctgcacgtgatcaatgccagtgatgatgagtggtggcaggcccggcaggtgaccccagatggagagagtgatgaggtgggcgtcatccccagcaagagaagagtggagaagaaggagcgggcccggctgaagacagtgaagttcaacagcaagacccgggacaagggggagatcccagatgacatgggcagcaagggcctgaagcacgtgaccagcaatgccagtgacagcgagagcagctaccggggccaggaggagtatgtgctgtcctatgagcctgtgaaccagcaggaggtgaactacaccaggcctgtgatcatcctgggccccatgaaggaccgcatcaatgatgacctgatcagcgagttcccagacaagtttggcagctgtgtgccccacaccacccggcccaagagggactatgaggtggatggccgggactaccactttgtgaccagccgggagcagatggagaaggacatccaggagcacaagttcattgaagctggccagtacaacaaccacctgtatggcacctctgtgcagagcgtgcgggaggtggccgagaagggcaagcactgcatcctggatgtgtctggaaatgccatcaagaggctgcagatcgcccagctgtaccccatcagcatcttcatcaagcccaagtccatggagaacatcatggagatgaacaagaggctgacagaggagcaggccaggaagacctttgagcgggccatgaagctggagcaggagttcacagagcacttcaccgccatcgtgcagggcgacaccctggaggacatctacaaccaggtgaagcagatcatcgaggagcagagcggcagctacatctgggtgcctgccaaggagaagctgtag

SEQ ID NO: 150148 - DNA, 1539 bp, synthetic construct
  misc_feature 1..1539: note = Description of Artificial Sequence: Synthetic coding sequence
  source 1..1539: mol_type = other DNA
atggagcgggccaggaagttcagcggcagcggcctggccatgggcctgggcagcgccagcgccagcgcctggaggcgggccagccagcgctgggcctggcccctgcggagcctgcggcctggaggagatgcccgggagcccaggaagatcatcctgcacaagggcagcacaggcctgggcttcaacatcgtgggcggagaagatggagagggcatctttgtgtccttcatcctggccggcggccctgctgacctgagcggggagctgcggcggggggaccgcatcctgtctgtgaatggagtgaacctgagaaatgccacccatgagcaggccgctgctgccctgaagagagctggccagagcgtgaccatcgtggcccagtacagacctgaggagtacagcagatttgagagcaagatccatgacctgcgggagcagatgatgaacagctccatgagcagcggcagcggcagcctgcggaccagcgagaagaggagcctgtatgtgcgggccctgtttgattatgacaggacccgggacagctgcctgcccagccagggcctgtccttctcctatggagacatcctgcacgtgatcaatgccagtgatgatgagtggtggcaggcccggctggtgacccctcatggagagagcgagcagattggagtcatccccagcaagaagagggtggagaagaaggagcgggcccggctgaagacagtgaagttccacgccaggacaggcatgattgagagcaacagaagcatcaagaccaagaggaagaagagcttccggctgagcaggaagttccccttctacaagagcaaagaaaacatggcccaggagagcagcatccaggagcagggcgtgaccagcaacaccagtgacagcgagagcagcagcaagggccaggaggatgccatcctgtcctatgagcctgtgacccggcaggagatccactacgcccggcctgtgatcatcctgggccccatgaaggacagagtgaatgatgacctgatcagcgagttcccccacaagtttggcagctgtgtgccccacaccacccggccccggcgggacaatgaggtggatggccaggactaccactttgtggtgtcccgggagcagatggagaaggacatccaggacaacaagttcattgaagctggccagttcaatgacaacctgtatggcaccagcatccagagcgtgcgggctgtggccgagcggggcaagcactgcatcctggatgtgtctggaaatgccatcaagaggctgcagcaggcccagctgtaccccatcgccatcttcatcaagcccaagagcattgaggccctgatggagatgaacagacggcagacctatgagcaggccaacaagatctatgacaaggccatgaagctggagcaggagtttggagagtacttcaccgccatcgtgcagggcgacagcctggaggagatctacaacaagatcaagcagatcatcgaggaccagagcggccactacatctgggtgcccagccctgagaagctgtag

SEQ ID NO: 150149 - DNA, 3021 bp, synthetic construct
  misc_feature 1..3021: note = Description of Artificial Sequence: Synthetic coding sequence
  source 1..3021: mol_type = other DNA
gaggaggaggccggggacctggtgcagcccggcatctccttccctggccctgctgaggaggacctggacccccagtacagctggagccccacccagcacttcaatgaggagcgctacagccctgcccccaggtccatgaagggcctgagcggcagcaggacccagccccccctgtgcagcggccacacctgtggcctggcccctcctgaggactgtgagcacctgcaccacggcccagatgcccggcccccctacctgctgagccctgctgacagctgccctgggggccgccaccgctgcagccccaggagctctgtgcacagtgaatgtgtgatgatgcctgtggtgctgggggaccacgtgagcagcagcaccttccccaggatgcactacagcagccactatgacaccagagatgactgtgctgtggcccacgccggggccaagatcaaccgcatcccagccaacctgctggaccagtttgagaagcagctgcccctgcacagagatggcttccacaccctgcagtaccagaggaccagcgctgctgctgagcagaggtctgagagccctggccgcatccgccacctggtgcacagcgtgcagaagctgttcaccaagagccacagcctggagggcagcagcaagagcaatgccaacggcaccaaggcagatggccgggcagatgaccaccaccacgcccaccacgccaagcacagcaagaggagcaagagcaaggagaggaagccagagggcaagccccggcccggcatgagctcctggtggagcagtgatgacaacctggacagcgacagcacctaccgcacccccagcgtgctgaacagacaccacctgggccctgtggcccactgctacccagatgccctgcagagcccctttggagacctgagcctgaagaccagcaagagcaacaatgatgtgaagtgcagcgcctgtgagggcctggccctgaccccagatgccaagtacctgaagaggagctcctggagcaccctgactgtgtcccaggccaaggaggcctacaggaagagcagcctgaacctggacaagcccctgctgcaccaggatgccaagccagccctgcggccctgccactacctgcaggtgccccaggatgagtggggcggctaccccaccggcggcaaggatgaggagatcccctgcaggaggatgaggagcggcagctacatcaaggccatgggagatgaggagagcggggagagtgacagcagccccaagaccagccccaagagcgccatcctgcctgagcccctgctgaagagcatcggccagaggcccctgggggagcaccagacccagacctacctgcaggccgccagtgatgtgcctgtgggccacagcctggaccctgctgccaactacaacagccccaagttccgcagcaggaaccagagctacatgagagctgtgtccaccctgagccaggccagctgtgtgtcccaggtgtctgaggccgagatcaatggccagtttgaatctgtgtgtgagagcgtcttcagcgaggtggagagccaggccatggatgccctggacctgcccggctgcttccgcaccaggagccacagctacctgcgggccatccaggccggctacagccaggatgatgagtgcatccccatgatgacccccagcgacatcaccagcaccatccgcagcacagctgctgtgtcctacaccaactacaagaagaccccacctcctgtgccccccaggaccaccagcaagcccctcatctctgtgacagcccagagcagcacagagagcacccaggatgcctaccaggacagccgggcccagaggatgagcccctggccccaggacagccggggcctgtacaacagcacagacagcctggacagcaacaaggccatgaacctggccctggagacagctgctgcccagaggcacctgcctgagagccagagcagctctgtgaggaccagtgacaaggccatcctggtgtccaaggccgaggagctgctgaagagccgctgcagcagcatcggcatccaggtggagacagccacagacagcgacacagagagccggggcctgcgggagtaccacagcgtgggcgtgcaggtggaggatgagaagagacatggccgcttcaagaggagcaacagcgtgacagctgctgtgcaggccgacctggagctggagggcttccctggccacatcaccacagaggacaagggcctgcagtttggcagcagcttccagaggcacagcgagcccagcacccccacccagtacagcgctgtgaggacagtgaggacccagggcctcttctcctaccgggaggactaccgcacccaggtggacaccagcaccctgcccccaccagacccctggctggagcccgccatcgacacagtggagactggaaggatgagcccctgcagaagagatggctcctggttcctgaagctgctgcacgccgagaccaagaggatggagggctggtgcaaggagatggagcgggaggccgaggagaatgacctgtctgaggagatcctgggcaagatccgctctgctgtgggcagcgcccagctgctgatgagccagaagttccagcagttctactggctgtgccagcagaacatggaccccagcgccatgccccggcccaccagccaggacctggccggctactgggacatgctgcagctgagcattgaagatgtgtccatgaagtttgatgagctgcagaggctgcggctgaatgactggaagatgatggagagccctgagaggaaggaggagaggaaggtgcccccacccatccccaagaagccacccaagggcaagttccccatcacccgggagaagagcctggacctgcctgaccggcagaggcaggaggcccggcggcggctgatggccgccaagagagctgccagcttccggcagaacagcgccagcgagagagctgacagcattgagatctacatccctgaggcccagacccggctgtag

SEQ ID NO: 150150 - DNA, 2928 bp, synthetic construct
  misc_feature 1..2928: note = Description of Artificial Sequence: Synthetic coding sequence
  source 1..2928: mol_type = other DNA
atgaagggcctgagcggcagcaggacccagccccccctgtgcagcggccacacctgtggcctggcccccccagaggactgtgagcacctgcaccacggcccagatgcccggcccccctacctgctgagccctgctgacagctgccctgggggccgccaccgctgcagccccaggagctctgtgcacagtgaatgtgtgatgatgcctgtggtgctgggggaccacgtgagcagcagcaccttccccaggatgcactacagcagccactatgacaccagagatgactgtgctgtggcccatgctggggccaagatcaaccgcatcccagccaacctgctggaccagtttgagaagcagctgcccctgcacagagatggcttccacaccctgcagtaccagaggaccagcgctgctgctgagcagaggtctgagagccctggccgcatccgccacctggtgcacagcgtgcagaagctgttcaccaagagccacagcctggagggcagcagcaagagcaatgccaacggcaccaaggcagatggccgggcagatgaccaccaccacgcccaccacgccaagcacagcaagaggagcaagagcaaggagaggaagccagagggcaagcccaggcctggcatgagctcctggtggagcagtgatgacaacctggacagcgacagcacctaccgcaccccatctgtgctgaacagacaccacctgggccctgtggcccactgctacccagatgccctgcagagcccctttggagacctgagcctgaagaccagcaagagcaacaatgatgtgaagtgcagcgcctgtgagggcctggccctgaccccagatgccaagtacctgaagaggagctcctggagcaccctgactgtgtcccaggccaaggaggcctacaggaagagcagcctgaacctggacaagcccctgctgcaccaggatgccaagccagccctgcggccctgccactacctgcaggtgccccaggatgagtggggcggctaccccactggaggcaaggatgaggagatcccctgcaggaggatgaggagcggcagctacatcaaggccatgggagatgaggagagcggggagagtgacagcagccccaagaccagccccaagagcgccatcctgcctgagcccctgctgaagagcatcggccagaggcccctgggggagcaccagacccagacctacctgcaggccgccagtgatgtgcctgtgggccacagcctggaccctgctgccaactacaacagccccaagttccgcagcaggaaccagagctacatgagagctgtgtccaccctgagccaggccagctgtgtgtcccaggtgtctgaggccgagatcaatggccagtttgagagcgtgtgtgagagcgtcttcagcgaggtggagagccaggccatggatgccctggacctgcccggctgcttccgcaccaggagccacagctacctgcgggccatccaggccggctacagccaggatgatgagtgcatccccatgatgacccccagcgacatcaccagcaccatccgcagcacagctgctgtgtcctacaccaactacaagaagaccccacctcctgtgccccccaggaccaccagcaagcccctcatctctgtgacagcccagagcagcacagagagcacccaggatgcctaccaggacagccgggcccagaggatgagcccctggccccaggacagccggggcctgtacaacagcacagacagcctggacagcaacaaggccatgaacctggccctggagacagctgctgcccagaggcacctgcctgagagccagagcagctctgtgaggaccagtgacaaggccatcctggtgtccaaggccgaggagctgctgaagagccgctgcagcagcatcggcatccaggacagcgagttccctgagcaccagccctaccccaggagtgatgtggagacagccacagacagcgacacagagagccggggcctgcgggagtaccacagcgtgggcgtgcaggtggaggatgagaagagacatggccgcttcaagaggagcaacagcgtgacagctgctgtgcaggccgacctggagctggagggcttccctggccacatcaccacagaagataaaggcctgcagtttggcagcagcttccagaggcacagcgagcccagcacccccacccagtacagcgctgtgaggacagtgaggacccagggcctcttctcctaccgggaggactaccgcacccaggtggacaccagcaccctgcccccaccagacccctggctggagcccgccatcgacacagtggagaccggccgcatgagcccctgcagaagagatggctcctggttcctgaagctgctgcatgctgagaccaagaggatggagggctggtgcaaggagatggagcgggaggccgaggagaatgacctgtctgaggagatcctgggcaagatccgctctgctgtgggcagcgcccagctgctgatgagccagaagttccagcagttctactggctgtgccagcagaacatggaccccagcgccatgccccggcccaccagccaggacctggccggctactgggacatgctgcagctgagcattgaagatgtgtccatgaagtttgatgagctgcagaggctgcggctgaatgactggaagatgatggagagccctgagaggaaggaggagaggaaggtgcccccacccatccccaagaagccacccaagggcaagttccccatcacccgggagaagagcctggacctgcctgaccggcagaggcaggaggcccggcggcggctgatggccgccaagagagctgccagcttccggcagaacagcgccagcgagagagctgacagcattgagatctacatccctgaggcccagacccggctgtag

SEQ ID NO: 150151 - DNA, 2937 bp, synthetic construct
  misc_feature 1..2937: note = Description of Artificial Sequence: Synthetic coding sequence
  source 1..2937: mol_type = other DNA
tgacccacccagcacttcaatgaggagcgctacagccctgcccccaggtccatgaagggcctgagcggcagcaggacccagccccccctgtgcagcggccacacctgtggcctggcccctcctgaggactgtgagcacctgcaccacggcccagatgcccggcccccctacctgctgagccctgctgacagctgccctgggggccgccaccgctgcagccccaggagctctgtgcacagtgaatgtgtgatgatgcctgtggtgctgggggaccacgtgagcagcagcaccttccccaggatgcactacagcagccactatgacaccagagatgactgtgctgtggcccacgccggggccaagatcaaccgcatcccagccaacctgctggaccagtttgagaagcagctgcccctgcacagagatggcttccacaccctgcagtaccagaggaccagcgctgctgctgagcagaggtctgagagccctggccgcatccgccacctggtgcacagcgtgcagaagctgttcaccaagagccacagcctggagggcagcagcaagagcaatgccaacggcaccaaggcagatggccgggcagatgaccaccaccacgcccaccacgccaagcacagcaagaggagcaagagcaaggagaggaagccagagggcaagccccggcccggcatgagctcctggtggagcagtgatgacaacctggacagcgacagcacctaccgcacccccagcgtgctgaacagacaccacctgggccctgtggcccactgctacccagatgccctgcagagcccctttggagacctgagcctgaagaccagcaagagcaacaatgatgtgaagtgcagcgcctgtgagggcctggccctgaccccagatgccaagtacctgaagaggagctcctggagcaccctgactgtgtcccaggccaaggaggcctacaggaagagcagcctgaacctggacaagcccctgctgcaccaggatgccaagccagccctgcggccctgccactacctgcaggtgccccaggatgagtggggcggctaccccaccggcggcaaggatgaggagatcccctgcaggaggatgaggagcggcagctacatcaaggccatgggagatgaggagagcggggagagtgacagcagccccaagaccagccccaagagcgccatcctgcctgagcccctgctgaagagcatcggccagaggcccctgggggagcaccagacccagacctacctgcaggccgccagtgatgtgcctgtgggccacagcctggaccctgctgccaactacaacagccccaagttccgcagcaggaaccagagctacatgagagctgtgtccaccctgagccaggccagctgtgtgtcccaggtgtctgaggccgagatcaatggccagtttgaatctgtgtgtgagagcgtcttcagcgaggtggagagccaggccatggatgccctggacctgcccggctgcttccgcaccaggagccacagctacctgcgggccatccaggccggctacagccaggatgatgagtgcatccccatgatgacccccagcgacatcaccagcaccatccgcagcacagctgctgtgtcctacaccaactacaagaagaccccacctcctgtgccccccaggaccaccagcaagcccctcatctctgtgacagcccagagcagcacagagagcacccaggatgcctaccaggacagccgggcccagaggatgagcccctggccccaggacagccggggcctgtacaacagcacagacagcctggacagcaacaaggccatgaacctggccctggagacagctgctgcccagaggcacctgcctgagagccagagcagctctgtgaggaccagtgacaaggccatcctggtgtccaaggccgaggagctgctgaagagccgctgcagcagcatcggcatccaggtggagacagccacagacagcgacacagagagccggggcctgcgggagtaccacagcgtgggcgtgcaggtggaggatgagaagagacatggccgcttcaagaggagcaacagcgtgacagctgctgtgcaggccgacctggagctggagggcttccctggccacatcaccacagaggacaagggcctgcagtttggcagcagcttccagaggcacagcgagcccagcacccccacccagtacagcgctgtgaggacagtgaggacccagggcctcttctcctaccgggaggactaccgcacccaggtggacaccagcaccctgcccccaccagacccctggctggagcccgccatcgacacagtggagactggaaggatgagcccctgcagaagagatggctcctggttcctgaagctgctgcacgccgagaccaagaggatggagggctggtgcaaggagatggagcgggaggccgaggagaatgacctgtctgaggagatcctgggcaagatccgctctgctgtgggcagcgcccagctgctgatgagccagaagttccagcagttctactggctgtgccagcagaacatggaccccagcgccatgccccggcccaccagccaggacctggccggctactgggacatgctgcagctgagcattgaagatgtgtccatgaagtttgatgagctgcagaggctgcggctgaatgactggaagatgatggagagccctgagaggaaggaggagaggaaggtgcccccacccatccccaagaagccacccaagggcaagttccccatcacccgggagaagagcctggacctgcctgaccggcagaggcaggaggcccggcggcggctgatggccgccaagagagctgccagcttccggcagaacagcgccagcgagagagctgacagcattgagatctacatccctgaggcccagacccggctgtag

SEQ ID NO: 150152 - DNA, 2562 bp, synthetic construct
  misc_feature 1..2562: note = Description of Artificial Sequence: Synthetic coding sequence
  source 1..2562: mol_type = other DNA
atgcctgtgaggaagcaggacacccagagggccctgcacctgctggaggagtaccgcagcaagctgagccagacagaggaccggcagctgcggagcagcattgaaagagtcatcaacatcttccagagcaacctcttccaggccctgattgacatccaggagttctatgaggtgaccctgctggacaaccccaagtgcatcgacaggagcaagcccagcgagcccatccagcctgtgaacacctgggagatcagcagcctgcccagcagcacagtgaccagcgagaccctgcccagcagcctgagccccagcgtggagaagtaccgctaccaggatgaggacaccccaccccaggagcacatcagcccccagatcaccaatgaagtcatcggccctgagctggtgcacgtgtctgagaagaacctgtctgaaattgaaaatgtgcacggctttgtgagccacagccacatcagccccatcaaggtgaatggaacagatgctgactatgaatatgaggagatcaccctggagcggggcaacagcggcctgggcttcagcattgctgggggcacagacaacccccacatcggagatgacagcagcatcttcatcaccaagatcatcactggaggagctgctgcccaggacggccgcctgcgggtgaatgactgcatcctgcgggtgaatgaggtggatgtgagagatgtgacccacagcaaggctgtggaggccctgaaggaggccggcagcatcgtgcggctgtatgtgaagaggaggaagcctgtgtctgagaagatcatggagatcaagctgatcaagggccccaagggcctgggcttcagcattgctggaggagtgggcaaccagcacatccctggggacaacagcatctacgtgaccaagatcattgaaggaggagctgcccacaaggatggcaagctgcagatcggggacaagctgctggccgtgaacaacgtgtgcctggaggaggtgacccatgaggaggccgtgacagccctgaagaacaccagtgactttgtgtacctgaaggtggccaagcccacctccatgtacatgaatgatggctacgcccccccagacatcaccaacagcagcagccagcctgtggacaaccacgtgagccccagcagcttcctgggccagaccccagccagccctgcccgctacagccctgtgtccaaggctgtgctgggagatgatgagatcacccgggagcccaggaaggtggtgctgcaccggggcagcacaggcctgggcttcaacatcgtgggcggagaagatggagagggcatcttcatctccttcatcctggccggcggccctgctgacctgagcggggagctgaggaaaggagaccgcatcatctctgtgaacagcgtggacctgcgggccgccagccatgagcaggccgctgctgccctgaagaatgccggccaggccgtgaccatcgtggcccagtacagacctgaggagtacagcagatttgaggccaagatccatgacctgcgggagcagatgatgaacagcagcatcagcagcggcagcggcagcctgcggaccagccagaagaggagcctgtatgtgcgggccctgtttgattatgacaagaccaaggacagcggcctgcccagccagggcctgaacttcaagtttggagacatcctgcacgtgatcaatgccagtgatgatgagtggtggcaggcccggcaggtgaccccagatggagagagtgatgaggtgggcgtcatccccagcaagagaagagtggagaagaaggagcgggcccggctgaagacagtgaagttcaacagcaagacccgggacaagggggagatcccagatgacatgggcagcaagggcctgaagcacgtgaccagcaatgccagtgacagcgagagcagctaccggggccaggaggagtatgtgctgtcctatgagcctgtgaaccagcaggaggtgaactacaccaggcctgtgatcatcctgggccccatgaaggaccgcatcaatgatgacctgatcagcgagttcccagacaagtttggcagctgtgtgccccacaccacccggcccaagagggactatgaggtggatggccgggactaccactttgtgaccagccgggagcagatggagaaggacatccaggagcacaagttcatcgaggccggccagtacaacaaccacctgtatggcacctctgtgcagagcgtgcgggaggtggccgagaagggcaagcactgcatcctggatgtgtctggaaatgccatcaagaggctgcagatcgcccagctgtaccccatcagcatcttcatcaagcccaagtccatggagaacatcatggagatgaacaagaggctgacagaggagcaggccaggaagacctttgagcgggccatgaagctggagcaggagttcacagagcacttcaccgccatcgtgcagggcgacaccctggaggacatctacaaccaggtgaagcagatcatcgaggagcagagcggcagctacatctgggtgcctgccaaggagaagctgtag

SEQ ID NO: 150153 - DNA, 2781 bp, synthetic construct
  misc_feature 1..2781: note = Description of Artificial Sequence: Synthetic coding sequence
  source 1..2781: mol_type = other DNA
atgcctgtgaggaagcaggacacccagagggccctgcacctgctggaggagtaccgcagcaagctgagccagacagaggaccggcagctgcggagcagcattgaaagagtcatcaacatcttccagagcaacctcttccaggccctgattgacatccaggagttctatgaggtgaccctgctggacaaccccaagtgcatcgacaggagcaagcccagcgagcccatccagcctgtgaacacctgggagatcagcagcctgcccagcagcacagtgaccagcgagaccctgcccagcagcctgagccccagcgtggagaagtaccgctaccaggatgaggacaccccaccccaggagcacatcagcccccagatcaccaatgaagtcatcggccctgagctggtgcacgtgtctgagaagaacctgtctgaaattgaaaatgtgcacggctttgtgagccacagccacatcagccccatcaagcccacagaagctgtgctgcccagcccccccaccgtgcctgtgattcctgtgctgcctgtgcctgctgagaacacagtcatcctgcccaccatcccccaggccaaccccccacctgtgctggtgaacacagacagcctggagacccccacctacgtgaatggaacagatgctgactatgaatatgaggagatcaccctggagcggggcaacagcggcctgggcttcagcattgctgggggcacagacaacccccacatcggagatgacagcagcatcttcatcaccaagatcatcaccggcggggccgccgcccaggacggccgcctgcgggtgaatgactgcatcctgcgggtgaatgaggtggatgtgagagatgtgacccacagcaaggctgtggaggccctgaaggaggccggcagcatcgtgcggctgtatgtgaagaggaggaagcctgtgtctgagaagatcatggagatcaagctgatcaagggccccaagggcctgggcttcagcattgctgggggcgtgggcaaccagcacatccctggggacaacagcatctacgtgaccaagatcatcgagggcggggccgcccacaaggatggcaagctgcagattggagacaagctgctggccgtgaacaacgtgtgcctggaggaggtgacccatgaggaggccgtgacagccctgaagaacaccagtgactttgtgtacctgaaggtggccaagcccacctccatgtacatgaatgatggctacgcccccccagacatcaccaacagcagcagccagcctgtggacaaccacgtgagccccagcagcttcctgggccagaccccagccagccctgcccgctacagccctgtgtccaaggctgtgctgggagatgatgagatcacccgggagcccaggaaggtggtgctgcaccggggcagcacaggcctgggcttcaacatcgtgggcggggaggatggagagggcatcttcatctccttcatcctggccggcggccctgctgacctgtctggagagctgaggaagggggaccgcatcatctctgtgaacagcgtggacctgcgggccgccagccatgagcaggccgccgccgccctgaagaatgccggccaggccgtgaccatcgtggcccagtacagacctgaggagtacagcagatttgaggccaagatccatgacctgcgggagcagatgatgaacagcagcatcagcagcggcagcggcagcctgcggaccagccagaagaggagcctgtatgtgcgggccctgtttgattatgacaagaccaaggacagcggcctgcccagccagggcctgaacttcaagtttggagacatcctgcacgtgatcaatgccagtgatgatgagtggtggcaggcccggcaggtgaccccagatggagagagtgatgaggtgggcgtcatccccagcaagagaagagtggagaagaaggagcgggcccggctgaagacagtgaagttcaacagcaagacccgggacaagggccagagcttcaatgacaagaggaagaagaacctcttcagcaggaagttccccttctacaagaacaaggaccagagcgagcaggagaccagtgatgctgaccagcacgtgaccagcaatgccagtgacagcgagagcagctaccggggccaggaggagtatgtgctgtcctatgagcctgtgaaccagcaggaggtgaactacaccaggcctgtgatcatcctgggccccatgaaggaccgcatcaatgatgacctgatcagcgagttcccagacaagtttggcagctgtgtgccccacaccacccggcccaagagggactatgaggtggatggccgggactaccactttgtgaccagccgggagcagatggagaaggacatccaggagcacaagttcattgaagctggccagtacaacaaccacctgtatggcacctctgtgcagagcgtgcgggaggtggccgagaagggcaagcactgcatcctggatgtgtctggaaatgccatcaagaggctgcagatcgcccagctgtaccccatcagcatcttcatcaagcccaagtccatggagaacatcatggagatgaacaagaggctgacagaggagcaggccaggaagacctttgagcgggccatgaagctggagcaggagttcacagagcacttcaccgccatcgtgcagggcgacaccctggaggacatctacaaccaggtgaagcagatcatcgaggagcagagcggcagctacatctgggtgcctgccaaggagaagctgtag

SEQ ID NO: 150154 - DNA, 2682 bp, synthetic construct
  misc_feature 1..2682: note = Description of Artificial Sequence: Synthetic coding sequence
  source 1..2682: mol_type = other DNA
atgcctgtgaggaagcaggacacccagagggccctgcacctgctggaggagtaccgcagcaagctgagccagacagaggaccggcagctgcggagcagcattgaaagagtcatcaacatcttccagagcaacctcttccaggccctgattgacatccaggagttctatgaggtgaccctgctggacaaccccaagtgcatcgacaggagcaagcccagcgagcccatccagcctgtgaacacctgggagatcagcagcctgcccagcagcacagtgaccagcgagaccctgcccagcagcctgagccccagcgtggagaagtaccgctaccaggatgaggacaccccaccccaggagcacatcagcccccagatcaccaatgaagtcatcggccctgagctggtgcacgtgtctgagaagaacctgtctgaaattgaaaatgtgcacggctttgtgagccacagccacatcagccccatcaaggccaaccccccacctgtgctggtgaacacagacagcctggagacccccacctacgtgaatggaacagatgctgactatgaatatgaggagatcaccctggagcggggcaacagcggcctgggcttcagcattgctgggggcacagacaacccccacatcggagatgacagcagcatcttcatcaccaagatcatcactggaggagctgctgcccaggacggccgcctgcgggtgaatgactgcatcctgcgggtgaatgaggtggatgtgagagatgtgacccacagcaaggctgtggaggccctgaaggaggccggcagcatcgtgcggctgtatgtgaagaggaggaagcctgtgtctgagaagatcatggagatcaagctgatcaagggccccaagggcctgggcttcagcattgctggaggagtgggcaaccagcacatccctggggacaacagcatctacgtgaccaagatcattgaaggaggagctgcccacaaggatggcaagctgcagatcggggacaagctgctggccgtgaacaacgtgtgcctggaggaggtgacccatgaggaggccgtgacagccctgaagaacaccagtgactttgtgtacctgaaggtggccaagcccacctccatgtacatgaatgatggctacgcccccccagacatcaccaacagcagcagccagcctgtggacaaccacgtgagccccagcagcttcctgggccagaccccagccagccctgcccgctacagccctgtgtccaaggctgtgctgggagatgatgagatcacccgggagcccaggaaggtggtgctgcaccggggcagcacaggcctgggcttcaacatcgtgggcggagaagatggagagggcatcttcatctccttcatcctggccggcggccctgctgacctgagcggggagctgaggaaaggagaccgcatcatctctgtgaacagcgtggacctgcgggccgccagccatgagcaggccgctgctgccctgaagaatgccggccaggccgtgaccatcgtggcccagtacagacctgaggagtacagcagatttgaggccaagatccatgacctgcgggagcagatgatgaacagcagcatcagcagcggcagcggcagcctgcggaccagccagaagaggagcctgtatgtgcgggccctgtttgattatgacaagaccaaggacagcggcctgcccagccagggcctgaacttcaagtttggagacatcctgcacgtgatcaatgccagtgatgatgagtggtggcaggcccggcaggtgaccccagatggagagagtgatgaggtgggcgtcatccccagcaagagaagagtggagaagaaggagcgggcccggctgaagacagtgaagttcaacagcaagacccgggacaagggccagagcttcaatgacaagaggaagaagaacctcttcagcaggaagttccccttctacaagaacaaggaccagagcgagcaggagaccagtgatgctgaccagcacgtgaccagcaatgccagtgacagcgagagcagctaccggggccaggaggagtatgtgctgtcctatgagcctgtgaaccagcaggaggtgaactacaccaggcctgtgatcatcctgggccccatgaaggaccgcatcaatgatgacctgatcagcgagttcccagacaagtttggcagctgtgtgccccacaccacccggcccaagagggactatgaggtggatggccgggactaccactttgtgaccagccgggagcagatggagaaggacatccaggagcacaagttcatcgaggccggccagtacaacaaccacctgtatggcacctctgtgcagagcgtgcgggaggtggccgagaagggcaagcactgcatcctggatgtgtctggaaatgccatcaagaggctgcagatcgcccagctgtaccccatcagcatcttcatcaagcccaagtccatggagaacatcatggagatgaacaagaggctgacagaggagcaggccaggaagacctttgagcgggccatgaagctggagcaggagttcacagagcacttcaccgccatcgtgcagggcgacaccctggaggacatctacaaccaggtgaagcagatcatcgaggagcagagcggcagctacatctgggtgcctgccaaggagaagctgtag

SEQ ID NO: 150155 - DNA, 2754 bp, synthetic construct
  misc_feature 1..2754: note = Description of Artificial Sequence: Synthetic coding sequence
  source 1..2754: mol_type = other DNA
atgcctgtgaggaagcaggacacccagagggccctgcacctgctggaggagtaccgcagcaagctgagccagacagaggaccggcagctgcggagcagcattgaaagagtcatcaacatcttccagagcaacctcttccaggccctgattgacatccaggagttctatgaggtgaccctgctggacaaccccaagtgcatcgacaggagcaagcccagcgagcccatccagcctgtgaacacctgggagatcagcagcctgcccagcagcacagtgaccagcgagaccctgcccagcagcctgagccccagcgtggagaagtaccgctaccaggatgaggacaccccaccccaggagcacatcagcccccagatcaccaatgaagtcatcggccctgagctggtgcacgtgtctgagaagaacctgtctgaaattgaaaatgtgcacggctttgtgagccacagccacatcagccccatcaagcccacagaagctgtgctgcccagcccccccaccgtgcctgtgattcctgtgctgcctgtgcctgctgagaacacagtcatcctgcccaccatcccccaggccaaccccccacctgtgctggtgaacacagacagcctggagacccccacctacgtgaatggaacagatgctgactatgaatatgaggagatcaccctggagcggggcaacagcggcctgggcttcagcattgctgggggcacagacaacccccacatcggagatgacagcagcatcttcatcaccaagatcatcaccggcggggccgccgcccaggacggccgcctgcgggtgaatgactgcatcctgcgggtgaatgaggtggatgtgagagatgtgacccacagcaaggctgtggaggccctgaaggaggccggcagcatcgtgcggctgtatgtgaagaggaggaagcctgtgtctgagaagatcatggagatcaagctgatcaagggccccaagggcctgggcttcagcattgctgggggcgtgggcaaccagcacatccctggggacaacagcatctacgtgaccaagatcatcgagggcggggccgcccacaaggatggcaagctgcagattggagacaagctgctggccgtgaacaacgtgtgcctggaggaggtgacccatgaggaggccgtgacagccctgaagaacaccagtgactttgtgtacctgaaggtggccaagcccacctccatgtacatgaatgatggctacgcccccccagacatcaccaacagcagcagccagcctgtggacaaccacgtgagccccagcagcttcctgggccagaccccagccagccctgcccgctacagccctgtgtccaaggctgtgctgggagatgatgagatcacccgggagcccaggaaggtggtgctgcaccggggcagcacaggcctgggcttcaacatcgtgggcggggaggatggagagggcatcttcatctccttcatcctggccggcggccctgctgacctgtctggagagctgaggaagggggaccgcatcatctctgtgaacagcgtggacctgcgggccgccagccatgagcaggccgccgccgccctgaagaatgccggccaggccgtgaccatcgtggcccagtacagacctgaggagtacagcagatttgaggccaagatccatgacctgcgggagcagatgatgaacagcagcatcagcagcggcagcggcagcctgcggaccagccagaagaggagcctgtatgtgcgggccctgtttgattatgacaagaccaaggacagcggcctgcccagccagggcctgaacttcaagtttggagacatcctgcacgtgatcaatgccagtgatgatgagtggtggcaggcccggcaggtgaccccagatggagagagtgatgaggtgggcgtcatccccagcaagagaagagtggagaagaaggagcgggcccggctgaagacagtgaagttcaacagcaagacccgggacaagggggagatcccagatgacatgggcagcaagggcctgaagcacgtgaccagcaatgccagtgacagcgagagcagctacctgatcctgatcacagatgaatatggctgcagcaagggccggggccaggaggagtatgtgctgtcctatgagcctgtgaaccagcaggaggtgaactacaccaggcctgtgatcatcctgggccccatgaaggaccgcatcaatgatgacctgatcagcgagttcccagacaagtttggcagctgtgtgccccacaccacccggcccaagagggactatgaggtggatggccgggactaccactttgtgaccagccgggagcagatggagaaggacatccaggagcacaagttcatcgaggccggccagtacaacaaccacctgtatggcacctctgtgcagagcgtgcgggaggtggccgagaagggcaagcactgcatcctggatgtgtctggaaatgccatcaagaggctgcagatcgcccagctgtaccccatcagcatcttcatcaagcccaagtccatggagaacatcatggagatgaacaagaggctgacagaggagcaggccaggaagacctttgagcgggccatgaagctggagcaggagttcacagagcacttcaccgccatcgtgcagggcgacaccctggaggacatctacaaccaggtgaagcagatcatcgaggagcagagcggcagctacatctgggtgcctgccaaggagaagctgtag

SEQ ID NO: 150156 - DNA, 2676 bp, synthetic construct
  misc_feature 1..2676: note = Description of Artificial Sequence: Synthetic coding sequence
  source 1..2676: mol_type = other DNA
atgcctgtgaggaagcaggacacccagagggccctgcacctgctggaggagtaccgcagcaagctgagccagacagaggaccggcagctgcggagcagcattgaaagagtcatcaacatcttccagagcaacctcttccaggccctgattgacatccaggagttctatgaggtgaccctgctggacaaccccaagtgcatcgacaggagcaagcccagcgagcccatccagcctgtgaacacctgggagatcagcagcctgcccagcagcacagtgaccagcgagaccctgcccagcagcctgagccccagcgtggagaagtaccgctaccaggatgaggacaccccaccccaggagcacatcagcccccagatcaccaatgaagtcatcggccctgagctggtgcacgtgtctgagaagaacctgtctgaaattgaaaatgtgcacggctttgtgagccacagccacatcagccccatcaagcccacagaagctgtgctgcccagcccccccaccgtgcctgtgattcctgtgctgcctgtgcctgctgagaacacagtcatcctgcccaccatcccccaggccaaccccccacctgtgctggtgaacacagacagcctggagacccccacctacgtgaatggaacagatgctgactatgaatatgaggagatcaccctggagcggggcaacagcggcctgggcttcagcattgctgggggcacagacaacccccacatcggagatgacagcagcatcttcatcaccaagatcatcaccggcggggccgccgcccaggacggccgcctgcgggtgaatgactgcatcctgcgggtgaatgaggtggatgtgagagatgtgacccacagcaaggctgtggaggccctgaaggaggccggcagcatcgtgcggctgtatgtgaagaggaggaagcctgtgtctgagaagatcatggagatcaagctgatcaagggccccaagggcctgggcttcagcattgctgggggcgtgggcaaccagcacatccctggggacaacagcatctacgtgaccaagatcatcgagggcggggccgcccacaaggatggcaagctgcagattggagacaagctgctggccgtgaacaacgtgtgcctggaggaggtgacccatgaggaggccgtgacagccctgaagaacaccagtgactttgtgtacctgaaggtggccaagcccacctccatgtacatgaatgatggctacgcccccccagacatcaccaacagcagcagccagcctgtggacaaccacgtgagccccagcagcttcctgggccagaccccagccagccctgcccgctacagccctgtgtccaaggctgtgctgggagatgatgagatcacccgggagcccaggaaggtggtgctgcaccggggcagcacaggcctgggcttcaacatcgtgggcggggaggatggagagggcatcttcatctccttcatcctggccggcggccctgctgacctgtctggagagctgaggaagggggaccgcatcatctctgtgaacagcgtggacctgcgggccgccagccatgagcaggccgccgccgccctgaagaatgccggccaggccgtgaccatcgtggcccagtacagacctgaggagtacagcagatttgaggccaagatccatgacctgcgggagcagatgatgaacagcagcatcagcagcggcagcggcagcctgcggaccagccagaagaggagcctgtatgtgcgggccctgtttgattatgacaagaccaaggacagcggcctgcccagccagggcctgaacttcaagtttggagacatcctgcacgtgatcaatgccagtgatgatgagtggtggcaggcccggcaggtgaccccagatggagagagtgatgaggtgggcgtcatccccagcaagagaagagtggagaagaaggagcgggcccggctgaagacagtgaagttcaacagcaagacccgggacaagggggagatcccagatgacatgggcagcaagggcctcatcggcggccaggaggagtatgtgctgtcctatgagcctgtgaaccagcaggaggtgaactacaccaggcctgtgatcatcctgggccccatgaaggaccgcatcaatgatgacctgatcagcgagttcccagacaagtttggcagctgtgtgccccacaccacccggcccaagagggactatgaggtggatggccgggactaccactttgtgaccagccgggagcagatggagaaggacatccaggagcacaagttcatcgaggccggccagtacaacaaccacctgtatggcacctctgtgcagagcgtgcgggaggtggccgagaagggcaagcactgcatcctggatgtgtctggaaatgccatcaagaggctgcagatcgcccagctgtaccccatcagcatcttcatcaagcccaagtccatggagaacatcatggagatgaacaagaggctgacagaggagcaggccaggaagacctttgagcgggccatgaagctggagcaggagttcacagagcacttcaccgccatcgtgcagggcgacaccctggaggacatctacaaccaggtgaagcagatcatcgaggagcagagcggcagctacatctgggtgcctgccaaggagaagctgtag

SEQ ID NO: 150157 - DNA, 627 bp, synthetic construct
  misc_feature 1..627: note = Description of Artificial Sequence: Synthetic coding sequence
  source 1..627: mol_type = other DNA
atgcctgtgaggaagcaggacacccagagggccctgcacctgctggaggagtaccgcagcaagctgagccagacagaggaccggcagctgcggagcagcattgaaagagtcatcaacatcttccagagcaacctcttccaggccctgattgacatccaggagttctatgaggtgaccctgctggacaaccccaagtgcatcgacaggagcaagcccagcgagcccatccagcctgtgaacacctgggagatcagcagcctgcccagcagcacagtgaccagcgagaccctgcccagcagcctgagccccagcgtggagaagtaccgctaccaggatgaggacaccccaccccaggagcacatcagcccccagatcaccaatgaagtcatcggccctgagctggtgcacgtgtctgagaagaacctgtctgaaattgaaaatgtgcacggctttgtgagccacagccacatcagccccatcaagcccacagaagctgtgctgcccagcccccccaccgtgcctgtgattcctgtgctgcctgtgcctgctgagaacacagtcatcctgcccaccatcccccaggccaaccccccacctgtgctggtgaacacagacagcctggagtag

SEQ ID NO: 150158 - DNA, 2616 bp, synthetic construct
  misc_feature 1..2616: note = Description of Artificial Sequence: Synthetic coding sequence
  source 1..2616: mol_type = other DNA
atgcctgtgaggaagcaggacacccagagggccctgcacctgctggaggagtaccgcagcaagctgagccagacagaggaccggcagctgcggagcagcattgaaagagtcatcaacatcttccagagcaacctcttccaggccctgattgacatccaggagttctatgaggtgaccctgctggacaaccccaagtgcatcgacaggagcaagcccagcgagcccatccagcctgtgaacacctgggagatcagcagcctgcccagcagcacagtgaccagcgagaccctgcccagcagcctgagccccagcgtggagaagtaccgctaccaggatgaggacaccccaccccaggagcacatcagcccccagatcaccaatgaagtcatcggccctgagctggtgcacgtgtctgagaagaacctgtctgaaattgaaaatgtgcacggctttgtgagccacagccacatcagccccatcaaggccaaccccccacctgtgctggtgaacacagacagcctggagacccccacctacgtgaatggaacagatgctgactatgaatatgaggagatcaccctggagcggggcaacagcggcctgggcttcagcattgctgggggcacagacaacccccacatcggagatgacagcagcatcttcatcaccaagatcatcactggaggagctgctgcccaggacggccgcctgcgggtgaatgactgcatcctgcgggtgaatgaggtggatgtgagagatgtgacccacagcaaggctgtggaggccctgaaggaggccggcagcatcgtgcggctgtatgtgaagaggaggaagcctgtgtctgagaagatcatggagatcaagctgatcaagggccccaagggcctgggcttcagcattgctggaggagtgggcaaccagcacatccctggggacaacagcatctacgtgaccaagatcattgaaggaggagctgcccacaaggatggcaagctgcagatcggggacaagctgctggccgtgaacaacgtgtgcctggaggaggtgacccatgaggaggccgtgacagccctgaagaacaccagtgactttgtgtacctgaaggtggccaagcccacctccatgtacatgaatgatggctacgcccccccagacatcaccaacagcagcagccagcctgtggacaaccacgtgagccccagcagcttcctgggccagaccccagccagccctgcccgctacagccctgtgtccaaggctgtgctgggagatgatgagatcacccgggagcccaggaaggtggtgctgcaccggggcagcacaggcctgggcttcaacatcgtgggcggagaagatggagagggcatcttcatctccttcatcctggccggcggccctgctgacctgagcggggagctgaggaaaggagaccgcatcatctctgtgaacagcgtggacctgcgggccgccagccatgagcaggccgctgctgccctgaagaatgccggccaggccgtgaccatcgtggcccagtacagacctgaggagtacagcagatttgaggccaagatccatgacctgcgggagcagatgatgaacagcagcatcagcagcggcagcggcagcctgcggaccagccagaagaggagcctgtatgtgcgggccctgtttgattatgacaagaccaaggacagcggcctgcccagccagggcctgaacttcaagtttggagacatcctgcacgtgatcaatgccagtgatgatgagtggtggcaggcccggcaggtgaccccagatggagagagtgatgaggtgggcgtcatccccagcaagagaagagtggagaagaaggagcgggcccggctgaagacagtgaagttcaacagcaagacccgggacaagggggagatcccagatgacatgggcagcaagggcctgaagcacgtgaccagcaatgccagtgacagcgagagcagctaccggggccaggaggagtatgtgctgtcctatgagcctgtgaaccagcaggaggtgaactacaccaggcctgtgatcatcctgggccccatgaaggaccgcatcaatgatgacctgatcagcgagttcccagacaagtttggcagctgtgtgccccacaccacccggcccaagagggactatgaggtggatggccgggactaccactttgtgaccagccgggagcagatggagaaggacatccaggagcacaagttcatcgaggccggccagtacaacaaccacctgtatggcacctctgtgcagagcgtgcgggaggtggccgagaagggcaagcactgcatcctggatgtgtctggaaatgccatcaagaggctgcagatcgcccagctgtaccccatcagcatcttcatcaagcccaagtccatggagaacatcatggagatgaacaagaggctgacagaggagcaggccaggaagacctttgagcgggccatgaagctggagcaggagttcacagagcacttcaccgccatcgtgcagggcgacaccctggaggacatctacaaccaggtgaagcagatcatcgaggagcagagcggcagctacatctgggtgcctgccaaggagaagctgtag

SEQ ID NO: 150159 - DNA, 321 bp, synthetic construct
  misc_feature 1..321: note = Description of Artificial Sequence: Synthetic coding sequence
  source 1..321: mol_type = other DNA
atgcctgtgaggaagcaggacacccagagggccctgcacctgctggaggagtaccgcagcaagctgagccagacagaggaccggcagctgcggagcagcattgaaagagtcatcaacatcttccagagcaacctcttccaggccctgattgacatccaggagttctatgaggtgaccctgctggacaaccccaagtgcatcgacaggagcaagcccagcgagcccatccagcctgtgaacacctgggagatcagcagcctgcccagcagcacagtgaccagcgagaccctgcccagcagcctgagccccagcgtggagtag

SEQ ID NO: 150160 - DNA, 1113 bp, synthetic construct
  misc_feature 1..1113: note = Description of Artificial Sequence: Synthetic coding sequence
  source 1..1113: mol_type = other DNA
atgcctgtgaggaagcaggacacccagagggccctgcacctgctggaggagtaccgcagcaagctgagccagacagaggaccggcagctgcggagcagcattgaaagagtcatcaacatcttccagagcaacctcttccaggccctgattgacatccaggagttctatgaggtgaccctgctggacaaccccaagtgcatcgacaggagcaagcccagcgagcccatccagcctgtgaacacctgggagatcagcagcctgcccagcagcacagtgaccagcgagaccctgcccagcagcctgagccccagcgtggagaagtaccgctaccaggatgaggacaccccaccccaggagcacatcagcccccagatcaccaatgaagtcatcggccctgagctggtgcacgtgtctgagaagaacctgtctgaaattgaaaatgtgcacggctttgtgagccacagccacatcagccccatcaaggtgaatggaacagatgctgactatgaatatgaggagatcaccctggagcggggcaacagcggcctgggcttcagcattgctgggggcacagacaacccccacatcggagatgacagcagcatcttcatcaccaagatcatcactggaggagctgctgcccaggacggccgcctgcgggtgaatgactgcatcctgcgggtgaatgaggtggatgtgagagatgtgacccacagcaaggctgtggaggccctgaaggaggccggcagcatcgtgcggctgtatgtgaagaggaggaagcctgtgtctgagaagatcatggagatcaagctgatcaagggccccaagggcctgggcttcagcattgctggaggagtgggcaaccagcacatccctggggacaacagcatctacgtgaccaagatcattgaaggaggagctgcccacaaggatggcaagctgcagatcggggacaagctgctggccgtgaacaacgtgtgcctggaggaggtgacccatgaggaggccgtgacagccctgaagaacaccagtgactttgtgtacctgaaggtggccaagcccacctccatgtacatgaatgatggctacgcccccccagacatcaccaactag

SEQ ID NO: 150161 - DNA, 2715 bp, synthetic construct
  misc_feature 1..2715: note = Description of Artificial Sequence: Synthetic coding sequence
  source 1..2715: mol_type = other DNA
atgcctgtgaggaagcaggacacccagagggccctgcacctgctggaggagtaccgcagcaagctgagccagacagaggaccggcagctgcggagcagcattgaaagagtcatcaacatcttccagagcaacctcttccaggccctgattgacatccaggagttctatgaggtgaccctgctggacaaccccaagtgcatcgacaggagcaagcccagcgagcccatccagcctgtgaacacctgggagatcagcagcctgcccagcagcacagtgaccagcgagaccctgcccagcagcctgagccccagcgtggagaagtaccgctaccaggatgaggacaccccaccccaggagcacatcagcccccagatcaccaatgaagtcatcggccctgagctggtgcacgtgtctgagaagaacctgtctgaaattgaaaatgtgcacggctttgtgagccacagccacatcagccccatcaagcccacagaagctgtgctgcccagcccccccaccgtgcctgtgattcctgtgctgcctgtgcctgctgagaacacagtcatcctgcccaccatcccccaggccaaccccccacctgtgctggtgaacacagacagcctggagacccccacctacgtgaatggaacagatgctgactatgaatatgaggagatcaccctggagcggggcaacagcggcctgggcttcagcattgctgggggcacagacaacccccacatcggagatgacagcagcatcttcatcaccaagatcatcaccggcggggccgccgcccaggacggccgcctgcgggtgaatgactgcatcctgcgggtgaatgaggtggatgtgagagatgtgacccacagcaaggctgtggaggccctgaaggaggccggcagcatcgtgcggctgtatgtgaagaggaggaagcctgtgtctgagaagatcatggagatcaagctgatcaagggccccaagggcctgggcttcagcattgctgggggcgtgggcaaccagcacatccctggggacaacagcatctacgtgaccaagatcatcgagggcggggccgcccacaaggatggcaagctgcagattggagacaagctgctggccgtgaacaacgtgtgcctggaggaggtgacccatgaggaggccgtgacagccctgaagaacaccagtgactttgtgtacctgaaggtggccaagcccacctccatgtacatgaatgatggctacgcccccccagacatcaccaacagcagcagccagcctgtggacaaccacgtgagccccagcagcttcctgggccagaccccagccagccctgcccgctacagccctgtgtccaaggctgtgctgggagatgatgagatcacccgggagcccaggaaggtggtgctgcaccggggcagcacaggcctgggcttcaacatcgtgggcggggaggatggagagggcatcttcatctccttcatcctggccggcggccctgctgacctgtctggagagctgaggaagggggaccgcatcatctctgtgaacagcgtggacctgcgggccgccagccatgagcaggccgccgccgccctgaagaatgccggccaggccgtgaccatcgtggcccagtacagacctgaggagtacagcagatttgaggccaagatccatgacctgcgggagcagatgatgaacagcagcatcagcagcggcagcggcagcctgcggaccagccagaagaggagcctgtatgtgcgggccctgtttgattatgacaagaccaaggacagcggcctgcccagccagggcctgaacttcaagtttggagacatcctgcacgtgatcaatgccagtgatgatgagtggtggcaggcccggcaggtgaccccagatggagagagtgatgaggtgggcgtcatccccagcaagagaagagtggagaagaaggagcgggcccggctgaagacagtgaagttcaacagcaagacccgggacaagggggagatcccagatgacatgggcagcaagggcctgaagcacgtgaccagcaatgccagtgacagcgagagcagctaccggggccaggaggagtatgtgctgtcctatgagcctgtgaaccagcaggaggtgaactacaccaggcctgtgatcatcctgggccccatgaaggaccgcatcaatgatgacctgatcagcgagttcccagacaagtttggcagctgtgtgccccacaccacccggcccaagagggactatgaggtggatggccgggactaccactttgtgaccagccgggagcagatggagaaggacatccaggagcacaagttcattgaagctggccagtacaacaaccacctgtatggcacctctgtgcagagcgtgcgggaggtggccgagaagggcaagcactgcatcctggatgtgtctggaaatgccatcaagaggctgcagatcgcccagctgtaccccatcagcatcttcatcaagcccaagtccatggagaacatcatggagatgaacaagaggctgacagaggagcaggccaggaagacctttgagcgggccatgaagctggagcaggagttcacagagcacttcaccgccatcgtgcagggcgacaccctggaggacatctacaaccaggtgaagcagatcatcgaggagcagagcggcagctacatctgggtgcctgccaaggagaagctgtag

SEQ ID NO: 150162 - DNA, 465 bp, synthetic construct
  misc_feature 1..465: note = Description of Artificial Sequence: Synthetic coding sequence
  source 1..465: mol_type = other DNA
atgcctgtgaggaagcaggacacccagagggccctgcacctgctggaggagtaccgcagcaagctgagccagacagaggaccggcagctgcggagcagcattgaaagagtcatcaacatcttccagagcaacctcttccaggccctgattgacatccaggagttctatgaggtgaccctgctggacaaccccaagtgcatcgacaggagcaagcccagcgagcccatccagcctgtgaacacctgggagatcagcagcctgcccagcagcacagtgaccagcgagaccctgcccagcagcctgagccccagcgtggagaagtaccgctaccaggatgaggacaccccaccccaggagcacatcagcccccagatcaccaatgaagtcatcggccctgagctggtgcacgtgtctgagaagaacctgtctgaaattgaaaatgtgcacggctttgtgagccactag

SEQ ID NO: 150163 - DNA, 2562 bp, synthetic construct; identical to SEQ ID NO: 150152
  misc_feature 1..2562: note = Description of Artificial Sequence: Synthetic coding sequence
  source 1..2562: mol_type = other DNA

SEQ ID NO: 150164 - DNA, 111 bp, synthetic construct
  misc_feature 1..111: note = Description of Artificial Sequence: Synthetic coding sequence
  source 1..111: mol_type = other DNA
atgcctgtgaggaagcaggacacccagagggccctgcacctgctggaggagtaccgcagcaagctgagccagacagaggaccggcagctgcggagcagcattgaaagatag

SEQ ID NO: 150165 - DNA, 372 bp, synthetic construct
  misc_feature 1..372: note = Description of Artificial Sequence: Synthetic coding sequence
  source 1..372: mol_type = other DNA
atgcctgtgaggaagcaggacacccagagggccctgcacctgctggaggagtaccgcagcaagctgagccagacagaggaccggcagctgcggagcagcattgaaagagtcatcaacatcttccagagcaacctcttccaggccctgattgacatccaggagttctatgaggtgaccctgctggacaaccccaagtgcatcgacaggagcaagcccagcgagcccatccagcctgtgaacacctgggagatcagcagcctgcccagcagcacagtgaccagcgagaccctgcccagcagcctgagccccagcgtggagaagtaccgctaccaggatgaggacaccccaccccaggagcacatcagcccctag

SEQ ID NO: 150166 - DNA, 2715 bp, synthetic construct; identical to SEQ ID NO: 150161
  misc_feature 1..2715: note = Description of Artificial Sequence: Synthetic coding sequence
  source 1..2715: mol_type = other DNA

SEQ ID NO: 150167 - DNA, 2682 bp, synthetic construct; identical to SEQ ID NO: 150154
  misc_feature 1..2682: note = Description of Artificial Sequence: Synthetic coding sequence
  source 1..2682: mol_type = other DNA

SEQ ID NO: 150168 - DNA, 2730 bp, synthetic construct
  misc_feature 1..2730: note = Description of Artificial Sequence: Synthetic coding sequence
  source 1..2730: mol_type = other DNA
atgaatgcctacctgaccaagcagcacagctgcagccggggcagtgatggcatggatgctgtgcgcagcgcccccaccctcatcagagatgcccactgtgcctgtggctggcagaggaactgccagggcctgggctacagcagccagaccatgcccagcagcggccctgggggccctgccagcaacagaactggaggcagcagcttcaacagaaccctgtgggacagcgtgaggaagagcccccacaagaccagcaccaagggcaagggcacctgtggggagcactgcacctgcccccacggctggttctccccagcccaggccagccctgcccccatcatcgtgaacacagacaccctggacaccatcccctacgtgaatggaacagaaattgaatatgaatttgaggagatcaccctggagcggggcaacagcggcctgggcttcagcattgctgggggcacagacaacccccacatcggagatgaccccggcatcttcatcaccaagatcatccctggaggagctgctgctgaagatggccgcctgcgggtgaatgactgcatcctgcgggtgaatgaggtggatgtgtctgaggtgagccacagcaaggctgtggaggccctgaaggaggccggcagcatcgtgcggctgtatgtgagaagaagaagacccatcctggagaccgtggtggagatcaagctgttcaagggccccaagggcctgggcttcagcattgctggaggagtgggcaaccagcacatccctggggacaacagcatctacgtgaccaagatcattgatggaggagctgcccagaaggatggccgcctgcaggtgggggaccggctgctgatggtgaacaactacagcctggaggaggtgacccatgaggaggccgtggccatcctgaagaacaccagcgaggtggtgtacctgaaggtgggcaagcccaccaccatctacatgacagacccctacggccccccagacatcacccacagctacagcccccccatggagaaccacctgctgagcggcaacaacggcaccctggagtacaagaccagcctgccccccatcagccctggccgctacagccccatccccaagcacatgctggtggatgatgactacacccggcccccagagcctgtgtacagcacagtgaacaagctgtgtgacaagccagccagccccaggcactacagccctgtggagtgtgacaagagcttcctgctgagcgccccctacagccactaccacctgggcctgctgcctgattctgagatgaccagccacagccagcacagcacagccacccggcagcccagcatgaccctgcagagagctgtgtccctggagggggagcccaggaaggtggtgctgcacaagggcagcacaggcctgggcttcaacatcgtgggcggggaggatggagagggcatctttgtgtccttcatcctggccggcggccctgctgacctgtctggagagctgcagagaggagaccagatcctgtctgtgaatggcatcgacctgcggggggccagccatgagcaggccgccgccgccctgaagggagctggccagacagtgaccatcatcgcccagtaccagcctgaggactatgccaggtttgaggccaagatccatgacctgcgggagcagatgatgaaccacagcatgagcagcggcagcggcagcctgcggaccaaccagaagaggagcctgtatgtgcgggccatgtttgattatgacaagagcaaggacagcggcctgcccagccagggcctgtccttcaagtatggagacatcctgcacgtgatcaatgccagtgatgatgagtggtggcaggccaggagagtgatgctggagggggacagcgaggagatgggcgtcatccccagcaagagaagagtggagaggaaggagcgggcccggctgaagacagtgaagttcaatgccaagccaggagtgattgacagcaagggcagcttcaatgacaagaggaagaagagcttcatcttcagcaggaagttccccttctacaagaacaaggagcagagcgagcaggagaccagtgaccctgagcggggccaggaggacctgatcctgtcctatgagcctgtgacccggcaggagatcaactacaccaggcctgtgatcatcctgggccccatgaaggaccgcatcaatgatgacctgatcagcgagttcccagacaagtttggcagctgtgtgccccacaccacccggcccaagagggactatgaggtggatggccgggactaccactttgtgatcagccgggagcagatggagaaggacatccaggagcacaagttcatcgaggccggccagtacaatgacaacctgtatggcacctctgtgcagagcgtgcgctttgtggccgagcggggcaagcactgcatcctggatgtgtctggaaatgccatcaagaggctgcaggtggcccagctgtaccccatcgccatcttcatcaagcccaggagcctggagcccctgatggagatgaacaagaggctgacagaggagcaggccaagaagacctatgaccgggccatcaagctggagcaggagtttggagagtacttcaccgccatcgtgcagggcgacaccctggaggacatctacaaccagtgcaagctggtgattgaggagcagagcggccccttcatctggatccccagcaaggagaagctgtag

SEQ ID NO: 150169 - DNA, 2376 bp, synthetic construct
  misc_feature 1..2376: note = Description of Artificial Sequence: Synthetic coding sequence
  source 1..2376: mol_type = other DNA
atgcagcacgccttcatcccagccagccctgcccccatcatcgtgaacacagacaccctggacaccatcccctacgtgaatggaacagaaattgaatatgaatttgaggagatcaccctggagcggggcaacagcggcctgggcttcagcattgctgggggcacagacaacccccacatcggagatgaccccggcatcttcatcaccaagatcatccctggaggagctgctgctgaagatggccgcctgcgggtgaatgactgcatcctgcgggtgaatgaggtggatgtgtctgaggtgagccacagcaaggctgtggaggccctgaaggaggccggcagcatcgtgcggctgtatgtgagaagaagaagacccatcctggagaccgtggtggagatcaagctgttcaagggccccaagggcctgggcttcagcattgctggaggagtgggcaaccagcacatccctggggacaacagcatctacgtgaccaagatcattgatggaggagctgcccagaaggatggccgcctgcaggtgggggaccggctgctgatggtgaacaactacagcctggaggaggtgacccatgaggaggccgtggccatcctgaagaacaccagcgaggtggtgtacctgaaggtgggcaagcccaccaccatctacatgacagacccctacggccccccagacatcacccacagctacagcccccccatggagaaccacctgctgagcggcaacaacggcaccctggagtacaagaccagcctgccccccatcagccctggccgctacagccccatccccaagcacatgctggtggatgatgactacacccggcccccagagcctgtgtacagcacagtgaacaagctgtgtgacaagccagccagccccaggcactacagccctgtggagtgtgacaagagcttcctgctgagcgccccctacagccactaccacctgggcctgctgcctgattctgagatgaccagccacagccagcacagcacagccacccggcagcccagcatgaccctgcagagagctgtgtccctggagggggagcccaggaaggtggtgctgcacaagggcagcacaggcctgggcttcaacatcgtgggcggggaggatggagagggcatctttgtgtccttcatcctggccggcggccctgctgacctgtctggagagctgcagagaggagaccagatcctgtctgtgaatggcatcgacctgcggggggccagccatgagcaggccgccgccgccctgaagggagctggccagacagtgaccatcatcgcccagtaccagcctgaggactatgccaggtttgaggccaagatccatgacctgcgggagcagatgatgaaccacagcatgagcagcggcagcggcagcctgcggaccaaccagaagaggagcctgtatgtgcgggccatgtttgattatgacaagagcaaggacagcggcctgcccagccagggcctgtccttcaagtatggagacatcctgcacgtgatcaatgccagtgatgatgagtggtggcaggccaggagagtgatgctggagggggacagcgaggagatgggcgtcatccccagcaagagaagagtggagaggaaggagcgggcccggctgaagacagtgaagttcaatgccaagccaggagtgattgacagcaagggggacatccctggcctgggagatgatggctacggcaccaagaccctgcggggccaggaggacctgatcctgtcctatgagcctgtgacccggcaggagatcaactacaccaggcctgtgatcatcctgggccccatgaaggaccgcatcaatgatgacctgatcagcgagttcccagacaagtttggcagctgtgtgccccacaccacccggcccaagagggactatgaggtggatggccgggactaccactttgtgatcagccgggagcagatggagaaggacatccaggagcacaagttcatcgaggccggccagtacaatgacaacctgtatggcacctctgtgcagagcgtgcgctttgtggccgagcggggcaagcactgcatcctggatgtgtctggaaatgccatcaagaggctgcaggtggcccagctgtaccccatcgccatcttcatcaagcccaggagcctggagcccctgatggagatgaacaagaggctgacagaggagcaggccaagaagacctatgaccgggccatcaagctggagcaggagtttggagagtacttcaccgccatcgtgcagggcgacaccctggaggacatctacaaccagtgcaagctggtgattgaggagcagagcggccccttcatctggatccccagcaaggagaagctgtag

SEQ ID NO: 150170 - DNA, 2928 bp, synthetic construct
  misc_feature 1..2928: note = Description of Artificial Sequence: Synthetic coding sequence
  source 1..2928: mol_type = other DNA
atgggcatcttcaagagcagcctcttccaggccctgctggacatccaggagttctatgaggtgaccctgctgaacagccagaagagctgtgagcagaagattgaggaggccaaccaggtgctgcagaagtgggagaagaccagcctgctggccccctgccacgaccggctgcagaagagcagcgagctgacagactgcagcggcagcaaagaaaatgccagctgcatcgagcagaacaaggagaaccagagctttgaaaatgaaacagatgagaccaccacccagaaccagggccgctgcccagcccagaactgcagcgtggaggccccagcctggatgcctgtgcaccactgcaccaagtaccgctaccaggatgaagatgcccctcatgaccacagcctgccccggctgacccatgaggtgcggggccctgagctggtgcacgtgtctgagaagaacctgagccagattgaaaatgtgcacggctacgtgctgcagagccacatcagccccctgaaggccagccctgcccccatcatcgtgaacacagacaccctggacaccatcccctacgtgaatggaacagaaattgaatatgaatttgaggagatcaccctggagcggggcaacagcggcctgggcttcagcattgctgggggcacagacaacccccacatcggagatgaccccggcatcttcatcaccaagatcatccctggaggagctgctgctgaagatggccgcctgcgggtgaatgactgcatcctgcgggtgaatgaggtggatgtgtctgaggtgagccacagcaaggctgtggaggccctgaaggaggccggcagcatcgtgcggctgtatgtgagaagaagaagacccatcctggagaccgtggtggagatcaagctgttcaagggccccaagggcctgggcttcagcattgctggaggagtgggcaaccagcacatccctggggacaacagcatctacgtgaccaagatcattgatggaggagctgcccagaaggatggccgcctgcaggtgggggaccggctgctgatggtgaacaactacagcctggaggaggtgacccatgaggaggccgtggccatcctgaagaacaccagcgaggtggtgtacctgaaggtgggcaagcccaccaccatctacatgacagacccctacggccccccagacatcacccacagctacagcccccccatggagaaccacctgctgagcggcaacaacggcaccctggagtacaagaccagcctgccccccatcagccctggccgctacagccccatccccaagcacatgctggtggatgatgactacacccggcccccagagcctgtgtacagcacagtgaacaagctgtgtgacaagccagccagccccaggcactacagccctgtggagtgtgacaagagcttcctgctgagcgccccctacagccactaccacctgggcctgctgcctgattctgagatgaccagccacagccagcacagcacagccacccggcagcccagcatgaccctgcagagagctgtgtccctggagggggagcccaggaaggtggtgctgcacaagggcagcacaggcctgggcttcaacatcgtgggcggggaggatggagagggcatctttgtgtccttcatcctggccggcggccctgctgacctgtctggagagctgcagagaggagaccagatcctgtctgtgaatggcatcgacctgcggggggccagccatgagcaggccgccgccgccctgaagggagctggccagacagtgaccatcatcgcccagtaccagcctgaggactatgccaggtttgaggccaagatccatgacctgcgggagcagatgatgaaccacagcatgagcagcggcagcggcagcctgcggaccaaccagaagaggagcctgtatgtgcgggccatgtttgattatgacaagagcaaggacagcggcctgcccagccagggcctgtccttcaagtatggagacatcctgcacgtgatcaatgccagtgatgatgagtggtggcaggccaggagagtgatgctggagggggacagcgaggagatgggcgtcatccccagcaagagaagagtggagaggaaggagcgggcccggctgaagacagtgaagttcaatgccaagccaggagtgattgacagcaagggcagcttcaatgacaagaggaagaagagcttcatcttcagcaggaagttccccttctacaagaacaaggagcagagcgagcaggagaccagtgaccctgagcggggccaggaggacctgatcctgtcctatgagcctgtgacccggcaggagatcaactacaccaggcctgtgatcatcctgggccccatgaaggaccgcatcaatgatgacctgatcagcgagttcccagacaagtttggcagctgtgtgccccacaccacccggcccaagagggactatgaggtggatggccgggactaccactttgtgatcagccgggagcagatggagaaggacatccaggagcacaagttcatcgaggccggccagtacaatgacaacctgtatggcacctctgtgcagagcgtgcgctttgtggccgagcggggcaagcactgcatcctggatgtgtctggaaatgccatcaagaggctgcaggtggcccagctgtaccccatcgccatcttcatcaagcccaggagcctggagcccctgatggagatgaacaagaggctgacagaggagcaggccaagaagacctatgaccgggccatcaagctggagcaggagtttggagagtacttcaccgccatcgtgcagggcgacaccctggaggacatctacaaccagtgcaagctggtgattgaggagcagagcggccccttcatctggatccccagcaaggagaagctgtag

SEQ ID NO: 150171 - DNA, 1005 bp, synthetic construct
  misc_feature 1..1005: note = Description of Artificial Sequence: Synthetic coding sequence
  source 1..1005: mol_type = other DNA
atgatgaaccacagcatgagcagcggcagcggcagcctgcggaccaaccagaagaggagcctgtatgtgcgggccatgtttgattatgacaagagcaaggacagcggcctgcccagccagggcctgtccttcaagtacggggacatcctgcacgtgatcaatgccagtgatgatgagtggtggcaggcccggcgggtgatgctggagggggacagcgaggagatgggcgtcatccccagcaagagaagagtggagaggaaggagcgggcccggctgaagacagtgaagttcaatgccaagccaggagtcatcgacagcaaaggagacatccctggcctgggagatgatggctacggcaccaagaccctgcggggccaggaggacctgatcctgtcctatgagcctgtgacccggcaggagatcaactacaccaggcctgtgatcatcctgggccccatgaaggaccgcatcaatgatgacctgatcagcgagttcccagacaagtttggcagctgtgtgccccacaccacccggcccaagagggactatgaggtggatggccgggactaccacttcgtcatcagccgggagcagatggagaaggacatccaggagcacaagttcattgaagctggccagtacaatgacaacctgtatggcacctctgtgcagagcgtgcgctttgtggccgagcggggcaagcactgcatcctggatgtgtctggaaatgccatcaagaggctgcaggtggcccagctgtaccccatcgccatcttcatcaagcccaggagcctggagcccctgatggagatgaacaagaggctgacagaggagcaggccaagaagacctatgaccgggccatcaagctggagcaggagtttggagagtacttcaccgccatcgtgcagggcgacaccctggaggacatctacaaccagtgcaagctggtgattgaggagcagagcggccccttcatctggatccccagcaaggagaagctgtag

SEQ ID NO: 150172 - DNA, 2613 bp, synthetic construct
  misc_feature 1..2613: note = Description of Artificial Sequence: Synthetic coding sequence
  source 1..2613: mol_type = other DNA
atgttctttgcctgctactgtgccctgcggaccaacgtgaagaagtaccgctaccaggatgaagatgcccctcatgaccacagcctgccccggctgacccatgaggtgcggggccctgagctggtgcacgtgtctgagaagaacctgagccagattgaaaatgtgcacggctacgtgctgcagagccacatcagccccctgaaggccagccctgcccccatcatcgtgaacacagacaccctggacaccatcccctacgtgaatggaacagaaattgaatatgaatttgaggagatcaccctggagcggggcaacagcggcctgggcttcagcattgctgggggcacagacaacccccacatcggagatgatcctggcatcttcatcaccaagatcatccctgggggcgctgctgctgaagatggccgcctgcgggtgaatgactgcatcctgcgggtgaatgaggtggatgtgtctgaggtgagccacagcaaggctgtggaggccctgaaggaggccggcagcatcgtgcggctgtatgtgagaagaagaagacccatcctggagaccgtggtggagatcaagctgttcaagggccccaagggcctgggcttcagcattgctgggggcgtgggcaaccagcacatccctggggacaacagcatctacgtgaccaagatcattgatggaggagctgcccagaaggatggccgcctgcaggtgggggaccggctgctgatggtgaacaactacagcctggaggaggtgacccatgaggaggccgtggccatcctgaagaacaccagcgaggtggtgtacctgaaggtgggcaagcccaccaccatctacatgacagacccctacggccccccagacatcacccacagctacagcccccccatggagaaccacctgctgagcggcaacaacggcaccctggagtacaagaccagcctgccccccatcagccctggccgctacagccccatccccaagcacatgctggtggatgatgactacaccaggcctcctgagcctgtgtacagcacagtgaacaagctgtgtgacaagccagccagccccaggcactacagccctgtggagtgtgacaagagcttcctgctgagcgccccctacagccactaccacctgggcctgctgcctgacagcgagatgaccagccacagccagcacagcacagccacccggcagcccagcatgaccctgcagagagctgtgtccctggagggggagcccaggaaggtggtgctgcacaagggcagcacaggcctgggcttcaacatcgtgggcggagaagatggagagggcatctttgtgtccttcatcctggccggcggccctgctgacctgagcggggagctgcagagaggagaccagatcctgtctgtgaatggaattgacctgcggggggccagccatgagcaggccgctgctgccctgaagggggccggccagacagtgaccatcatcgcccagtaccagccagaagattatgccaggtttgaggccaagatccatgacctgcgggagcagatgatgaaccacagcatgagcagcggcagcggcagcctgcggaccaaccagaagaggagcctgtatgtgcgggccatgtttgattatgacaagagcaaggacagcggcctgcccagccagggcctgtccttcaagtacggggacatcctgcacgtgatcaatgccagtgatgatgagtggtggcaggcccggcgggtgatgctggagggggacagcgaggagatgggcgtcatccccagcaagagaagagtggagaggaaggagcgggcccggctgaagacagtgaagttcaatgccaagccaggagtcatcgacagcaagggcagcttcaatgacaagaggaagaagagcttcatcttcagcaggaagttccccttctacaagaacaaggagcagagcgagcaggagaccagtgaccctgagcggggccaggaggacctgatcctgtcctatgagcctgtgacccggcaggagatcaactacaccaggcctgtgatcatcctgggccccatgaaggaccgcatcaatgatgacctgatcagcgagttcccagacaagtttggcagctgtgtgccccacaccacccggcccaagagggactatgaggtggatggccgggactaccacttcgtcatcagccgggagcagatggagaaggacatccaggagcacaagttcattgaagctggccagtacaatgacaacctgtatggcacctctgtgcagagcgtgcgctttgtggccgagcggggcaagcactgcatcctggatgtgtctggaaatgccatcaagaggctgcaggtggcccagctgtaccccatcgccatcttcatcaagcccaggagcctggagcccctgatggagatgaacaagaggctgacagaggagcaggccaagaagacctatgaccgggccatcaagctggagcaggagtttggagagtacttcaccgccatcgtgcagggcgacaccctggaggacatctacaaccagtgcaagctggtgattgaggagcagagcggccccttcatctggatccccagcaaggagaagctgtag

SEQ ID NO: 150173 - DNA, 1047 bp, synthetic construct
  misc_feature 1..1047: note = Description of Artificial Sequence: Synthetic coding sequence
  source 1..1047: mol_type = other DNA
atgatgaaccacagcatgagcagcggcagcggcagcctgcggaccaaccagaagaggagcctgtatgtgcgggccatgtttgattatgacaagagcaaggacagcggcctgcccagccagggcctgtccttcaagtacggggacatcctgcacgtgatcaatgccagtgatgatgagtggtggcaggcccggcgggtgatgctggagggggacagcgaggagatgggcgtcatccccagcaagagaagagtggagaggaaggagcgggcccggctgaagacagtgaagttcaatgccaagccaggagtcatcgacagcaaaggagacatccctggcctgggagatgatggctacggcaccaagaccctgaagcacgtgagcagcaatgccagtgacagcgagagcagctaccggggccaggaggacctgatcctgtcctatgagcctgtgacccggcaggagatcaactacaccaggcctgtgatcatcctgggccccatgaaggaccgcatcaatgatgacctgatcagcgagttcccagacaagtttggcagctgtgtgccccacaccacccggcccaagagggactatgaggtggatggccgggactaccacttcgtcatcagccgggagcagatggagaaggacatccaggagcacaagttcattgaagctggccagtacaatgacaacctgtatggcacctctgtgcagagcgtgcgctttgtggccgagcggggcaagcactgcatcctggatgtgtctggaaatgccatcaagaggctgcaggtggcccagctgtaccccatcgccatcttcatcaagcccaggagcctggagcccctgatggagatgaacaagaggctgacagaggagcaggccaagaagacctatgaccgggccatcaagctggagcaggagtttggagagtacttcaccgccatcgtgcagggcgacaccctggaggacatctacaaccagtgcaagctggtgattgaggagcagagcggccccttcatctggatccccagcaaggagaagctgtag

SEQ ID NO: 150174 - DNA, 2250 bp, synthetic construct
  misc_feature 1..2250: note = Description of Artificial Sequence: Synthetic coding sequence
  source 1..2250: mol_type = other DNA
atgcagaggccttctgtgtccagagctgagaactaccagctgctgtgggacaccatcgccagcctgaagcagtgtgagcaggccatgcagcacgccttcatccctgtgaatggaacagaaattgaatatgaatttgaggagatcaccctggagcggggcaacagcggcctgggcttcagcattgctgggggcacagacaacccccacatcggagatgaccccggcatcttcatcaccaagatcatccctggaggagctgctgctgaagatggccgcctgcgggtgaatgactgcatcctgcgggtgaatgaggtggatgtgtctgaggtgagccacagcaaggctgtggaggccctgaaggaggccggcagcatcgtgcggctgtatgtgagaagaagaagacccatcctggagaccgtggtggagatcaagctgttcaagggccccaagggcctgggcttcagcattgctggaggagtgggcaaccagcacatccctggggacaacagcatctacgtgaccaagatcattgatggaggagctgcccagaaggatggccgcctgcaggtgggggaccggctgctgatggtgaacaactacagcctggaggaggtgacccatgaggaggccgtggccatcctgaagaacaccagcgaggtggtgtacctgaaggtgggcaagcccaccaccatctacatgacagacccctacggccccccagacatcacccacagctacagcccccccatggagaaccacctgctgagcggcaacaacggcaccctggagtacaagaccagcctgccccccatcagccctggccgctacagccccatccccaagcacatgctggtggatgatgactacaccagccacagccagcacagcacagccacccggcagcccagcatgaccctgcagagagctgtgtccctggagggggagcccaggaaggtggtgctgcacaagggcagcacaggcctgggcttcaacatcgtgggcggggaggatggagagggcatctttgtgtccttcatcctggccggcggccctgctgacctgtctggagagctgcagagaggagaccagatcctgtctgtgaatggcatcgacctgcggggggccagccatgagcaggccgccgccgccctgaagggagctggccagacagtgaccatcatcgcccagtaccagcctgaggactatgccaggtttgaggccaagatccatgacctgcgggagcagatgatgaaccacagcatgagcagcggcagcggcagcctgcggaccaaccagaagaggagcctgtatgtgcgggccatgtttgattatgacaagagcaaggacagcggcctgcccagccagggcctgtccttcaagtatggagacatcctgcacgtgatcaatgccagtgatgatgagtggtggcaggccaggagagtgatgctggagggggacagcgaggagatgggcgtcatccccagcaagagaagagtggagaggaaggagcgggcccggctgaagacagtgaagttcaatgccaagccaggagtgattgacagcaagggggacatccctggcctgggagatgatggctacggcaccaagaccctgcggggccaggaggacctgatcctgtcctatgagcctgtgacccggcaggagatcaactacaccaggcctgtgatcatcctgggccccatgaaggaccgcatcaatgatgacctgatcagcgagttcccagacaagtttggcagctgtgtgccccacaccacccggcccaagagggactatgaggtggatggccgggactaccactttgtgatcagccgggagcagatggagaaggacatccaggagcacaagttcatcgaggccggccagtacaatgacaacctgtatggcacctctgtgcagagcgtgcgctttgtggccgagcggggcaagcactgcatcctggatgtgtctggaaatgccatcaagaggctgcaggtggcccagctgtaccccatcgccatcttcatcaagcccaggagcctggagcccctgatggagatgaacaagaggctgacagaggagcaggccaagaagacctatgaccgggccatcaagctggagcaggagtttggagagtacttcaccgccatcgtgcagggcgacaccctggaggacatctacaaccagtgcaagctggtgattgaggagcagagcggccccttcatctggatccccagcaaggagaagctgtag

SEQ ID NO: 150175 - DNA, 1005 bp, synthetic construct; identical to SEQ ID NO: 150171
  misc_feature 1..1005: note = Description of Artificial Sequence: Synthetic coding sequence
  source 1..1005: mol_type = other DNA

SEQ ID NO: 150176 - DNA, 2601 bp, synthetic construct
  misc_feature 1..2601: note = Description of Artificial Sequence: Synthetic coding sequence
  source 1..2601: mol_type = other DNA
atgttctttgcctgctactgtgccctgcggaccaacgtgaagaagtaccgctaccaggatgaagatgcccctcatgaccacagcctgccccggctgacccatgaggtgcggggccctgagctggtgcacgtgtctgagaagaacctgagccagattgaaaatgtgcacggctacgtgctgcagagccacatcagccccctgaaggccagccctgcccccatcatcgtgaacacagacaccctggacaccatcccctacgtgaatggaacagaaattgaatatgaatttgaggagatcaccctggagcggggcaacagcggcctgggcttcagcattgctgggggcacagacaacccccacatcggagatgatcctggcatcttcatcaccaagatcatccctgggggcgctgctgctgaagatggccgcctgcgggtgaatgactgcatcctgcgggtgaatgaggtggatgtgtctgaggtgagccacagcaaggctgtggaggccctgaaggaggccggcagcatcgtgcggctgtatgtgagaagaagaagacccatcctggagaccgtggtggagatcaagctgttcaagggccccaagggcctgggcttcagcattgctgggggcgtgggcaaccagcacatccctggggacaacagcatctacgtgaccaagatcattgatggaggagctgcccagaaggatggccgcctgcaggtgggggaccggctgctgatggtgaacaactacagcctggaggaggtgacccatgaggaggccgtggccatcctgaagaacaccagcgaggtggtgtacctgaaggtgggcaagcccaccaccatctacatgacagacccctacggccccccagacatcacccacagctacagcccccccatggagaaccacctgctgagcggcaacaacggcaccctggagtacaagaccagcctgccccccatcagccctggccgctacagccccatccccaagcacatgctggtggatgatgactacaccaggcctcctgagcctgtgtacagcacagtgaacaagctgtgtgacaagccagccagccccaggcactacagccctgtggagtgtgacaagagcttcctgctgagcgccccctacagccactaccacctgggcctgctgcctgacagcgagatgaccagccacagccagcacagcacagccacccggcagcccagcatgaccctgcagagagctgtgtccctggagggggagcccaggaaggtggtgctgcacaagggcagcacaggcctgggcttcaacatcgtgggcggagaagatggagagggcatctttgtgtccttcatcctggccggcggccctgctgacctgagcggggagctgcagagaggagaccagatcctgtctgtgaatggaattgacctgcggggggccagccatgagcaggccgctgctgccctgaagggggccggccagacagtgaccatcatcgcccagtaccagccagaagattatgccaggtttgaggccaagatccatgacctgcgggagcagatgatgaaccacagcatgagcagcggcagcggcagcctgcggaccaaccagaagaggagcctgtatgtgcgggccatgtttgattatgacaagagcaaggacagcggcctgcccagccagggcctgtccttcaagtacggggacatcctgcacgtgatcaatgccagtgatgatgagtggtggcaggcccggcgggtgatgctggagggggacagcgaggagatgggcgtcatccccagcaagagaagagtggagaggaaggagcgggcccggctgaagacagtgaagttcaatgccaagccaggagtcatcgacagcaaaggagacatccctggcctgggagatgatggctacggcaccaagaccctgaagcacgtgagcagcaatgccagtgacagcgagagcagctaccggggccaggaggacctgatcctgtcctatgagcctgtgacccggcaggagatcaactacaccaggcctgtgatcatcctgggccccatgaaggaccgcatcaatgatgacctgatcagcgagttcccagacaagtttggcagctgtgtgccccacaccacccggcccaagagggactatgaggtggatggccgggactaccacttcgtcatcagccgggagcagatggagaaggacatccaggagcacaagttcattgaagctggccagtacaatgacaacctgtatggcacctctgtgcagagcgtgcgctttgtggccgagcggggcaagcactgcatcctggatgtgtctggaaatgccatcaagaggctgcaggtggcccagctgtaccccatcgccatcttcatcaagcccaggagcctggagcccctgatggagatgaacaagaggctgacagaggagcaggccaagaagacctatgaccgggccatcaagctggagcaggagtttggagagtacttcaccgccatcgtgcagggcgacaccctggaggacatctacaaccagtgcaagctggtgattgaggagcagagcggccccttcatctggatccccagcaaggagaagctgtag

SEQ ID NO: 150177 - DNA, 285 bp, synthetic construct
  misc_feature 1..285: note = Description of Artificial Sequence: Synthetic coding sequence
  source 1..285: mol_type = other DNA
atgatgaaccacagcatgagcagcggcagcggcagcctgcggaccaaccagaagaggagcctgtatgtgcgggccatgtttgattatgacaagagcaaggacagcggcctgcccagccagggcctgtccttcaagtacggggacatcctgcacgtgatcaatgccagtgatgatgagtggtggcaggcccggcgggtgatgctggagggggacagcgaggagatgggcgtcatccccagcaagagaagagtggagaggaaggagcgggcccggctgaagacctag

SEQ ID NO: 150178 - DNA, 2559 bp, synthetic construct
  misc_feature 1..2559: note = Description of Artificial Sequence: Synthetic coding sequence
  source 1..2559: mol_type = other DNA
atgttctttgcctgctactgtgccctgcggaccaacgtgaagaagtaccgctaccaggatgaagatgcccctcatgaccacagcctgccccggctgacccatgaggtgcggggccctgagctggtgcacgtgtctgagaagaacctgagccagattgaaaatgtgcacggctacgtgctgcagagccacatcagccccctgaaggccagccctgcccccatcatcgtgaacacagacaccctggacaccatcccctacgtgaatggaacagaaattgaatatgaatttgaggagatcaccctggagcggggcaacagcggcctgggcttcagcattgctgggggcacagacaacccccacatcggagatgatcctggcatcttcatcaccaagatcatccctgggggcgctgctgctgaagatggccgcctgcgggtgaatgactgcatcctgcgggtgaatgaggtggatgtgtctgaggtgagccacagcaaggctgtggaggccctgaaggaggccggcagcatcgtgcggctgtatgtgagaagaagaagacccatcctggagaccgtggtggagatcaagctgttcaagggccccaagggcctgggcttcagcattgctgggggcgtgggcaaccagcacatccctggggacaacagcatctacgtgaccaagatcattgatggaggagctgcccagaaggatggccgcctgcaggtgggggaccggctgctgatggtgaacaactacagcctggaggaggtgacccatgaggaggccgtggccatcctgaagaacaccagcgaggtggtgtacctgaaggtgggcaagcccaccaccatctacatgacagacccctacggccccccagacatcacccacagctacagcccccccatggagaaccacctgctgagcggcaacaacggcaccctggagtacaagaccagcctgccccccatcagccctggccgctacagccccatccccaagcacatgctggtggatgatgactacaccaggcctcctgagcctgtgtacagcacagtgaacaagctgtgtgacaagccagccagccccaggcactacagccctgtggagtgtgacaagagcttcctgctgagcgccccctacagccactaccacctgggcctgctgcctgacagcgagatgaccagccacagccagcacagcacagccacccggcagcccagcatgaccctgcagagagctgtgtccctggagggggagcccaggaaggtggtgctgcacaagggcagcacaggcctgggcttcaacatcgtgggcggagaagatggagagggcatctttgtgtccttcatcctggccggcggccctgctgacctgagcggggagctgcagagaggagaccagatcctgtctgtgaatggaattgacctgcggggggccagccatgagcaggccgctgctgccctgaagggggccggccagacagtgaccatcatcgcccagtaccagccagaagattatgccaggtttgaggccaagatccatgacctgcgggagcagatgatgaaccacagcatgagcagcggcagcggcagcctgcggaccaaccagaagaggagcctgtatgtgcgggccatgtttgattatgacaagagcaaggacagcggcctgcccagccagggcctgtccttcaagtacggggacatcctgcacgtgatcaatgccagtgatgatgagtggtggcaggcccggcgggtgatgctggagggggacagcgaggagatgggcgtcatccccagcaagagaagagtggagaggaaggagcgggcccggctgaagacagtgaagttcaatgccaagccaggagtcatcgacagcaaaggagacatccctggcctgggagatgatggctacggcaccaagaccctgcggggccaggaggacctgatcctgtcctatgagcctgtgacccggcaggagatcaactacaccaggcctgtgatcatcctgggccccatgaaggaccgcatcaatgatgacctgatcagcgagttcccagacaagtttggcagctgtgtgccccacaccacccggcccaagagggactatgaggtggatggccgggactaccacttcgtcatcagccgggagcagatggagaaggacatccaggagcacaagttcattgaagctggccagtacaatgacaacctgtatggcacctctgtgcagagcgtgcgctttgtggccgagcggggcaagcactgcatcctggatgtgtctggaaatgccatcaagaggctgcaggtggcccagctgtaccccatcgccatcttcatcaagcccaggagcctggagcccctgatggagatgaacaagaggctgacagaggagcaggccaagaagacctatgaccgggccatcaagctggagcaggagtttggagagtacttcaccgccatcgtgcagggcgacaccctggaggacatctacaaccagtgcaagctggtgattgaggagcagagcggccccttcatctggatccccagcaaggagaagctgtag

SEQ ID NO: 150179 - DNA, 1863 bp, synthetic construct
  misc_feature 1..1863: note = Description of Artificial Sequence: Synthetic coding sequence
  source 1..1863: mol_type = other DNA
atggtgaacaactacagcctggaggaggtgacccatgaggaggccgtggccatcctgaagaacaccagcgaggtggtgtacctgaaggtgggcaagcccaccaccatctacatgacagacccctacggccccccagacatcacccacagctacagcccccccatggagaaccacctgctgagcggcaacaacggcaccctggagtacaagaccagcctgccccccatcagccctggccgctacagccccatccccaagcacatgctggtggatgatgactacaccaggcctcctgagcctgtgtacagcacagtgaacaagctgtgtgacaagccagccagccccaggcactacagccctgtggagtgtgacaagagcttcctgctgagcgccccctacagccactaccacctgggcctgctgcctgacagcgagatgaccagccacagccagcacagcacagccacccggcagcccagcatgaccctgcagagagctgtgtccctggagggggagcccaggaaggtggtgctgcacaagggcagcacaggcctgggcttcaacatcgtgggcggagaagatggagagggcatctttgtgtccttcatcctggccggcggccctgctgacctgagcggggagctgcagagaggagaccagatcctgtctgtgaatggaattgacctgcggggggccagccatgagcaggccgctgctgccctgaagggggccggccagacagtgaccatcatcgcccagtaccagccagaagattatgccaggtttgaggccaagatccatgacctgcgggagcagatgatgaaccacagcatgagcagcggcagcggcagcctgcggaccaaccagaagaggagcctgtatgtgcgggccatgtttgattatgacaagagcaaggacagcggcctgcccagccagggcctgtccttcaagtacggggacatcctgcacgtgatcaatgccagtgatgatgagtggtggcaggcccggcgggtgatgctggagggggacagcgaggagatgggcgtcatccccagcaagagaagagtggagaggaaggagcgggcccggctgaagacagtgaagttcaatgccaagccaggagtcatcgacagcaaaggagacatccctggcctgggagatgatggctacggcaccaagaccctgaagcacgtgagcagcaatgccagtgacagcgagagcagctaccggggccaggaggacctgatcctgtcctatgagcctgtgacccggcaggagatcaactacaccaggcctgtgatcatcctgggccccatgaaggaccgcatcaatgatgacctgatcagcgagttcccagacaagtttggcagctgtgtgccccacaccacccggcccaagagggactatgaggtggatggccgggactaccacttcgtcatcagccgggagcagatggagaaggacatccaggagcacaagttcattgaagctggccagtacaatgacaacctgtatggcacctctgtgcagagcgtgcgctttgtggccgagcggggcaagcactgcatcctggatgtgtctggaaatgccatcaagaggctgcaggtggcccagctgtaccccatcgccatcttcatcaagcccaggagcctggagcccctgatggagatgaacaagaggctgacagaggagcaggccaagaagacctatgaccgggccatcaagctggagcaggagtttggagagtacttcaccgccatcgtgcagggcgacaccctggaggacatctacaaccagtgcaagctggtgattgaggagcagagcggccccttcatctggatccccagcaaggagaagctgtag

SEQ ID NO: 150180 - DNA, 2928 bp, synthetic construct; identical to SEQ ID NO: 150170
  misc_feature 1..2928: note = Description of Artificial Sequence: Synthetic coding sequence
  source 1..2928: mol_type = other DNA

SEQ ID NO: 150181 - DNA, 2928 bp, synthetic construct
  misc_feature 1..2928: note = Description of Artificial Sequence: Synthetic coding sequence
  source 1..2928: mol_type = other DNA
tttggcttcatcgtgtctgtgcacttccagagctacctgaacatccaggagttctatgaggtgaccctgctgaacagccagaagagctgtgagcagaagattgaggaggccaaccaggtgctgcagaagtgggagaagaccagcctgctggccccctgccacgaccggctgcagaagagcagcgagctgacagactgcagcggcagcaaagaaaatgccagctgcatcgagcagaacaaggagaaccagagctttgaaaatgaaacagatgagaccaccacccagaaccagggccgctgcccagcccagaactgcagcgtggaggccccagcctggatgcctgtgcaccactgcaccaagtaccgctaccaggatgaagatgcccctcatgaccacagcctgccccggctgacccatgaggtgcggggccctgagctggtgcacgtgtctgagaagaacctgagccagattgaaaatgtgcacggctacgtgctgcagagccacatcagccccctgaaggccagccctgcccccatcatcgtgaacacagacaccctggacaccatcccctacgtgaatggaacagaaattgaatatgaatttgaggagatcaccctggagcggggcaacagcggcctgggcttcagcattgctgggggcacagacaacccccacatcggagatgaccccggcatcttcatcaccaagatcatccctggaggagctgctgctgaagatggccgcctgcgggtgaatgactgcatcctgcgggtgaatgaggtggatgtgtctgaggtgagccacagcaaggctgtggaggccctgaaggaggccggcagcatcgtgcggctgtatgtgagaagaagaagacccatcctggagaccgtggtggagatcaagctgttcaagggccccaagggcctgggcttcagcattgctggaggagtgggcaaccagcacatccctggggacaacagcatctacgtgaccaagatcattgatggaggagctgcccagaaggatggccgcctgcaggtgggggaccggctgctgatggtgaacaactacagcctggaggaggtgacccatgaggaggccgtggccatcctgaagaacaccagcgaggtggtgtacctgaaggtgggcaagcccaccaccatctacatgacagacccctacggccccccagacatcacccacagctacagcccccccatggagaaccacctgctgagcggcaacaacggcaccctggagtacaagaccagcctgccccccatcagccctggccgctacagccccatccccaagcacatgctggtggatgatgactacacccggcccccagagcctgtgtacagcacagtgaacaagctgtgtgacaagccagccagccccaggcactacagccctgtggagtgtgacaagagcttcctgctgagcgccccctacagccactaccacctgggcctgctgcctgattctgagatgaccagccacagccagcacagcacagccacccggcagcccagcatgaccctgcagagagctgtgtccctggagggggagcccaggaaggtggtgctgcacaagggcagcacaggcctgggcttcaacatcgtgggcggggaggatggagagggcatctttgtgtccttcatcctggccggcggccctgctgacctgtctggagagctgcagagaggagaccagatcctgtctgtgaatggcatcgacctgcggggggccagccatgagcaggccgccgccgccctgaagggagctggccagacagtgaccatcatcgcccagtaccagcctgaggactatgccaggtttgaggccaagatccatgacctgcgggagcagatgatgaaccacagcatgagcagcggcagcggcagcctgcggaccaaccagaagaggagcctgtatgtgcgggccatgtttgattatgacaagagcaaggacagcggcctgcccagccagggcctgtccttcaagtatggagacatcctgcacgtgatcaatgccagtgatgatgagtggtggcaggccaggagagtgatgctggagggggacagcgaggagatgggcgtcatccccagcaagagaagagtggagaggaaggagcgggcccggctgaagacagtgaagttcaatgccaagccaggagtgattgacagcaagggcagcttcaatgacaagaggaagaagagcttcatcttcagcaggaagttccccttctacaagaacaaggagcagagcgagcaggagaccagtgaccctgagcggggccaggaggacctgatcctgtcctatgagcctgtgacccggcaggagatcaactacaccaggcctgtgatcatcctgggccccatgaaggaccgcatcaatgatgacctgatcagcgagttcccagacaagtttggcagctgtgtgccccacaccacccggcccaagagggactatgaggtggatggccgggactaccactttgtgatcagccgggagcagatggagaaggacatccaggagcacaagttcatcgaggccggccagtacaatgacaacctgtatggcacctctgtgcagagcgtgcgctttgtggccgagcggggcaagcactgcatcctggatgtgtctggaaatgccatcaagaggctgcaggtggcccagctgtaccccatcgccatcttcatcaagcccaggagcctggagcccctgatggagatgaacaagaggctgacagaggagcaggccaagaagacctatgaccgggccatcaagctggagcaggagtttggagagtacttcaccgccatcgtgcagggcgacaccctggaggacatctacaaccagtgcaagctggtgattgaggagcagagcggccccttcatctggatccccagcaaggagaagctgtag

SEQ ID NO: 150182 - DNA, 2550 bp, synthetic construct
  misc_feature 1..2550: note = Description of Artificial Sequence: Synthetic coding sequence
  source 1..2550: mol_type = other DNA
atgcacaagcaccagcactgctgcaagtgcccagagtgctatgaggtgacccggctggccgccctgcggcggctggagcccccaggctacggggactggcaggtgcctgacccctacggccctgggggcggcaatggagccagcgctggctatggaggctacagcagccagaccctgcccagccaggccggggccacccccacccccaggaccaaggccaagctgatccccaccggcagagatgtgggccctgtgccccccaagcctgtgcctgggaagagcacccccaagctgaatggaagtggccccagctggtggccagagtgcacctgcaccaacagagactggtatgagcaggcccggcctgcccccctgctggtgaaccctgagaccctgaagcacagcctgtctgtgaatggaagtgatggcatgttcaagtatgaggagatcgtgctggagcggggcaacagcggcctgggcttcagcattgctgggggcatcgacaacccccacgtgcctgatgaccccggcatcttcatcaccaagatcatccctggaggagctgctgccatggatggccgcctgggcgtgaatgactgtgtgctgcgggtgaatgaggtggatgtgtctgaggtggtgcacagcagagctgtggaggccctgaaggaggccggccctgtggtgcggctggtggtgagaagacggcagcccccacctgagaccatcatggaggtgaacctgctgaagggccccaagggcctgggcttcagcattgctgggggcatcggcaaccagcacatccctggggacaacagcatctacatcaccaagatcattgaaggaggagctgcccagaaggatggccgcctgcagatcggggaccggctgctggccgtgaacaacaccaacctgcaggatgtgagacatgaggaggccgtggccagcctgaagaacaccagtgacatggtgtacctgaaggtggccaagccaggcagcctgcacctgaatgacatgtatgcccccccagactatgccagcaccttcaccgccctggccgacaaccacatcagccacaacagcagcctgggctacctgggcgctgtggagagcaaggtgtcctacccagccccaccccaggtgccccccacccgctacagccccatccccaggcacatgctggccgaggaggacttcacccgggagcccaggaagatcatcctgcacaagggcagcacaggcctgggcttcaacatcgtgggcggggaggatggagagggcatctttgtgtccttcatcctggccggcggccctgctgacctgtctggagagctgcggcggggggaccgcatcctgtctgtgaatggagtgaacctgagaaatgccacccatgagcaggccgccgccgccctgaagagagctggccagagcgtgaccatcgtggcccagtacagacctgaggagtacagcagatttgagagcaagatccatgacctgcgggagcagatgatgaacagctccatgagcagcggcagcggcagcctgcggaccagcgagaagaggagcctgtatgtgcgggccctgtttgattatgacaggacccgggacagctgcctgcccagccagggcctgtccttctcctatggagacatcctgcacgtgatcaatgccagtgatgatgagtggtggcaggcccggctggtgaccccccacggggagagcgagcagatcggggtcatccccagcaagaagagggtggagaagaaggagcgggcccggctgaagacagtgaagttccacgccaggacaggcatgattgagagcaacagagacttccctggcctgagtgatgactactatggagccaagaacctgaagggcgtgaccagcaacaccagtgacagcgagagcagcagcaagggccaggaggatgccatcctgtcctatgagcctgtgacccggcaggagatccactacgcccggcctgtgatcatcctgggccccatgaaggacagagtgaatgatgacctgatcagcgagttcccccacaagtttggcagctgtgtgccccacaccacccggccccggcgggacaatgaggtggatggccaggactaccactttgtggtgtcccgggagcagatggagaaggacatccaggacaacaagttcatcgaggccggccagttcaatgacaacctgtatggcaccagcatccagagcgtgcgggctgtggccgagcggggcaagcactgcatcctggatgtgtctggaaatgccatcaagaggctgcagcaggcccagctgtaccccatcgccatcttcatcaagcccaagagcattgaggccctgatggagatgaacagacggcagacctatgagcaggccaacaagatctatgacaaggccatgaagctggagcaggagtttggagagtacttcaccgccatcgtgcagggcgacagcctggaggagatctacaacaagatcaagcagatcatcgaggaccagagcggccactacatctgggtgcccagccctgagaagctgtag

SEQ ID NO: 150183 - DNA, 2454 bp, synthetic construct
  misc_feature 1..2454: note = Description of Artificial Sequence: Synthetic coding sequence
  source 1..2454: mol_type = other DNA
atgcacaagcaccagcactgctgcaagtgcccagagtgctatgaggtgacccggctggccgccctgcggcggctggagcccccaggctacggggactggcaggtgcctgacccctacggccctgggggcggcaatggagccagcgctggctatggaggctacagcagccagaccctgcccagccaggccggggccacccccacccccaggaccaaggccaagctgatccccaccggcagagatgtgggccctgtgccccccaagcctgtgcctgggaagagcacccccaagctgaatggaagtggccccagctggtggccagagtgcacctgcaccaacagagactggtatgagcaggtgaatggaagtgatggcatgttcaagtatgaggagatcgtgctggagcggggcaacagcggcctgggcttcagcattgctgggggcatcgacaacccccacgtgcctgatgaccccggcatcttcatcaccaagatcatccctggaggagctgctgccatggatggccgcctgggcgtgaatgactgtgtgctgcgggtgaatgaggtggatgtgtctgaggtggtgcacagcagagctgtggaggccctgaaggaggccggccctgtggtgcggctggtggtgagaagacggcagcccccacctgagaccatcatggaggtgaacctgctgaagggccccaagggcctgggcttcagcattgctgggggcatcggcaaccagcacatccctggggacaacagcatctacatcaccaagatcattgaaggaggagctgcccagaaggatggccgcctgcagatcggggaccggctgctggccgtgaacaacaccaacctgcaggatgtgagacatgaggaggccgtggccagcctgaagaacaccagtgacatggtgtacctgaaggtggccaagccaggcagcctgcacctgaatgacatgtatgcccccccagactatgccagcaccttcaccgccctggccgacaaccacatcagccacaacagcagcctgggctacctgggcgctgtggagagcaaggtgtcctacccagccccaccccaggtgccccccacccgctacagccccatccccaggcacatgctggccgaggaggacttcacccgggagcccaggaagatcatcctgcacaagggcagcacaggcctgggcttcaacatcgtgggcggggaggatggagagggcatctttgtgtccttcatcctggccggcggccctgctgacctgtctggagagctgcggcggggggaccgcatcctgtctgtgaatggagtgaacctgagaaatgccacccatgagcaggccgccgccgccctgaagagagctggccagagcgtgaccatcgtggcccagtacagacctgaggagtacagcagatttgagagcaagatccatgacctgcgggagcagatgatgaacagctccatgagcagcggcagcggcagcctgcggaccagcgagaagaggagcctgtatgtgcgggccctgtttgattatgacaggacccgggacagctgcctgcccagccagggcctgtccttctcctatggagacatcctgcacgtgatcaatgccagtgatgatgagtggtggcaggcccggctggtgaccccccacggggagagcgagcagatcggggtcatccccagcaagaagagggtggagaagaaggagcgggcccggctgaagacagtgaagttccacgccaggacaggcatgattgagagcaacagagacttccctggcctgagtgatgactactatggagccaagaacctgaagggccaggaggatgccatcctgtcctatgagcctgtgacccggcaggagatccactacgcccggcctgtgatcatcctgggccccatgaaggacagagtgaatgatgacctgatcagcgagttcccccacaagtttggcagctgtgtgccccacaccacccggccccggcgggacaatgaggtggatggccaggactaccactttgtggtgtcccgggagcagatggagaaggacatccaggacaacaagttcatcgaggccggccagttcaatgacaacctgtatggcaccagcatccagagcgtgcgggctgtggccgagcggggcaagcactgcatcctggatgtgtctggaaatgccatcaagaggctgcagcaggcccagctgtaccccatcgccatcttcatcaagcccaagagcattgaggccctgatggagatgaacagacggcagacctatgagcaggccaacaagatctatgacaaggccatgaagctggagcaggagtttggagagtacttcaccgccatcgtgcagggcgacagcctggaggagatctacaacaagatcaagcagatcatcgaggaccagagcggccactacatctgggtgcccagccctgagaagctgtag

SEQ ID NO: 150184 - DNA, 1101 bp, synthetic construct
  misc_feature 1..1101: note = Description of Artificial Sequence: Synthetic coding sequence
  source 1..1101: mol_type = other DNA
atgatgaacagctccatgagcagcggcagcggcagcctgcggaccagcgagaagaggagcctgtatgtgcgggccctgtttgattatgacaggacccgggacagctgcctgcccagccagggcctgtccttctcctatggagacatcctgcacgtgatcaatgccagtgatgatgagtggtggcaggcccggctggtgacccctcatggagagagcgagcagattggagtcatccccagcaagaagagggtggagaagaaggagcgggcccggctgaagacagtgaagttccacgccaggacaggcatgattgagagcaacagaagcatcaagaccaagaggaagaagagcttccggctgagcaggaagttccccttctacaagagcaaagaaaacatggcccaggagagcagcatccaggagcagggcgtgaccagcaacaccagtgacagcgagagcagcagcaagggccaggaggatgccatcctgtcctatgagcctgtgacccggcaggagatccactacgcccggcctgtgatcatcctgggccccatgaaggacagagtgaatgatgacctgatcagcgagttcccccacaagtttggcagctgtgtgccccacaccacccggccccggcgggacaatgaggtggatggccaggactaccactttgtggtgtcccgggagcagatggagaaggacatccaggacaacaagttcattgaagctggccagttcaatgacaacctgtatggcaccagcatccagagcgtgcgggctgtggccgagcggggcaagcactgcatcctggatgtgtctggaaatgccatcaagaggctgcagcaggcccagctgtaccccatcgccatcttcatcaagcccaagagcattgaggccctgatggagatgaacagacggcagacctatgagcaggccaacaagatctatgacaaggccatgaagctggagcaggagtttggagagtacttcaccgccatcgtgcagggcgacagcctggaggagatctacaacaagatcaagcagatcatcgaggaccagagcggccactacatctgggtgcccagccctgagaagctgtag

SEQ ID NO: 150185 - DNA, 2304 bp, synthetic construct
  misc_feature 1..2304: note = Description of Artificial Sequence: Synthetic coding sequence
  source 1..2304: mol_type = other DNA
atgagccagaggccccgggcccccaggtctgccctgtggctgctggccccacccctgctgcgctgggccccacccctgctgactgtgctgcacagcgacctcttccaggccctgctggacatcctggactactatgaggccagcctgtctgagagccagaagtaccgctaccaggatgaggacaccccacccctggagcacagccctgcccacctgcccaaccaggccaacagcccccctgtgattgtgaacacagacaccctggaggcccctggctatgagctgcaggtgaatggaacagaaggagagatggagtatgaggagatcaccctggagcggggcaacagcggcctgggcttcagcattgctgggggcacagacaacccccacatcggagatgaccccagcatcttcatcaccaagatcatccctgggggcgccgccgcccaggacggccgcctgcgggtgaatgacagcatcctgtttgtgaatgaggtggatgtgcgggaggtgacccacagcgctgctgtggaggccctgaaggaggccggcagcatcgtgcggctgtatgtgatgaggaggaagcccccagctgagaaggtgatggagatcaagctgatcaagggccccaagggcctgggcttcagcattgctgggggcgtgggcaaccagcacatccctggggacaacagcatctacgtgaccaagatcatcgagggcggggccgcccacaaggatggccgcctgcagattggagacaagatcctggccgtgaacagcgtgggcctggaggatgtgatgcatgaagatgctgtggccgccctgaagaacacctatgatgtggtgtacctgaaggtggccaagcccagcaatgcctacctgagtgacagctatgcccccccagacatcaccaccagctacagccagcacctggacaatgagatcagccacagcagctacctgggcacagactaccccacagccatgacccccaccagcccccggcgctacagccctgtggccaaggacctgctgggggaggaggacatcccccgggagcccaggagaattgtcatccaccggggcagcacaggcctgggcttcaacatcgtgggcggggaggatggagagggcatcttcatctccttcatcctggccggcggccctgctgacctgtctggagagctgaggaagggggaccagatcctgtctgtgaatggagtggacctgagaaatgccagccatgagcaggccgccatcgccctgaagaatgccggccagacagtgaccatcatcgcccagtacaagccagaggagtacagcagatttgaggccaagatccatgacctgcgggagcagctgatgaacagcagcctgggcagcggcacagccagcctgcggagcaaccccaagaggggcttctacatccgggccctgtttgattatgacaagaccaaggactgtggcttcctgagccaggccctgtccttccgctttggagatgtgctgcacgtgattgatgccagtgatgaggagtggtggcaggccaggagagtgcacagcgacagcgagacagatgacatcggcttcatccccagcaagagaagagtggagcggcgggagtggagccggctgaaggccaaggactggggcagcagcagcggcagccagggccgggaggacagcgtgctgtcctatgagaccgtgacccagatggaggtgcactacgcccggcccatcatcatcctgggccccaccaaggaccgggccaatgatgacctgctgtctgagttcccagacaagtttggcagctgtgtgccccacaccacccggcccaagcgggagtatgaaattgatggccgggactaccactttgtgagcagccgggagaagatggagaaggacatccaggcccacaagttcatcgaggccggccagtacaacagccacctgtatggcacctctgtgcagagcgtgcgggaggtggccgagcagggcaagcactgcatcctggatgtgtctgccaatgctgtgcggcggctgcaggccgcccacctgcaccccatcgccatcttcatccggcccaggagcctggagaatgtgctggagatcaacaagaggatcacagaggagcaggccaggaaggcctttgaccgggccaccaagctggagcaggagttcacagagtgcttcagcgccatcgtggagggggacagctttgaggagatctaccacaaggtgaagagggtgattgaggacctgagcggcccctacatctgggtgcctgcccgggagcggctgtag

SEQ ID NO: 150186 - DNA, 2166 bp, synthetic construct
  misc_feature 1..2166: note = Description of Artificial Sequence: Synthetic coding sequence
  source 1..2166: mol_type = other DNA
atggactgcctgtgcatcgtgaccaccaagaagtaccgctaccaggatgaggacaccccacccctggagcacagccctgcccacctgcccaaccaggccaacagcccccctgtgattgtgaacacagacaccctggaggcccctggctacgtgaatggaacagaaggagagatggagtatgaggagatcaccctggagcggggcaacagcggcctgggcttcagcattgctgggggcacagacaacccccacatcggagatgaccccagcatcttcatcaccaagatcatccctgggggcgccgccgcccaggacggccgcctgcgggtgaatgacagcatcctgtttgtgaatgaggtggatgtgcgggaggtgacccacagcgctgctgtggaggccctgaaggaggccggcagcatcgtgcggctgtatgtgatgaggaggaagcccccagctgagaaggtgatggagatcaagctgatcaagggccccaagggcctgggcttcagcattgctgggggcgtgggcaaccagcacatccctggggacaacagcatctacgtgaccaagatcatcgagggcggggccgcccacaaggatggccgcctgcagattggagacaagatcctggccgtgaacagcgtgggcctggaggatgtgatgcatgaagatgctgtggccgccctgaagaacacctatgatgtggtgtacctgaaggtggccaagcccagcaatgcctacctgagtgacagctatgcccccccagacatcaccaccagctacagccagcacctggacaatgagatcagccacagcagctacctgggcacagactaccccacagccatgacccccaccagcccccggcgctacagccctgtggccaaggacctgctgggggaggaggacatcccccgggagcccaggagaattgtcatccaccggggcagcacaggcctgggcttcaacatcgtgggcggggaggatggagagggcatcttcatctccttcatcctggccggcggccctgctgacctgtctggagagctgaggaagggggaccagatcctgtctgtgaatggagtggacctgagaaatgccagccatgagcaggccgccatcgccctgaagaatgccggccagacagtgaccatcatcgcccagtacaagccagaggagtacagcagatttgaggccaagatccatgacctgcgggagcagctgatgaacagcagcctgggcagcggcacagccagcctgcggagcaaccccaagaggggcttctacatccgggccctgtttgattatgacaagaccaaggactgtggcttcctgagccaggccctgtccttccgctttggagatgtgctgcacgtgattgatgccagtgatgaggagtggtggcaggccaggagagtgcacagcgacagcgagacagatgacatcggcttcatccccagcaagagaagagtggagcggcgggagtggagccggctgaaggccaaggactggggcagcagcagcggcagccagggccgggaggacagcgtgctgtcctatgagaccgtgacccagatggaggtgcactacgcccggcccatcatcatcctgggccccaccaaggaccgggccaatgatgacctgctgtctgagttcccagacaagtttggcagctgtgtgccccacaccacccggcccaagcgggagtatgaaattgatggccgggactaccactttgtgagcagccgggagaagatggagaaggacatccaggcccacaagttcatcgaggccggccagtacaacagccacctgtatggcacctctgtgcagagcgtgcgggaggtggccgagcagggcaagcactgcatcctggatgtgtctgccaatgctgtgcggcggctgcaggccgcccacctgcaccccatcgccatcttcatccggcccaggagcctggagaatgtgctggagatcaacaagaggatcacagaggagcaggccaggaaggcctttgaccgggccaccaagctggagcaggagttcacagagtgcttcagcgccatcgtggagggggacagctttgaggagatctaccacaaggtgaagagggtgattgaggacctgagcggcccctacatctgggtgcctgcccgggagcggctgtag

SEQ ID NO: 150187 - DNA, 1995 bp, synthetic construct
  misc_feature 1..1995: note = Description of Artificial Sequence: Synthetic coding sequence
  source 1..1995: mol_type = other DNA
atggagtatgaggagatcaccctggagcggggcaacagcggcctgggcttcagcattgctgggggcacagacaacccccacatcggagatgaccccagcatcttcatcaccaagatcatccctggaggagctgctgcccaggacggccgcctgcgggtgaatgacagcatcctgtttgtgaatgaggtggatgtgcgggaggtgacccacagcgctgctgtggaggccctgaaggaggccggcagcatcgtgcggctgtatgtgatgaggaggaagcccccagctgagaaggtgatggagatcaagctgatcaagggccccaagggcctgggcttcagcattgctggaggagtgggcaaccagcacatccctggggacaacagcatctacgtgaccaagatcattgaaggaggagctgcccacaaggatggccgcctgcagatcggggacaagatcctggccgtgaacagcgtgggcctggaggatgtgatgcatgaagatgctgtggccgccctgaagaacacctatgatgtggtgtacctgaaggtggccaagcccagcaatgcctacctgagtgacagctatgcccccccagacatcaccaccagctacagccagcacctggacaatgagatcagccacagcagctacctgggcacagactaccccacagccatgacccccaccagcccccggcgctacagccctgtggccaaggacctgctgggggaggaggacatcccccgggagccccggcgcatcgtcatccaccggggcagcacaggcctgggcttcaacatcgtgggcggagaagatggagagggcatcttcatctccttcatcctggccggcggccctgctgacctgagcggggagctgaggaaaggagaccagatcctgtctgtgaatggagtggacctgagaaatgccagccatgagcaggccgccatcgccctgaagaatgccggccagacagtgaccatcatcgcccagtacaagccagaggagtacagcagatttgaggccaagatccatgacctgcgggagcagctgatgaacagcagcctgggcagcggcacagccagcctgcggagcaaccccaagaggggcttctacatccgggccctgtttgattatgacaagaccaaggactgtggcttcctgagccaggccctgtccttccgctttggagatgtgctgcacgtgattgatgccagtgatgaggagtggtggcaggcccggcgggtgcacagcgacagcgagacagatgacatcggcttcatccccagcaagagaagagtggagcggcgggagtggagccggctgaaggccaaggactggggcagcagcagcggcagccagggcagagaagattctgtgctgtcctatgaaacagtgacccagatggaggtgcactacgcccggcccatcatcatcctgggccccaccaaggaccgggccaatgatgacctgctgtctgagttcccagacaagtttggcagctgtgtgccccacaccacccggcccaagcgggagtatgaaattgatggccgggactaccactttgtgagcagccgggagaagatggagaaggacatccaggcccacaagttcattgaagctggccagtacaacagccacctgtatggcacctctgtgcagagcgtgcgggaggtggccgagcagggcaagcactgcatcctggatgtgtctgccaatgctgtgcggcggctgcaggccgcccacctgcaccccatcgccatcttcatccggcccaggagcctggagaatgtgctggagatcaacaagaggatcacagaggagcaggccaggaaggcctttgaccgggccaccaagctggagcaggagttcacagagtgcttcagcgccatcgtggagggggacagctttgaggagatctaccacaaggtgaagagggtgattgaggacctgagcggcccctacatctgggtgcctgcccgggagcggctgtag

SEQ ID NO: 150188 - DNA, 2175 bp, synthetic construct
  misc_feature 1..2175: note = Description of Artificial Sequence: Synthetic coding sequence
  source 1..2175: mol_type = other DNA
atggactgcctgtgcatcgtgaccaccaagaagtaccgctaccaggatgaggacaccccacccctggagcacagccctgcccacctgcccaaccaggccaacagcccccctgtgattgtgaacacagacaccctggaggcccctggctacgtgctgcaggtgaatggaacagaaggagagatggagtatgaggagatcaccctggagcggggcaacagcggcctgggcttcagcattgctgggggcacagacaacccccacatcggagatgaccccagcatcttcatcaccaagatcatccctggaggagctgctgcccaggacggccgcctgcgggtgaatgacagcatcctgtttgtgaatgaggtggatgtgcgggaggtgacccacagcgctgctgtggaggccctgaaggaggccggcagcatcgtgcggctgtatgtgatgaggaggaagcccccagctgagaaggtgatggagatcaagctgatcaagggccccaagggcctgggcttcagcattgctggaggagtgggcaaccagcacatccctggggacaacagcatctacgtgaccaagatcattgaaggaggagctgcccacaaggatggccgcctgcagatcggggacaagatcctggccgtgaacagcgtgggcctggaggatgtgatgcatgaagatgctgtggccgccctgaagaacacctatgatgtggtgtacctgaaggtggccaagcccagcaatgcctacctgagtgacagctatgcccccccagacatcaccaccagctacagccagcacctggacaatgagatcagccacagcagctacctgggcacagactaccccacagccatgacccccaccagcccccggcgctacagccctgtggccaaggacctgctgggggaggaggacatcccccgggagccccggcgcatcgtcatccaccggggcagcacaggcctgggcttcaacatcgtgggcggagaagatggagagggcatcttcatctccttcatcctggccggcggccctgctgacctgagcggggagctgaggaaaggagaccagatcctgtctgtgaatggagtggacctgagaaatgccagccatgagcaggccgccatcgccctgaagaatgccggccagacagtgaccatcatcgcccagtacaagccagaggagtacagcagatttgaggccaagatccatgacctgcgggagcagctgatgaacagcagcctgggcagcggcacagccagcctgcggagcaaccccaagaggggcttctacatccgggccctgtttgattatgacaagaccaaggactgtggcttcctgagccaggccctgtccttccgctttggagatgtgctgcacgtgattgatgccagtgatgaggagtggtggcaggcccggcgggtgcacagcgacagcgagacagatgacatcggcttcatccccagcaagagaagagtggagcggcgggagtggagccggctgaaggccaaggactggggcagcagcagcggcagccagggcagagaagattctgtgctgtcctatgaaacagtgacccagatggaggtgcactacgcccggcccatcatcatcctgggccccaccaaggaccgggccaatgatgacctgctgtctgagttcccagacaagtttggcagctgtgtgccccacaccacccggcccaagcgggagtatgaaattgatggccgggactaccactttgtgagcagccgggagaagatggagaaggacatccaggcccacaagttcattgaagctggccagtacaacagccacctgtatggcacctctgtgcagagcgtgcgggaggtggccgagcagggcaagcactgcatcctggatgtgtctgccaatgctgtgcggcggctgcaggccgcccacctgcaccccatcgccatcttcatccggcccaggagcctggagaatgtgctggagatcaacaagaggatcacagaggagcaggccaggaaggcctttgaccgggccaccaagctggagcaggagttcacagagtgcttcagcgccatcgtggagggggacagctttgaggagatctaccacaaggtgaagagggtgattgaggacctgagcggcccctacatctgggtgcctgcccgggagcggctgtag

SEQ ID NO: 150189 - DNA, 2304 bp, synthetic construct
  misc_feature 1..2304: note = Description of Artificial Sequence: Synthetic coding sequence
  source 1..2304: mol_type = other DNA
atgagccagaggccccgggcccccaggtctgccctgtggctgctggccccacccctgctgcgctgggccccacccctgctgactgtgctgcacagcgacctcttccaggccctgctggacatcctggactactatgaggccagcctgtctgagagccagaagtaccgctaccaggatgaggacaccccacccctggagcacagccctgcccacctgcccaaccaggccaacagcccccctgtgattgtgaacacagacaccctggaggcccctggctacgtgctgcaggtgaatggaacagaaggagagatggagtatgaggagatcaccctggagcggggcaacagcggcctgggcttcagcattgctgggggcacagacaacccccacatcggagatgaccccagcatcttcatcaccaagatcatccctgggggcgccgccgcccaggacggccgcctgcgggtgaatgacagcatcctgtttgtgaatgaggtggatgtgcgggaggtgacccacagcgctgctgtggaggccctgaaggaggccggcagcatcgtgcggctgtatgtgatgaggaggaagcccccagctgagaaggtgatggagatcaagctgatcaagggccccaagggcctgggcttcagcattgctgggggcgtgggcaaccagcacatccctggggacaacagcatctacgtgaccaagatcatcgagggcggggccgcccacaaggatggccgcctgcagattggagacaagatcctggccgtgaacagcgtgggcctggaggatgtgatgcatgaagatgctgtggccgccctgaagaacacctatgatgtggtgtacctgaaggtggccaagcccagcaatgcctacctgagtgacagctatgcccccccagacatcaccaccagctacagccagcacctggacaatgagatcagccacagcagctacctgggcacagactaccccacagccatgacccccaccagcccccggcgctacagccctgtggccaaggacctgctgggggaggaggacatcccccgggagcccaggagaattgtcatccaccggggcagcacaggcctgggcttcaacatcgtgggcggggaggatggagagggcatcttcatctccttcatcctggccggcggccctgctgacctgtctggagagctgaggaagggggaccagatcctgtctgtgaatggagtggacctgagaaatgccagccatgagcaggccgccatcgccctgaagaatgccggccagacagtgaccatcatcgcccagtacaagccagaggagtacagcagatttgaggccaagatccatgacctgcgggagcagctgatgaacagcagcctgggcagcggcacagccagcctgcggagcaaccccaagaggggcttctacatccgggccctgtttgattatgacaagaccaaggactgtggcttcctgagccaggccctgtccttccgctttggagatgtgctgcacgtgattgatgccagtgatgaggagtggtggcaggccaggagagtgcacagcgacagcgagacagatgacatcggcttcatccccagcaagagaagagtggagcggcgggagtggagccggctgaaggccaaggactggggcagcagcagcggcagccagggccgggaggacagcgtgctgtcctatgagaccgtgacccagatggaggtgcactacgcccggcccatcatcatcctgggccccaccaaggaccgggccaatgatgacctgctgtctgagttcccagacaagtttggcagctgtgtgccccacaccacccggcccaagcgggagtatgaaattgatggccgggactaccactttgtgagcagccgggagaagatggagaaggacatccaggcccacaagttcatcgaggccggccagtacaacagccacctgtatggcacctctgtgcagagcgtgcgggaggtggccgagcagggcaagcactgcatcctggatgtgtctgccaatgctgtgcggcggctgcaggccgcccacctgcaccccatcgccatcttcatccggcccaggagcctggagaatgtgctggagatcaacaagaggatcacagaggagcaggccaggaaggcctttgaccgggccaccaagctggagcaggagttcacagagtgcttcagcgccatcgtggagggggacagctttgaggagatctaccacaaggtgaagagggtgattgaggacctgagcggcccctacatctgggtgcctgcccgggagcggctgtag

SEQ ID NO: 150190 - DNA, 2004 bp, synthetic construct
  misc_feature 1..2004: note = Description of Artificial Sequence: Synthetic coding sequence
  source 1..2004: mol_type = other DNA
atgagccagaggccccgggcccccaggtctgccctgtggctgctggccccacccctgctgcgctgggccccacccctgctgactgtgctgcacagcgacctcttccaggccctgctggacatcctggactactatgaggccagcctgtctgagagccagaagtaccgctaccaggatgaggacaccccacccctggagcacagccctgcccacctgcccaaccaggccaacagcccccctgtgattgtgaacacagacaccctggaggcccctggctatgagctgcaggtgaatggaacagaaggagagatggagtatgaggagatcaccctggagcggggcaacagcggcctgggcttcagcattgctgggggcacagacaacccccacatcggagatgaccccagcatcttcatcaccaagatcatccctgggggcgccgccgcccaggacggccgcctgcgggtgaatgacagcatcctgtttgtgaatgaggtggatgtgcgggaggtgacccacagcgctgctgtggaggccctgaaggaggccggcagcatcgtgcggctgtatgtgatgaggaggaagcccccagctgagaaggtgatggagatcaagctgatcaagggccccaagggcctgggcttcagcattgctgggggcgtgggcaaccagcacatccctggggacaacagcatctacgtgaccaagatcatcgagggcggggccgcccacaaggatggccgcctgcagattggagacaagatcctggccgtgaacagcgtgggcctggaggatgtgatgcatgaagatgctgtggccgccctgaagaacacctatgatgtggtgtacctgaaggtggccaagcccagcaatgcctacctgagtgacagctatgcccccccagacatcaccaccagctacagccagcacctggacaatgagatcagccacagcagctacctgggcacagactaccccacagccatgacccccaccagcccccggcgctacagccctgtggccaaggacctgctgggggaggaggacatcccccgggagcccaggagaattgtcatccaccggggcagcacaggcctgggcttcaacatcgtgggcggggaggatggagagggcatcttcatctccttcatcctggccggcggccctgctgacctgtctggagagctgaggaagggggaccagatcctgtctgtgaatggagtggacctgagaaatgccagccatgagcaggccgccatcgccctgaagaatgccggccagacagtgaccatcatcgcccagtacaagccagaggagtacagcagatttgaggccaagatccatgacctgcgggagcagctgatgaacagcagcctgggcagcggcacagccagcctgcggagcaaccccaagaggggcttctacatccgggccctgtttgattatgacaagaccaaggactgtggcttcctgagccaggccctgtccttccgctttggagatgtgctgcacgtgattgatgccagtgatgaggagtggtggcaggccaggagagtgcacagcgacagcgagacagatgacatcggcttcatccccagcaagagaagagtggagcggcgggagtggagccggctgaaggccaaggactggggcagcagcagcggcagccagggccgggaggacagcgtgctgtcctatgagaccgtgacccagatggaggtgcactacgcccggcccatcatcatcctgggccccaccaaggaccgggccaatgatgacctgctgtctgagttcccagacaagtttggcagctgtgtgccccacaccacccggcccaagcgggagtatgaaattgatggccgggactaccactttgtgagcagccgggagaagatggagaaggacatccaggcccacaagttcatcgaggccggccagtacaacagccacctgtatggcacctctgtgcagagcgtgcgggaggtggccgagcagagggactag

SEQ ID NO: 150191 - DNA, 4740 bp, synthetic construct
  misc_feature 1..4740: note = Description of Artificial Sequence: Synthetic coding sequence
  source 1..4740: mol_type = other DNA
atggagccccagaggcgggagctgctggcccagtgccagcagagcctggcccaggccatgacagaggtggaggccgtgctgggcctgctggaggccgccggggccctgagccctggagagcggcggcagctggatgaggaggccggcggggccaaggccgagctgctgctgaagctgctgctggccaaggagcgggaccacttccaggacctgcgggccgccctggagaagacccagccccacctgctgcccatcctgtacctgaatggagtggtgggccccccccagcctgctgagggcgccggcagcacctacagcgtgctgagcaccatgcccagcgacagcgagagcagcagcagcctgagctctgtgggcaccaccgggaaggcccccagccccccacccctgctgacagaccagcaggtgaatgagaaggtggagaacctgagcatccagctgcggctgatgacccgggagagaaatgagctgaggaagaggctggcctttgccacccacggcacagcctttgacaagaggccctaccaccggctgaacccagactatgaaaggctgaagatccagtgtgtgcgggccatgtctgacctgcagagcctgcagaaccagcacaccaatgccctgaagagatgtgaggaggtggccaaggagacagacttctaccacaccctgcacagccggctgctgagtgaccagacccggctgaaggatgatgtggacatgctgcggcgggagaatggccagctgctgcgggagaggaacctgctgcagcagagctgggaggacatgaagaggctgcacgaggaggaccagaaggagattggagacctgcgggcccagcagcagcaggtgctgaagcacaacggcagcagcgagatcctgaacaagctgtatgacacagccatggacaagctggaggtggtgaagaaggactatgatgccctgaggaagcgctacagcgagaaggtggccatccacaatgctgacctgagccggctggagcagctgggggaggagaaccagaggctgctgaagcagacagagatgctgacccagcagagggacacagccatccagctgcagcaccagtgtgccctgagcctgcggagatttgaggccatccaccacgagctgaacaaggccacagcccagaacaaggacctgcagtgggagatggagctgctgcagagcgagctgacagagctgcggaccacccaggtgaagacagccaaggagagcgagaagtaccgggaggagagagatgctgtgtacagcgagtacaagctgatcatgtctgagcgggaccaggtgatcagcgagctggacaagctgcagacagaggtggagctggccgagagcaagctgaagagcagcaccagcgagaagaaggccgccaatgaggagatggaggccctgcggcagatcaaggacacagtgaccatggatgctggccgggccaacaaggaggtggagatcctgaggaagcagtgcaaggccctgtgccaggagctgaaggaggccctgcaggaggctgatgtggccaagtgccggcgggactgggccttccaggagcgggacaagatcgtggccgagcgggacagcatccgcaccctgtgtgacaacctgcggcgggagcgggacagagctgtgtctgagctggccgaggccctgcggagcctggatgacaccaggaagcagaagaatgatgtgtcccgggagctgaaggagctgaaggagcagatggagagccagctggagaaggaggcccgcttccggcagctgatggcccacagcagccatgattctgccatcgacacagacagcatggagtgggagacagaggtggtggagtttgagcgggagacagaggacatcgacctgaaggccctgggctttgacatggccgagggcgtgaatgagccctgcttccctggggactgtggcatctttgtgaccaaggtggacaagggcagcattgctgatggccgcctgcgggtgaatgactggctgctgcgcatcaatgatgtggacctgatcaacaaggacaagaagcaggccatcaaggccctgctgaatggagagggcgccatcaacatggtggtgagaagaaggaagagcctgggcggcaaggtggtgacccccctgcacatcaacctgagcggccagaaggacagcggcatcagcctggagaatggagtgtatgctgctgctgtgctgcccggcagccctgctgccaaggagggcagcctggccgtgggggacagaattgtggccatcaatggaattgccctggacaacaagagcctgaatgaatgtgagagcctgctgcggagctgccaggacagcctgaccctgagcctgctgaaggagcagaagtgtgtgcctgccagcggggagctgagccctgagctgcaggagtgggccccctacagccctggccacagcagccgccacagcaacccccccctgtaccccagccggcccagcgtgggcaccgtgcccaggagcctgacccccagcaccaccgtgagcagcatcctgaggaaccccatctacacagtgcgcagccaccgggtgggcccctgcagcagccccccagctgccagagatgctggcccccagggcctgcaccccagcgtgcagcaccagggccgcctgagcctggacctgagccacaggacctgcagcgactacagcgagatgagggccacccacggcagcaacagcctgcccagcagcgcccggctgggcagcagcagcaacctgcagttcaaggccgagcgcatcaagatccccagcaccccccgctaccccaggtctgtggtgggcagcgagcggggctctgtgagccacagcgagtgcagcaccccaccccagagccccctgaacatcgacaccctgagcagctgcagccagagccagaccagcgccagcaccctgcccagaattgctgtgaacccagccagcctgggggagaggaggaaggaccggccctacgtggaggagcccaggcatgtgaaggtgcagaagggcagcgagcccctgggcatcagcatcgtgtctggagagaagggcggcatctacgtgtccaaggtgacagtgggcagcatcgcccaccaggccggcctggagtatggagaccagctgctggagttcaacggcatcaacctgcggagcgccacagagcagcaggcccggctcatcatcggccagcagtgtgacaccatcaccatcctggcccagtacaacccccacgtgcaccagctgagcagccacagccgcagcagcagccacctggaccctgctggcacccacagcaccctgcagggcagcggcaccaccaccccagagcaccccagcgtgattgaccccctgatggagcaggatgagggccccagcaccccaccagccaagcagagcagcagcagaattgctggagatgccaacaagaagaccctggagccccgggtggtgttcatcaagaagagccagctggagctgggcgtgcacctgtgtggcggcaacctgcacggcgtgtttgtggccgaggtggaggatgacagccctgccaagggcccagatggcctggtgcctggggacctgatcctggagtatggcagcctggatgtgaggaacaagacagtggaggaggtgtatgtggagatgctgaagcccagagatggagtgcggctgaaggtgcagtacagacctgaggagttcaccaaggccaagggcctgcccggggacagcttctacatccgggccctgtatgaccggctggctgatgtggagcaggagctgtccttcaagaaggatgacatcctgtatgtggatgacaccctgccccagggcaccttcggctcctggatggcctggcagctggatgaaaatgcccagaagatccagaggggccagatccccagcaaatatgtgatggaccaggagttcagccggcggctgtccatgtctgaggtgaaggatgacaacagcgccaccaagaccctgtctgctgctgcccggcgctccttcttccggaggaagcacaagcacaagaggagcggcagcaaggatggcaaggacctgctggccctggatgccttcagcagtgacagcatccccctgtttgaagattctgtgtccctggcctaccagagggtgcagaaggtggactgcacagccctgcggcctgtgctgatcctgggccccctgctggatgtggtgaaggagatgctggtgaatgaggcccctgggaagttctgccgctgccccctggaggtgatgaaggccagccagcaggccatcgagcggggcgtgaaggactgcctgtttgtggactacaagagaagaagtggccactttgatgtgaccaccgtggccagcatcaaggagatcacagagaagaacagacactgcctgctggacatcgcccctcatgccatcgagcggctgcaccacatgcacatctaccccatcgtcatcttcatccactacaagagcgccaagcacatcaaggagcagagggaccccatctacctgcgggacaaggtgacccagaggcacagcaaggagcagtttgaggccgcccagaagctggagcaggagtacagccgctacttcaccggggtcatccagggcggggccctgagcagcatctgcacccagatcctggccatggtgaaccaggagcagaacaaggtgctgtggatcccagcctgccccctgtag

SEQ ID NO: 150192 - DNA, 5760 bp, synthetic construct
  misc_feature 1..5760: note = Description of Artificial Sequence: Synthetic coding sequence
  source 1..5760: mol_type = other DNA
atggagccccagaggcgggagctgctggcccagtgccagcagagcctggcccaggccatgacagaggtggaggccgtgctgggcctgctggaggccgccggggccctgagccctggagagcggcggcagctggatgaggaggccggcggggccaaggccgagctgctgctgaagctgctgctggccaaggagcgggaccacttccaggacctgcgggccgccctggagaagacccagccccacctgctgcccatcctgtacctgaatggagtggtgggccccccccagcctgctgagggcgccggcagcacctacagcgtgctgagcaccatgcccagcgacagcgagagcagcagcagcctgagctctgtgggcaccaccgggaaggcccccagccccccacccctgctgacagaccagcaggtgaatgagaaggtggagaacctgagcatccagctgcggctgatgacccgggagagaaatgagctgaggaagaggctggcctttgccacccacggcacagcctttgacaagaggccctaccaccggctgaacccagactatgaaaggctgaagatccagtgtgtgcgggccatgtctgacctgcagagcctgcagaaccagcacaccaatgccctgaagagatgtgaggaggtggccaaggagacagacttctaccacaccctgcacagccggctgctgagtgaccagacccggctgaaggatgatgtggacatgctgcggcgggagaatggccagctgctgcgggagaggaacctgctgcagcagagctgggaggacatgaagaggctgcacgaggaggaccagaaggagattggagacctgcgggcccagcagcagcaggtgctgaagcacaacggcagcagcgagatcctgaacaagctgtatgacacagccatggacaagctggaggtggtgaagaaggactatgatgccctgaggaagcgctacagcgagaaggtggccatccacaatgctgacctgagccggctggagcagctgggggaggagaaccagaggctgctgaagcagacagagatgctgacccagcagagggacacagccatccagctgcagcaccagtgtgccctgagcctgcggagatttgaggccatccaccacgagctgaacaaggccacagcccagaacaaggacctgcagtgggagatggagctgctgcagagcgagctgacagagctgcggaccacccaggtgaagacagccaaggagagcgagaagtaccgggaggagagagatgctgtgtacagcgagtacaagctgatcatgtctgagcgggaccaggtgatcagcgagctggacaagctgcagacagaggtggagctggccgagagcaagctgaagagcagcaccagcgagaagaaggccgccaatgaggagatggaggccctgcggcagatcaaggacacagtgaccatggatgctggccgggccaacaaggaggtggagatcctgaggaagcagtgcaaggccctgtgccaggagctgaaggaggccctgcaggaggctgatgtggccaagtgccggcgggactgggccttccaggagcgggacaagatcgtggccgagcgggacagcatccgcaccctgtgtgacaacctgcggcgggagcgggacagagctgtgtctgagctggccgaggccctgcggagcctggatgacaccaggaagcagaagaatgatgtgtcccgggagctgaaggagctgaaggagcagatggagagccagctggagaaggaggcccgcttccggcagctgatggcccacagcagccatgattctgccatcgacacagacagcatggagtgggagacagaggtggtggagtttgagcgggagacagaggacatcgacctgaaggccctgggctttgacatggccgagggcgtgaatgagccctgcttccctggggactgtggcatctttgtgaccaaggtggacaagggcagcattgctgatggccgcctgcgggtgaatgactggctgctgcgcatcaatgatgtggacctgatcaacaaggacaagaagcaggccatcaaggccctgctgaatggagagggcgccatcaacatggtggtgagaagaaggaagagcctgggcggcaaggtggtgacccccctgcacatcaacctgagcggccagaaggacagcggcatcagcctggagaatggagtgtatgctgctgctgtgctgcccggcagccctgctgccaaggagggcagcctggccgtgggggacagaattgtggccatcaatggaattgccctggacaacaagagcctgaatgaatgtgagagcctgctgcggagctgccaggacagcctgaccctgagcctgctgaaggtgttcccccagagcagctcctggagcggccagaacatctttgagaacatcaaggacagcgacaagatgctgtccttccgggcccacggccctgaggtgcaggcccacaacaagaggaacctgatccagcacaacaacagcacccagacagacatcttctacacagaccggctggaggacaggaaggagcccggccccccaggcggcagcagcagcttcctgcacaagcccttccctgggggccccctgcaggtgtgcccccaggcctgccccagcgccagcgagaggagcctgagcagcttcagaagtgatgccagcggggaccggggcttcggcctggtggatgtgcggggcagaagacccctgctgccctttgaaacagaggtgggcccctgtggggtgggggaggccagcctggacaaggctgacagcgagggcagcaacagcggcggcacctggcccaaggccatgctgagcagcacagctgtgcctgagaagctgtctgtgtacaagaagcccaagcagaggaagagcatctttgaccccaacaccttcaagaggccccagaccccacccaagattgactacctgctgcccggccctggccctgcccacagcccccagcccagcaagagagctggccccctgaccccacccaagcccccaagaagaagtgacagcatcaagttccagcaccggctggagaccagcagcgagagcgaggccaccctggtgggcagcagccccagcaccagccccccatctgccctgcccccagatgtggaccctggagagcccatgcacgccagcccccccaggaaggcccgggtgagaattgccagcagctactacccagaaggagatggagacagcagccacctgcctgccaagaagagctgtgatgaggacctgaccagccagaaggtggatgagctgggccagaagagaagaagacccaagagcgcccccagcttccggcccaagctggcccctgtggtgatcccagcccagttcctggaggagcagaagtgtgtgcctgccagcggggagctgagccctgagctgcaggagtgggccccctacagccctggccacagcagccgccacagcaacccccccctgtaccccagccggcccagcgtgggcaccgtgcccaggagcctgacccccagcaccaccgtgagcagcatcctgaggaaccccatctacacagtgcgcagccaccgggtgggcccctgcagcagccccccagctgccagagatgctggcccccagggcctgcaccccagcgtgcagcaccagggccgcctgagcctggacctgagccacaggacctgcagcgactacagcgagatgagggccacccacggcagcaacagcctgcccagcagcgcccggctgggcagcagcagcaacctgcagttcaaggccgagcgcatcaagatccccagcaccccccgctaccccaggtctgtggtgggcagcgagcggggctctgtgagccacagcgagtgcagcaccccaccccagagccccctgaacatcgacaccctgagcagctgcagccagagccagaccagcgccagcaccctgcccagaattgctgtgaacccagccagcctgggggagaggaggaaggaccggccctacgtggaggagcccaggcatgtgaaggtgcagaagggcagcgagcccctgggcatcagcatcgtgtctggagagaagggcggcatctacgtgtccaaggtgacagtgggcagcatcgcccaccaggccggcctggagtatggagaccagctgctggagttcaacggcatcaacctgcggagcgccacagagcagcaggcccggctcatcatcggccagcagtgtgacaccatcaccatcctggcccagtacaacccccacgtgcaccagctgagcagccacagccgcagcagcagccacctggaccctgctggcacccacagcaccctgcagggcagcggcaccaccaccccagagcaccccagcgtgattgaccccctgatggagcaggatgagggccccagcaccccaccagccaagcagagcagcagcagaattgctggagatgccaacaagaagaccctggagccccgggtggtgttcatcaagaagagccagctggagctgggcgtgcacctgtgtggcggcaacctgcacggcgtgtttgtggccgaggtggaggatgacagccctgccaagggcccagatggcctggtgcctggggacctgatcctggagtatggcagcctggatgtgaggaacaagacagtggaggaggtgtatgtggagatgctgaagcccagagatggagtgcggctgaaggtgcagtacagacctgaggagttcaccaaggccaagggcctgcccggggacagcttctacatccgggccctgtatgaccggctggctgatgtggagcaggagctgtccttcaagaaggatgacatcctgtatgtggatgacaccctgccccagggcaccttcggctcctggatggcctggcagctggatgaaaatgcccagaagatccagaggggccagatccccagcaaatatgtgatggaccaggagttcagccggcggctgtccatgtctgaggtgaaggatgacaacagcgccaccaagaccctgtctgctgctgcccggcgctccttcttccggaggaagcacaagcacaagaggagcggcagcaaggatggcaaggacctgctggccctggatgccttcagcagtgacagcatccccctgtttgaagattctgtgtccctggcctaccagagggtgcagaaggtggactgcacagccctgcggcctgtgctgatcctgggccccctgctggatgtggtgaaggagatgctggtgaatgaggcccctgggaagttctgccgctgccccctggaggtgatgaaggccagccagcaggccatcgagcggggcgtgaaggactgcctgtttgtggactacaagagaagaagtggccactttgatgtgaccaccgtggccagcatcaaggagatcacagagaagaacagacactgcctgctggacatcgcccctcatgccatcgagcggctgcaccacatgcacatctaccccatcgtcatcttcatccactacaagagcgccaagcacatcaaggagcagagggaccccatctacctgcgggacaaggtgacccagaggcacagcaaggagcagtttgaggccgcccagaagctggagcaggagtacagccgctacttcaccggggtcatccagggcggggccctgagcagcatctgcacccagatcctggccatggtgaaccaggagcagaacaaggtgctgtggatcccagcctgccccctgtag

SEQ ID NO: 150193 - DNA, 2052 bp, synthetic construct
  misc_feature 1..2052: note = Description of Artificial Sequence: Synthetic coding sequence
  source 1..2052: mol_type = other DNA
atggagccccagaggcgggagctgctggcccagtgccagcagagcctggcccaggccatgacagaggtggaggccgtgctgggcctgctggaggccgccggggccctgagccctggagagcggcggcagctggatgaggaggccggcggggccaaggccgagctgctgctgaagctgctgctggccaaggagcgggaccacttccaggacctgcgggccgccctggagaagacccagccccacctgctgcccatcctgtacctgaatggagtggtgggccccccccagcctgctgagggcgccggcagcacctacagcgtgctgagcaccatgcccagcgacagcgagagcagcagcagcctgagctctgtgggcaccaccgtgaagcacctgcgggagcagatggagagccagctggagaaggaggcccgcttccggcagctgatggcccacagcagccatgacagcgccatcgacacagacagcatggagtgggagacagaggtggtggagtttgagcgggagacagaagatattgacctgaaggccctgggctttgacatggccgagggcgtgaatgagccctgcttccctggggactgtggcatctttgtgaccaaggtggacaagggcagcattgctgatggccgcctgcgggtgaatgactggctgctgcgcatcaatgatgtggacctgatcaacaaggacaagaagcaggccatcaaggccctgctgaatggagagggcgccatcaacatggtggtgagaagaaggaagagcctgggcggcaaggtggtgacccccctgcacatcaacctgagcggccagaaggacagcggcatcagcctggagaatggagtgtatgctgctgctgtgctgcccggcagccctgctgccaaggagggcagcctggccgtgggggaccgcatcgtggccatcaatggcatcgccctggacaacaagagcctgaatgaatgtgagagcctgctgcggagctgccaggacagcctgaccctgagcctgctgaaggtgttcccccagagcagctcctggagcggccagaacatctttgagaacatcaaggacagcgacaagatgctgtccttccgggcccacggccctgaggtgcaggcccacaacaagaggaacctgatccagcacaacaacagcacccagacagacatcttctacacagaccggctggaggacaggaaggagcccggccccccaggcggcagcagcagcttcctgcacaagcccttccctgggggccccctgcaggtgtgcccccaggcctgccccagcgccagcgagaggagcctgagcagcttcagaagtgatgccagcggggaccggggcttcggcctggtggatgtgcggggccggcggcccctgctgccctttgaaacagaggtgggcccctgtggggtgggggaggccagcctggacaaggctgacagcgagggcagcaacagcggcggcacctggcccaaggccatgctgagcagcacagctgtgcctgagaagctgtctgtgtacaagaagcccaagcagaggaagagcatctttgaccccaacaccttcaagaggccccagaccccacccaagattgactacctgctgcccggccctggccctgcccacagcccccagcccagcaagagagctggccccctgaccccacccaagccaccccggcggagtgacagcatcaagttccagcaccggctggagaccagcagcgagagcgaggccaccctggtgggcagcagccccagcaccagcccccccagcgccctgcccccagatgtggaccccggggagcccatgcacgccagcccccccaggaaggcccgggtgcgcatcgccagcagctactacccagaaggagatggagacagcagccacctgcctgccaagaagagctgtgatgaggacctgaccagccagaaggtggatgagctgggccagaagagaagaagacccaagagcgcccccagcttccggcccaagctggcccctgtggtgatcccagcccagttcctggagtag

SEQ ID NO: 150194 - DNA, 2643 bp, synthetic construct
  misc_feature 1..2643: note = Description of Artificial Sequence: Synthetic coding sequence
  source 1..2643: mol_type = other DNA
ggggccatcaacatggtggtgagaagaaggaagagcctgggcggcaaggtggtgacccccctgcacatcaacctgagcggccagaaggacagcggcatcagcctggagaatggagtgtatgctgctgctgtgctgcccggcagccctgctgccaaggagggcagcctggccgtgggggaccgcatcgtggccatcaatggcatcgccctggacaacaagagcctgaatgaatgtgagagcctgctgcggagctgccaggacagcctgaccctgagcctgctgaaggagcagaagtgtgtgcctgccagcggggagctgagccctgagctgcaggagtgggccccctacagccctggccacagcagccgccacagcaacccccccctgtaccccagccggcccagcgtgggcaccgtgcccaggagcctgacccccagcaccaccgtgagcagcatcctgaggaaccccatctacacagtgcgcagccaccgggtgggcccctgcagcagccccccagctgccagagatgctggcccccagggcctgcaccccagcgtgcagcaccagggccgcctgagcctggacctgagccacaggacctgcagcgactacagcgagatgagggccacccacggcagcaacagcctgcccagcagcgcccggctgggcagcagcagcaacctgcagttcaaggccgagcgcatcaagatccccagcaccccccgctaccccaggtctgtggtgggcagcgagcggggctctgtgagccacagtgaatgttccaccccaccccagagccccctgaacatcgacaccctgagcagctgcagccagagccagaccagcgccagcaccctgcccagaattgctgtgaacccagccagcctgggggagaggaggaaggaccggccctacgtggaggagcccaggcatgtgaaggtgcagaagggcagcgagcccctgggcatcagcatcgtgtctggagagaagggcggcatctacgtgtccaaggtgacagtgggcagcatcgcccaccaggccggcctggagtatggagaccagctgctggagttcaacggcatcaacctgcggagcgccacagagcagcaggcccggctcatcatcggccagcagtgtgacaccatcaccatcctggcccagtacaacccccacgtgcaccagctgagcagccacagccgcagcagcagccacctggaccctgctggcacccacagcaccctgcagggcagcggcaccaccaccccagagcaccccagcgtcatcgaccccctgatggagcaggatgagggccccagcaccccaccagccaagcagagcagcagcagaattgctggagatgccaacaagaagaccctggagccccgggtggtgttcatcaagaagagccagctggagctgggcgtgcacctgtgtggcggcaacctgcatggagtgtttgtggccgaggtggaggatgacagccctgccaagggcccagatggcctggtgcctggggacctgatcctggagtatggcagcctggatgtgaggaacaagacagtggaggaggtgtatgtggagatgctgaagcccagagatggagtgcggctgaaggtgcagtacagacctgaggagttcaccaaggccaagggcctgcccggggacagcttctacatccgggccctgtatgaccggctggctgatgtggagcaggagctgtccttcaagaaggatgacatcctgtatgtggatgacaccctgccccagggcaccttcggctcctggatggcctggcagctggatgaaaatgcccagaagatccagaggggccagatccccagcaaatatgtgatggaccaggagttcagccggcggctgtccatgtctgaggtgaaggatgacaacagcgccaccaagaccctgtctgctgctgcccggcgctccttcttccggaggaagcacaagcacaagaggagcggcagcaaggatggcaaggacctgctggccctggatgccttcagcagtgacagcatccccctgtttgaggacagcgtgtccctggcctaccagagggtgcagaaggtggactgcacagccctgcggcctgtgctgatcctgggccccctgctggatgtggtgaaggagatgctggtgaatgaggcccctgggaagttctgccgctgccccctggaggtgatgaaggccagccagcaggccatcgagcggggcgtgaaggactgcctgtttgtggactacaagaggaggagcggccactttgatgtgaccaccgtggccagcatcaaggagatcacagagaagaacagacactgcctgctggacatcgccccccacgccatcgagcggctgcaccacatgcacatctaccccatcgtcatcttcatccactacaagagcgccaagcacatcaaggagcagagggaccccatctacctgcgggacaaggtgacccagaggcacagcaaggagcagtttgaagctgcccagaagctggagcaggagtacagccgctacttcaccggggtcatccagggcggggccctgagcagcatctgcacccagatcctggccatggtgaaccaggagcagaacaaggtgctgtggatcccagcctgccccctgtag

SEQ ID NO: 150195 - DNA, 3237 bp, synthetic construct
  misc_feature 1..3237: note = Description of Artificial Sequence: Synthetic coding sequence
  source 1..3237: mol_type = other DNA
atggcccccaggaagagaggaggccggggcatctccttcatcttctgctgcttcagaaataatgaccaccctgagatcacctaccgcctgagaaatgacagcaactttgccctgcagaccatggagcccgccctgcccatgcctcctgtggaggagctggatgtgatgttcagcgagctggtggatgagctggacctgacagacaagcaccgggaggccatgtttgccctgcctgctgagaagaagtggcagatctactgcagcaagaagaaggaccaggaggagaacaagggggccacctcctggccagagttctacatcgaccagctgaacagcatggccgccaggaagagcctgctggccctggagaaggaggaggaggaggagaggagcaagaccatcgagagcctgaagacagccctgcggaccaagcccatgagatttgtgacccgcttcatcgacctggatggcctgagctgcatcctgaacttcctgaagaccatggactatgagaccagcgagagccgcatccacaccagcctcatcggctgcatcaaggccctgatgaacaacagccagggccgggcccacgtgctggcccacagcgagagcatcaacgtcatcgcccagagcctgagcacagagaacatcaagaccaaggtggccgtgctggagatcctgggcgctgtgtgcctggtgcctgggggccacaagaaggtgctgcaggccatgctgcactaccagaagtatgccagcgagaggacccgcttccagaccctcatcaatgacctggacaagagcacaggccgctacagagatgaggtgtccctgaagacagccatcatgtccttcatcaatgctgtgctgagccagggcgccggcgtggagagcctggacttccggctgcacctgcgctatgagttcctgatgctgggcatccagcctgtgattgacaagctgcgggagcacgagaacagcaccctggacagacacctggacttctttgagatgctgagaaatgaagatgagctggagtttgccaagagatttgagctggtgcacatcgacaccaagagcgccacccagatgtttgagctgaccaggaagaggctgacccacagcgaggcctacccccacttcatgagcatcctgcaccactgcctgcagatgccctacaagaggagcggcaacacagtgcagtactggctgctgctggaccgcatcatccagcagatcgtcatccagaatgacaagggccaggaccctgacagcacccccctggagaacttcaacatcaagaatgtggtgaggatgctggtgaatgaaaatgaggtgaagcagtggaaggagcaggccgagaagatgaggaaggagcacaatgagctgcagcagaagctggagaagaaggagcgggagtgtgatgccaagacccaggagaaggaggagatgatgcagaccctgaacaagatgaaggagaagctggagaaggagaccacagagcacaagcaggtgaagcagcaggtggccgacctgacagcccagctgcacgagctgagccggcgggctgtgtgtgccagcatccctgggggccccagccctggggcccctgggggccccttccccagctctgtgcccggcagcctgctgcccccacctcctcctccacccctgcccggcggcatgctgcccccacctcctccacccctgcccccaggcggccccccacctcctcctggccccccacccctgggcgccatcatgcctcctcctggggcccccatgggcctggccctgaagaagaagagcatcccccagcccaccaatgccctgaagagcttcaactggagcaagctgcctgagaacaagctggagggcaccgtgtggacagaaattgatgacaccaaggtgttcaagatcctggacctggaggacctggagaggaccttcagcgcctaccagaggcagcaggacttctttgtgaacagcaacagcaagcagaaggaggctgatgccattgatgacaccctgagcagcaagctgaaggtgaaggagctgtctgtgattgatggaagaagagcccagaactgcaacatcctgctgagccggctgaagctgagcaatgatgagatcaagagggccatcctgaccatggatgagcaggaggacctgcccaaggacatgctggagcagctgctgaagtttgtgcctgagaagagtgacatcgacctgctggaggagcacaagcatgagctggacaggatggccaaggctgaccgcttcctgtttgagatgagccgcatcaaccactaccagcagaggctgcagagcctgtacttcaagaagaagtttgctgagcgggtggccgaggtgaagcccaaggtggaggccatccgcagcggcagcgaggaggtgttccgcagcggggccctgaagcagctgctggaggtggtgctggccttcggcaactacatgaacaagggccagagaggaaatgcctacggcttcaagatcagcagcctgaacaagattgctgacaccaagagcagcattgacaagaacatcaccctgctgcactacctgatcaccatcgtggagaacaagtaccccagcgtgctgaacctgaatgaggagctgcgggacatcccccaggccgccaaggtgaacatgacagagctggacaaggagatcagcaccctgcggagcggcctgaaggctgtggagacagagctggagtaccagaagagccagcccccccagcccggggacaagtttgtgtctgtggtgtcccagttcatcaccgtggccagcttctccttcagtgatgtggaggacctgctggccgaggccaaggacctcttcaccaaggctgtgaagcactttggagaggaggccggcaagatccagccagatgagttcttcggcatctttgaccagttcctgcaggccgtgtctgaggccaagcaggagaatgaaaacatgaggaagaagaaggaggaggaggagcggcgggccaggatggaggcccagctgaaggagcagcgggagcgggagaggaagatgaggaaggccaaggaaaattctgaggagagcggggagtttgatgacctggtgtctgccctgcggagcggggaggtgtttgacaaggacctgagcaagctgaagaggaacaggaagaggatcaccaaccagatgacagacagcagccgggagcggcccatcaccaagctgaacttctag

SEQ ID NO: 150196 - DNA, 2649 bp, synthetic construct
  misc_feature 1..2649: note = Description of Artificial Sequence: Synthetic coding sequence
  source 1..2649: mol_type = other DNA
atggcccccaggaagagaggaggccggggcatctccttcatcttctgctgcttcagaaataatgaccaccctgagatcacctaccgcctgagaaatgacagcaactttgccctgcagaccatggagcccgccctgcccatgcctcctgtggaggagctggatgtgatgttcagcgagctggtggatgagctggacctgacagacaagcaccgggaggccatgtttgccctgcctgctgagaagaagtggcagatctactgcagcaagaagaaggaccaggaggagaacaagggggccacctcctggccagagttctacatcgaccagctgaacagcatggccgccaggaagagcctgctggccctggagaaggaggaggaggaggagaggagcaagaccatcgagagcctgaagacagccctgcggaccaagcccatgagatttgtgacccgcttcatcgacctggatggcctgagctgcatcctgaacttcctgaagaccatggactatgagaccagcgagagccgcatccacaccagcctcatcggctgcatcaaggccctgatgaacaacagccagggccgggcccacgtgctggcccacagcgagagcatcaacgtcatcgcccagagcctgagcacagagaacatcaagaccaaggtggccgtgctggagatcctgggcgctgtgtgcctggtgcctgggggccacaagaaggtgctgcaggccatgctgcactaccagaagtatgccagcgagaggacccgcttccagaccctcatcaatgacctggacaagagcacaggccgctacagagatgaggtgtccctgaagacagccatcatgtccttcatcaatgctgtgctgagccagggcgccggcgtggagagcctggacttccggctgcacctgcgctatgagttcctgatgctgggcatccagcctgtgattgacaagctgcgggagcacgagaacagcaccctggacagacacctggacttctttgagatgctgagaaatgaagatgagctggagtttgccaagagatttgagctggtgcacatcgacaccaagagcgccacccagatgtttgagctgaccaggaagaggctgacccacagcgaggcctacccccacttcatgagcatcctgcaccactgcctgcagatgccctacaagaggagcggcaacacagtgcagtactggctgctgctggaccgcatcatccagcagatcgtcatccagaatgacaagggccaggaccctgacagcacccccctggagaacttcaacatcaagaatgtggtgaggatgctggtgaatgaaaatgaggtgaagcagtggaaggagcaggccgagaagatgaggaaggagcacaatgagctgcagcagaagctggagaagaaggagcgggagtgtgatgccaagacccaggagaaggaggagatgatgcagaccctgaacaagatgaaggagaagctggagaaggagaccacagagcacaagcaggtgaagcagcaggtggccgacctgacagcccagctgcacgagctgagccggcgggctgtgtgtgccagcatccctgggggccccagccctggggcccctgggggccccttccccagctctgtgcccggcagcctgctgcccccacctcctcctccacccctgcccggcggcatgctgcccccacctcctccacccctgcccccaggcggccccccacctcctcctggccccccacccctgggcgccatcatgcctcctcctggggcccccatgggcctggccctgaagaagaagagcatcccccagcccaccaatgccctgaagagcttcaactggagcaagctgcctgagaacaagctggagggcaccgtgtggacagaaattgatgacaccaaggtgttcaagatcctggacctggaggacctggagaggaccttcagcgcctaccagaggcagcaggacttctttgtgaacagcaacagcaagcagaaggaggctgatgccattgatgacaccctgagcagcaagctgaaggtgaaggagctgtctgtgattgatggaagaagagcccagaactgcaacatcctgctgagccggctgaagctgagcaatgatgagatcaagagggccatcctgaccatggatgagcaggaggacctgcccaaggacatgctggagcagctgctgaagtttgtgcctgagaagagtgacatcgacctgctggaggagcacaagcatgagctggacaggatggccaaggctgaccgcttcctgtttgagatgagccgcatcaaccactaccagcagaggctgcagagcctgtacttcaagaagaagtttgctgagcgggtggcctttggaaactacatgaacaagggccagagaggaaatgcctacggcttcaagatcagcagcctgaacaagattgctgacaccaagagcagcattgacaagaacatcaccctgctgcactacctgatcaccatcgtggagaacaagtaccccagcgtgctgaacctgaatgaggagctgcgggacatcccccaggccgccaaggtgaagtcctggaacatccgcagcctgagcccccacagccctgagatcagcctgtgcctgctgagcgccagcagcagccagtag

SEQ ID NO: 150197 - DNA, 3207 bp, synthetic construct
  misc_feature 1..3207: note = Description of Artificial Sequence: Synthetic coding sequence
  source 1..3207: mol_type = other DNA
atggcccccaggaagagaggaggccggggcatctccttcatcttctgctgcttcagaaataatgaccaccctgagatcacctaccgcctgagaaatgacagcaactttgccctgcagaccatggagcccgccctgcccatgcctcctgtggaggagctggatgtgatgttcagcgagctggtggatgagctggacctgacagacaagcaccgggaggccatgtttgccctgcctgctgagaagaagtggcagatctactgcagcaagaagaaggaccaggaggagaacaagggggccacctcctggccagagttctacatcgaccagctgaacagcatggccgccaggaagagcctgctggccctggagaaggaggaggaggaggagaggagcaagaccatcgagagcctgaagacagccctgcggaccaagcccatgagatttgtgacccgcttcatcgacctggatggcctgagctgcatcctgaacttcctgaagaccatggactatgagaccagcgagagccgcatccacaccagcctcatcggctgcatcaaggccctgatgaacaacagccagggccgggcccacgtgctggcccacagcgagagcatcaacgtcatcgcccagagcctgagcacagagaacatcaagaccaaggtggccgtgctggagatcctgggcgctgtgtgcctggtgcctgggggccacaagaaggtgctgcaggccatgctgcactaccagaagtatgccagcgagaggacccgcttccagaccctcatcaatgacctggacaagagcacaggccgctacagagatgaggtgtccctgaagacagccatcatgtccttcatcaatgctgtgctgagccagggcgccggcgtggagagcctggacttccggctgcacctgcgctatgagttcctgatgctgggcatccagcctgtgattgacaagctgcgggagcacgagaacagcaccctggacagacacctggacttctttgagatgctgagaaatgaagatgagctggagtttgccaagagatttgagctggtgcacatcgacaccaagagcgccacccagatgtttgagctgaccaggaagaggctgacccacagcgaggcctacccccacttcatgagcatcctgcaccactgcctgcagatgccctacaagaggagcggcaacacagtgcagtactggctgctgctggaccgcatcatccagcagatcgtcatccagaatgacaagggccaggaccctgacagcacccccctggagaacttcaacatcaagaatgtggtgaggatgctggtgaatgaaaatgaggtgaagcagtggaaggagcaggccgagaagatgaggaaggagcacaatgagctgcagcagaagctggagaagaaggagcgggagtgtgatgccaagacccaggagaaggaggagatgatgcagaccctgaacaagatgaaggagaagctggagaaggagaccacagagcacaagcaggtgaagcagcaggtggccgacctgacagcccagctgcacgagctgagccggcgggctgtgtgtgccagcatccctgggggccccagccctggggcccctgggggccccttccccagctctgtgcccggcagcctgctgcccccacctcctcctccacccctgcccggcggcatgctgcccccacctcctccacccctgcccccaggcggccccccacctcctcctggccccccacccctgggcgccatcatgcctcctcctggggcccccatgggcctggccctgaagaagaagagcatcccccagcccaccaatgccctgaagagcttcaactggagcaagctgcctgagaacaagctggagggcaccgtgtggacagaaattgatgacaccaaggtgttcaagatcctggacctggaggacctggagaggaccttcagcgcctaccagaggcagcagaaggaggctgatgccattgatgacaccctgagcagcaagctgaaggtgaaggagctgtctgtgattgatggaagaagagcccagaactgcaacatcctgctgagccggctgaagctgagcaatgatgagatcaagagggccatcctgaccatggatgagcaggaggacctgcccaaggacatgctggagcagctgctgaagtttgtgcctgagaagagtgacatcgacctgctggaggagcacaagcatgagctggacaggatggccaaggctgaccgcttcctgtttgagatgagccgcatcaaccactaccagcagaggctgcagagcctgtacttcaagaagaagtttgctgagcgggtggccgaggtgaagcccaaggtggaggccatccgcagcggcagcgaggaggtgttccgcagcggggccctgaagcagctgctggaggtggtgctggccttcggcaactacatgaacaagggccagagaggaaatgcctacggcttcaagatcagcagcctgaacaagattgctgacaccaagagcagcattgacaagaacatcaccctgctgcactacctgatcaccatcgtggagaacaagtaccccagcgtgctgaacctgaatgaggagctgcgggacatcccccaggccgccaaggtgaacatgacagagctggacaaggagatcagcaccctgcggagcggcctgaaggctgtggagacagagctggagtaccagaagagccagcccccccagcccggggacaagtttgtgtctgtggtgtcccagttcatcaccgtggccagcttctccttcagtgatgtggaggacctgctggccgaggccaaggacctcttcaccaaggctgtgaagcactttggagaggaggccggcaagatccagccagatgagttcttcggcatctttgaccagttcctgcaggccgtgtctgaggccaagcaggagaatgaaaacatgaggaagaagaaggaggaggaggagcggcgggccaggatggaggcccagctgaaggagcagcgggagcgggagaggaagatgaggaaggccaaggaaaattctgaggagagcggggagtttgatgacctggtgtctgccctgcggagcggggaggtgtttgacaaggacctgagcaagctgaagaggaacaggaagaggatcaccaaccagatgacagacagcagccgggagcggcccatcaccaagctgaacttctag

SEQ ID NO: 150198 - DNA, 3237 bp, synthetic construct; identical to SEQ ID NO: 150195
  misc_feature 1..3237: note = Description of Artificial Sequence: Synthetic coding sequence
  source 1..3237: mol_type = other DNA

SEQ ID NO: 150199 - DNA, 3207 bp, synthetic construct
  misc_feature 1..3207: note = Description of Artificial Sequence: Synthetic coding sequence
  source 1..3207: mol_type = other DNA
atggcccccaggaagaggagccaccacggcctgggcttcctgtgctgctttggaggcagtgacatccctgagatcaacctgcgggacaaccaccccctgcagttcatggagttcagcagccccatccccaatgctgaggagctgaacatccgctttgctgagctggtggatgagctggacctgacagacaagaaccgggaggccatgtttgccctgcccccagagaagaagtggcagatctactgcagcaagaagaaggagcaggaggaccccaacaagctggccacctcctggccagactactacatcgaccgcatcaacagcatggccgccatgcagagcctgtatgcctttgatgaggaggagacagagatgaggaaccaggtggtggaggacctgaagacagccctgcggacccagcccatgagatttgtgacccgcttcatcgagctggagggcctgacctgcctgctgaacttcctgcgctccatggaccacgccacctgtgagagccgcatccacaccagcctcatcggctgcatcaaggccctgatgaacaacagccagggccgggcccacgtgctggcccagcctgaggccatcagcaccatcgcccagagcctgaggacagagaacagcaagaccaaggtggccgtgctggagatcctgggcgctgtgtgcctggtgcctgggggccacaagaaggtgctgcaggccatgctgcactaccaggtgtatgctgctgagaggacccgcttccagaccctgctgaatgagctggacaggagcctgggccgctacagagatgaggtgaacctgaagacagccatcatgtccttcatcaatgctgtgctgaatgctggagctggggaggacaacctggagttccggctgcacctgcgctatgagttcctgatgctgggcatccagcctgtgattgacaagctgcggcagcatgaaaatgccatcctggacaagcacctggacttctttgagatggtgagaaatgaagatgacctggagctggccaggagatttgacatggtgcacatcgacaccaagagcgccagccagatgtttgagctgatccacaagaagctgaagtacacagaggcctacccctgcctgctgtctgtgctgcaccactgcctgcagatgccctacaagagaaatggaggctacttccagcagtggcagctgctggaccgcatcctgcagcagatcgtgctgcaggatgagcggggcgtggaccctgacctggcccccctggagaacttcaacgtgaagaacatcgtgaacatgctgatcaatgaaaatgaggtgaagcagtggagggaccaggccgagaagttcaggaaggagcacatggagctggtgtcccggctggagaggaaggagcgggagtgtgagaccaagaccctggagaaggaggagatgatgaggaccctgaacaagatgaaggacaagctggcccgggagagccaggagctgcggcaggcccggggccaggtggccgagctggtggcccagctgtctgagctgagcacaggccctgtgagcagccccccacctcctgggggccccctgaccctgagcagctccatgaccaccaatgacctgcccccacctcctccacccctgccctttgcctgctgccccccacctcctcctccacccctgcccccaggcggcccccccaccccacctggggccccaccctgcctgggcatgggcctgcccctgccccaggacccctaccccagcagtgatgtgcccctgaggaagaagagggtgccccagcccagccaccccctgaagagcttcaactgggtgaagctgaatgaggagcgggtgcccggcaccgtgtggaatgaaattgatgacatgcaggtgttccgcatcctggacctggaggactttgagaagatgttttctgcctaccagaggcaccagaaggagctgggcagcacagaggacatctacctggccagcaggaaggtgaaggagctgtctgtgattgatggccggcgggcccagaactgcatcatcctgctgagcaagctgaagctgagcaatgaggagatccggcaggccatcctgaagatggatgagcaggaggacctggccaaggacatgctggagcagctgctgaagttcatccctgagaagagtgacatcgacctgctggaggagcacaagcatgaaattgaaagaatggcccgggctgaccgcttcctgtatgagatgagcagaattgaccactaccagcagaggctgcaggccctcttcttcaagaagaagttccaggagcggctggccgaggccaagcccaaggtggaggccatcctgctggccagccgggagctggtgcgcagcaagaggctgcggcagatgctggaggtgatcctggccatcggcaacttcatgaacaagggccagagaggaggagcctacggcttccgggtggccagcctgaacaagattgctgacaccaagagcagcattgacaggaacatcagcctgctgcactacctgatcatgatcctggagaagcacttcccagacatcctgaacatgcccagcgagctgcagcacctgcctgaggccgccaaggtgaacctggccgagctggagaaggaggtgggcaacctgcggcggggcctgcgggctgtggaggtggagctggagtaccagaggcggcaggtgcgggagcccagcgacaagtttgtgcctgtgatgtctgacttcatcaccgtgtcctccttctccttcagcgagctggaggaccagctgaatgaggcccgggacaagtttgccaaggccctgatgcactttggagaacatgacagcaagatgcagccagatgagttcttcggcatctttgacaccttcctgcaggccttcagcgaggcccggcaggacctggaggccatgagaagaaggaaggaggaggaggagcggcgggccaggatggaggccatgctgaaggagcagcgggagcgggagcgctggcagaggcagaggaaggtgctggccgccggcagcagcctggaggagggcggggagtttgatgacctggtgtctgccctgcggagcggggaggtgtttgacaaggacctgtgcaagctgaagaggagcaggaagaggagcggcagccaggccctggaggtgacccgggagcgggccatcaaccggctgaactactag

SEQ ID NO: 150200 - DNA, 3207 bp, synthetic construct; identical to SEQ ID NO: 150199
  misc_feature 1..3207: note = Description of Artificial Sequence: Synthetic coding sequence
  source 1..3207: mol_type = other DNA

SEQ ID NO: 150201 - DNA, 399 bp, synthetic construct
  misc_feature 1..399: note = Description of Artificial Sequence: Synthetic coding sequence
  source 1..399: mol_type = other DNA
atggcccccaggaagaggagccaccacggcctgggcttcctgtgctgctttggaggcagtgacatccctgagatcaacctgcgggacaaccaccccctgcagttcatggagttcagcagccccatccccaatgctgaggagctgaacatccgctttgctgagctggtggatgagctggacctgacagacaagaaccgggaggccatgtttgccctgcccccagagaagaagtggcagatctactgcagcaagaagaaggtgcccagcctgacccccctggccaccagccagggctcctggcatggagtggccctggccgccctggcctgcagctgcatccacctgatgttcatcacctgccagccctgcagccgctgctggaggaacaacagcgagtag

SEQ ID NO: 150202 - DNA, 3204 bp, synthetic construct
  misc_feature 1..3204: note = Description of Artificial Sequence: Synthetic coding sequence
  source 1..3204: mol_type = other DNA
atggcccccaggaagaggagccaccacggcctgggcttcctgtgctgctttggaggcagtgacatccctgagatcaacctgcgggacaaccaccccctgcagttcatggagttcagcagccccatccccaatgctgaggagctgaacatccgctttgctgagctggtggatgagctggacctgacagacaagaaccgggaggccatgtttgccctgcccccagagaagaagtggcagatctactgcagcaagaagaaggagcaggaggaccccaacaagctggccacctcctggccagactactacatcgaccgcatcaacagcatggccgccatgcagagcctgtatgcctttgatgaggaggagacagagatgaggaaccaggtggtggaggacctgaagacagccctgcggacccagcccatgagatttgtgacccgcttcatcgagctggagggcctgacctgcctgctgaacttcctgcgctccatggaccacgccacctgtgagagccgcatccacaccagcctcatcggctgcatcaaggccctgatgaacaacagccagggccgggcccacgtgctggcccagcctgaggccatcagcaccatcgcccagagcctgaggacagagaacagcaagaccaaggtggccgtgctggagatcctgggcgctgtgtgcctggtgcctgggggccacaagaaggtgctgcaggccatgctgcactaccaggtgtatgctgctgagaggacccgcttccagaccctgctgaatgagctggacaggagcctgggccgctacagagatgaggtgaacctgaagacagccatcatgtccttcatcaatgctgtgctgaatgctggagctggggaggacaacctggagttccggctgcacctgcgctatgagttcctgatgctgggcatccagcctgtgattgacaagctgcggcagcatgaaaatgccatcctggacaagcacctggacttctttgagatggtgagaaatgaagatgacctggagctggccaggagatttgacatggtgcacatcgacaccaagagcgccagccagatgtttgagctgatccacaagaagctgaagtacacagaggcctacccctgcctgctgtctgtgctgcaccactgcctgcagatgccctacaagagaaatggaggctacttccagcagtggcagctgctggaccgcatcctgcagcagatcgtgctgcaggatgagcggggcgtggaccctgacctggcccccctggagaacttcaacgtgaagaacatcgtgaacatgctgatcaatgaaaatgaggtgaagcagtggagggaccaggccgagaagttcaggaaggagcacatggagctggtgtcccggctggagaggaaggagcgggagtgtgagaccaagaccctggagaaggaggagatgatgaggaccctgaacaagatgaaggacaagctggcccgggagagccaggagctgcggcaggcccggggccaggtggccgagctggtggcccagctgtctgagctgagcacaggccctgtgagcagccccccacctcctgggggccccctgaccctgagcagctccatgaccaccaatgacctgcccccacctcctccacccctgccctttgcctgctgccccccacctcctcctccacccctgcccccaggcggcccccccaccccacctggggccccaccctgcctgggcatgggcctgcccctgccccaggacccctaccccagcagtgatgtgcccctgaggaagaagagggtgccccagcccagccaccccctgaagagcttcaactgggtgaagctgaatgaggagcgggtgcccggcaccgtgtggaatgaaattgatgacatgcaggtgttccgcatcctggacctggaggactttgagaagatgttttctgcctaccagaggcaccagaaggagctgggcagcacagaggacatctacctggccagcaggaaggtgaaggagctgtctgtgattgatggccggcgggcccagaactgcatcatcctgctgagcaagctgaagctgagcaatgaggagatccggcaggccatcctgaagatggatgagcaggaggacctggccaaggacatgctggagcagctgctgaagttcatccctgagaagagtgacatcgacctgctggaggagcacaagcatgaaattgaaagaatggcccgggctgaccgcttcctgtatgagatgagcagaattgaccactaccagcagaggctgcaggccctcttcttcaagaagaagttccaggagcggctggccgaggccaagcccaaggtggaggccatcctgctggccagccgggagctggtgcgcagcaagaggctgcggcagatgctggaggtgatcctggccatcggcaacttcatgaacaagggccagagaggaggagcctacggcttccgggtggccagcctgaacaagattgctgacaccaagagcagcattgacaggaacatcagcctgctgcactacctgatcatgatcctggagaagcacttcccagacatcctgaacatgcccagcgagctgcagcacctgcctgaggccgccaaggtgaacctggccgagctggagaaggaggtgggcaacctgcggcggggcctgcgggctgtggaggtgctggagtaccagaggcggcaggtgcgggagcccagcgacaagtttgtgcctgtgatgtctgacttcatcaccgtgagcagcttctccttcagcgagctggaggaccagctgaatgaggcccgggacaagtttgccaaggccctgatgcactttggagaacatgacagcaagatgcagccagatgagttcttcggcatctttgacaccttcctgcaggccttcagcgaggcccggcaggacctggaggccatgagaagaaggaaggaggaggaggagcggcgggccaggatggaggccatgctgaaggagcagcgggagcgggagcgctggcagaggcagaggaaggtgctggccgccggcagcagcctggaggagggcggggagtttgatgacctggtgtctgccctgcggtctggagaggtgtttgacaaggacctgtgcaagctgaagaggagcaggaagaggagcggcagccaggccctggaggtgacccgggagcgggccatcaaccggctgaactactag

SEQ ID NO: 150203 - DNA, 1062 bp, synthetic construct
  misc_feature 1..1062: note = Description of Artificial Sequence: Synthetic coding sequence
  source 1..1062: mol_type = other DNA
atgggcgccctgctgtgtgaccacaggagctgccggcccatcagcctgactgtggccaagtgctgggaccccacccccaggagctacttcaccgtgcccagggctgaccctgtgcggcccattgatcctgctgcctggctgagccacacagctgccctgaccggggccctgcccaggtatgagctggaggaggcccccctgactgtgaagagtgacatgtctgctgtggtgcgggtgatgcagctgcctgattctggcctggagatccgggacaggatgtggctgaagatcaccatcgccaatgctgtgattggagcagatgtggtggactggctgtacacccacgtggagggcttcaaggagcggcgggaggccaggaaatatgccagcagcctgctgaagcacggcttcctgcggcacacagtgaacaagatcaccttcagcgagcagtgctactacgtgtttggagacctgtgcagcaacctggccaccctgaacctgaacagcggcagcagcggcaccagtgaccaggacaccctggcccccctgccccaccctgctgccccctggcccctgggccagggctacccctaccagtacccaggccccccaccctgcttccccccagcctaccaggaccccggcttctcctatggcagcggcagcacaggcagccagcagagcgagggcagcaagagcagcggcagcaccaggagcagcagaagagcccctggccgggagaaggagcggcgggctgctggagctgggggcagcggcagcgagagtgaccacacagcccccagcggcgtgggcagctcctggagggagaggcctgctggccagctgagccggggcagcagccccaggagccaggccagcgccacagcccctggcctgcccccaccccaccccaccaccaaggcctacacagtggtgggcggccccccaggcggcccccctgtgcgggagctggccgctgtgcccccagagctgaccggcagccggcagagcttccagaaggccatgggcaacccctgtgagttctttgtggacatcatgtag

SEQ ID NO: 150204 - DNA, 1335 bp, synthetic construct
  misc_feature 1..1335: note = Description of Artificial Sequence: Synthetic coding sequence
  source 1..1335: mol_type = other DNA
atggccgagaccaagatcatctaccacatggatgaggaggagaccccctacctggtgaagctgcctgtggcccctgagcgggtgaccctggccgacttcaagaatgtgctgagcaacagacctgtgcacgcctacaagttcttcttcaagtccatggaccaggactttggagtggtgaaggaggagatctttgatgacaatgccaagctgccctgcttcaacggccgggtggtgtcctggctggtgctggccgagggcgcccacagtgatgctggcagccagggcacagacagccacacagacctgcccccacccctggagaggactggaggcatcggggacagcaggcctccttccttccaccccaacgtggccagcagcagagatggcatggacaatgaaacaggaacagagagcatggtgagccaccggcgggagcgggccaggagaagaaaccgggaggaggccgcccggaccaacggccaccccaggggggacagaagaagagatgtgggcctgcccccagattctgccagcacagccctgagcagcgagctggagagcagcagctttgtggacagtgatgaagatggcagcaccagccggctgagcagcagcacagagcagagcaccagcagccgcctcatcagaaaatatgccagcagcctgctgaagcacggcttcctgcggcacacagtgaacaagatcaccttcagcgagcagtgctactacgtgtttggagacctgtgcagcaacctggccaccctgaacctgaacagcggcagcagcggcaccagtgaccaggacaccctggcccccctgccccaccctgctgccccctggcccctgggccagggctacccctaccagtacccaggccccccaccctgcttccccccagcctaccaggaccccggcttctcctatggcagcggcagcacaggcagccagcagagcgagggcagcaagagcagcggcagcaccaggagcagccggcgggcccctggccgggagaaggagaggagagctgctggggccggcggcagcggcagcgagagtgaccacacagcccccagcggcgtgggcagctcctggagggagaggcctgctggccagctgagccggggcagcagccccaggagccaggccagcgccacagcccctggcctgcccccaccccaccccaccaccaaggcctacacagtggtgggcggccccccaggcggcccccctgtgcgggagctggccgctgtgcccccagagctgaccggcagccggcagagcttccagaaggccatgggcaacccctgtgagttctttgtggacatcatgtag

SEQ ID NO: 150205 - DNA, 2088 bp, synthetic construct
  misc_feature 1..2088: note = Description of Artificial Sequence: Synthetic coding sequence
  source 1..2088: mol_type = other DNA
atggccgagaccaagatcatctaccacatggatgaggaggagaccccctacctggtgaagctgcctgtggcccctgagcgggtgaccctggccgacttcaagaatgtgctgagcaacagacctgtgcacgcctacaagttcttcttcaagtccatggaccaggactttggagtggtgaaggaggagatctttgatgacaatgccaagctgccctgcttcaacggccgggtggtgtcctggctggtgctggccgagggcgcccacagtgatgctggcagccagggcacagacagccacacagacctgcccccacccctggagaggactggaggcatcggggacagcaggcctccttccttccaccccaacgtggccagcagcagagatggcatggacaatgaaacaggaacagagagcatggtgagccaccggcgggagcgggccaggagaagaaaccgggaggaggccgcccggaccaacggccaccccaggggggacagaagaagagatgtgggcctgcccccagattctgccagcacagccctgagcagcgagctggagagcagcagctttgtggacagtgatgaagatggcagcaccagccggctgagcagcagcacagagcagagcaccagcagccgcctcatcaggaagcacaagagaagaagaaggaagcagaggctgcggcaggccgaccgggccagcagcttcagcagcatcacagacagcaccatgagcctgaacatcgtgacagtgaccctgaacatggagcggcaccacttcctgggcatcagcatcgtgggccagagcaatgacagaggagatggcggcatctacatcggcagcatcatgaagggcggcgctgtggccgcagatggaagaattgagcccggggacatgctgctgcaggtgaatgatgtgaactttgagaacatgagcaatgatgatgctgtgcgggtgctgcgggagatcgtgtcccagacaggccccatcagcctgactgtggccaagtgctgggaccccacccccaggagctacttcaccgtgcccagggctgaccctgtgcggcccatcgaccctgctgcctggctgagccacacagctgccctgactggagccctgcccaggtatggcaccagcccctgcagcagcgctgtgaccaggaccagcagcagcagcctgaccagctctgtgcctggggccccccagctggaggaggcccccctgactgtgaagagtgacatgtctgctgtggtgcgggtgatgcagctgcctgattctggcctggagatccgggacaggatgtggctgaagatcaccatcgccaatgctgtgattggagcagatgtggtggactggctgtacacccacgtggagggcttcaaggagcggcgggaggccaggaaatatgccagcagcctgctgaagcacggcttcctgcggcacacagtgaacaagatcaccttcagcgagcagtgctactacgtgtttggagacctgtgcagcaacctggccaccctgaacctgaacagcggcagcagcggcaccagtgaccaggacaccctggcccccctgccccaccctgctgccccctggcccctgggccagggctacccctaccagtacccaggccccccaccctgcttccccccagcctaccaggaccccggcttctcctatggcagcggcagcacaggcagccagcagagcgagggcagcaagagcagcggcagcaccaggagcagcagaagagcccctggccgggagaaggagcggcgggctgctggagctgggggcagcggcagcgagagtgaccacacagcccccagcggcgtgggcagctcctggagggagaggcctgctggccagctgagccggggcagcagccccaggagccaggccagcgccacagcccctggcctgcccccaccccaccccaccaccaaggcctacacagtggtgggcggccccccaggcggcccccctgtgcgggagctggccgctgtgcccccagagctgaccggcagccggcagagcttccagaaggccatgggcaacccctgtgagttctttgtggacatcatgtag

SEQ ID NO: 150206 - DNA, 2013 bp, synthetic construct
  misc_feature 1..2013: note = Description of Artificial Sequence: Synthetic coding sequence
  source 1..2013: mol_type = other DNA
atggccgagaccaagatcatctaccacatggatgaggaggagaccccctacctggtgaagctgcctgtggcccctgagcgggtgaccctggccgacttcaagaatgtgctgagcaacagacctgtgcacgcctacaagttcttcttcaagtccatggaccaggactttggagtggtgaaggaggagatctttgatgacaatgccaagctgccctgcttcaacggccgggtggtgtcctggctggtgctggccgagggcgcccacagtgatgctggcagccagggcacagacagccacacagacctgcccccacccctggagaggactggaggcatcggggacagcaggcctccttccttccaccccaacgtggccagcagcagagatggcatggacaatgaaacaggaacagagagcatggtgagccaccggcgggagcgggccaggagaagaaaccgggaggaggccgcccggaccaacggccaccccaggggggacagaagaagagatgtgggcctgcccccagattctgccagcacagccctgagcagcgagctggagagcagcagctttgtggacagtgatgaagatggcagcaccagccggctgagcagcagcacagagcagagcaccagcagccgcctcatcaggaagcacaagagaagaagaaggaagcagaggctgcggcaggccgaccgggccagcagcttcagcagcatcacagacagcaccatgagcctgaacatcgtgacagtgaccctgaacatggagcggcaccacttcctgggcatcagcatcgtgggccagagcaatgacagaggagatggcggcatctacatcggcagcatcatgaagggcggcgctgtggccgcagatggaagaattgagcccggggacatgctgctgcaggtgaatgatgtgaactttgagaacatgagcaatgatgatgctgtgcgggtgctgcgggagatcgtgtcccagacaggccccatcagcctgactgtggccaagtgctgggaccccacccccaggagctacttcaccgtgcccagggctgaccctgtgcggcccatcgaccctgctgcctggctgagccacacagctgccctgactggagccctgcccaggtatgagctggaggaggcccccctgactgtgaagagtgacatgtctgctgtggtgcgggtgatgcagctgcctgacagcggcctggagatccgggacaggatgtggctgaagatcaccatcgccaatgctgtgattggagcagatgtggtggactggctgtacacccacgtggagggcttcaaggagcggcgggaggccaggaaatatgccagcagcctgctgaagcacggcttcctgcggcacacagtgaacaagatcaccttcagcgagcagtgctactacgtgtttggagacctgtgcagcaacctggccaccctgaacctgaacagcggcagcagcggcaccagtgaccaggacaccctggcccccctgccccaccctgctgccccctggcccctgggccagggctacccctaccagtacccaggccccccaccctgcttccccccagcctaccaggaccccggcttctcctatggcagcggcagcacaggcagccagcagagcgagggcagcaagagcagcggcagcaccaggagcagccggcgggcccctggccgggagaaggagaggagagctgctggggccggcggcagcggcagcgagagtgaccacacagcccccagcggcgtgggcagctcctggagggagaggcctgctggccagctgagccggggcagcagccccaggagccaggccagcgccacagcccctggcctgcccccaccccaccccaccaccaaggcctacacagtggtgggcggccccccaggcggcccccctgtgcgggagctggccgctgtgcccccagagctgaccggcagccggcagagcttccagaaggccatgggcaacccctgtgagttctttgtggacatcatgtag

SEQ ID NO: 150207 - DNA, 2151 bp, synthetic construct
  misc_feature 1..2151: note = Description of Artificial Sequence: Synthetic coding sequence
  source 1..2151: mol_type = other DNA
atgggagagaccaagatcatctaccacctggatggccaggagaccccctacctggtgaagctgcccctgcctgctgagcgggtgaccctggccgacttcaagggcgtgctgcagaggcccagctacaagttcttcttcaagtccatggatgatgactttggagtggtgaaggaggagatcagtgatgacaatgccaagctgccctgcttcaacggccgggtggtgtcctggctggtgtctgctgagggcagccacccagaccctgcccccttctgtgccgacaaccccagcgagctgcccccacccatggagaggactggaggcattggagacagccggccccccagcttccacccccatgctgggggcggcagccaggagaacctggacaatgacacagaaacagacagcctggtgtctgcccagcgggagcggcccaggagaagagatggccctgagcacgccacccggctgaatggaacagccaagggggagaggagaagagagcccggcggctatgacagcagcagcaccctgatgagcagcgagctggagaccaccagcttctttgacagtgatgaagatgacagcaccagccgcttcagcagcagcacagagcagagcagcgccagccggctgatgagaagacacaagagaagaagaaggaagcagaaggtgtccagaattgaaagaagcagcagcttcagcagcatcacagacagcaccatgagcctgaacatcatcaccgtgaccctgaacatggagaagtacaacttcctgggcatcagcatcgtgggccagagcaatgaaagaggagatggcggcatctacatcggcagcatcatgaagggcggcgctgtggccgcagatggaagaattgagcccggggacatgctgctgcaggtgaatgagatcaactttgagaacatgagcaatgatgatgctgtgcgggtgctgcgggagatcgtgcacaagccaggccccatcaccctgactgtggccaagtgctgggaccccagcccccggggctgcttcaccctgcccaggtctgagcccatccggcccatcgaccctgctgcctgggtgagccacacagctgccatgacaggcaccttccctgcctacggcatgagccccagcctgagcaccatcaccagcaccagcagcagcatcaccagcagcatcccagacacagagcggctggatgacttccacctgagcatccacagcgacatggccgccatcgtgaaggccatggccagccctgagagcggcctggaggtgcgggacaggatgtggctgaagatcaccatccccaatgccttcatcggcagtgatgtggtggactggctgtaccacaacgtggagggcttcacagacagaagagaggccaggaaatatgccagcaacctgctgaaggccggcttcatccgccacacagtgaacaagatcaccttcagcgagcagtgctactacatctttggagacctgtgtggcaacatggccaacctgagcctgcatgaccatgatggcagcagcggggccagtgaccaggacaccctggcccccctgccccaccctggagctgccccctggcccatggccttcccctaccagtacccacctccaccccacccctacaacccccaccctggcttccctgagctgggctacagctatggaggcggcagcgccagcagccagcacagcgagggcagccgcagcagcggcagcaacagaagtggcagtgacaggaggaaggagaaggaccccaaggccggggacagcaagagcggcggcagcggcagcgagagtgaccacaccaccaggagcagcctgcggggcccccgggagcgggcccccagcgagaggagcggccctgctgccagcgagcacagccacaggagccaccacagcctggccagcagcctgcggagccaccacacccaccccagctatggccccccaggagtgccccccctgtatggcccccccatgctgatgatgcctcctcctcctgctgccatgggccccccaggggcccctcctggccgggacctggcctctgtgcccccagagctgacagccagccggcagagcttcaggatggccatgggcaaccccagcgagttctttgtggatgtgatgtag

SEQ ID NO: 150208 - DNA, 2172 bp, synthetic construct
  misc_feature 1..2172: note = Description of Artificial Sequence: Synthetic coding sequence
  source 1..2172: mol_type = other DNA
atgggagagaccaagatcatctaccacctggatggccaggagaccccctacctggtgaagctgcccctgcctgctgagcgggtgaccctggccgacttcaagggcgtgctgcagaggcccagctacaagttcttcttcaagtccatggatgatgactttggagtggtgaaggaggagatcagtgatgacaatgccaagctgccctgcttcaacggccgggtggtgtcctggctggtgtctgctgagggcagccacccagaccctgcccccttctgtgccgacaaccccagcgagctgcccccacccatggagaggactggaggcattggagacagccggccccccagcttccacccccatgctgggggcggcagccaggagaacctggacaatgacacagaaacagacagcctggtgtctgcccagcgggagcggcccaggagaagagatggccctgagcacgccacccggctgaatggaacagccaagggggagaggagaagagagcccggcggctatgacagcagcagcaccctgatgagcagcgagctggagaccaccagcttctttgacagtgatgaagatgacagcaccagccgcttcagcagcagcacagagcagagcagcgccagccggctgatgagaagacacaagagaagaagaaggaagcagaaggtgtccagaattgaaagaagcagcagcttcagcagcatcacagacagcaccatgagcctgaacatcatcaccgtgaccctgaacatggagaagtacaacttcctgggcatcagcatcgtgggccagagcaatgaaagaggagatggcggcatctacatcggcagcatcatgaagggcggcgctgtggccgcagatggaagaattgagcccggggacatgctgctgcaggtgaatgagatcaactttgagaacatgagcaatgatgatgctgtgcgggtgctgcgggagatcgtgcacaagccaggccccatcaccctgactgtggccaagtgctgggaccccagcccccggggctgcttcaccctgcccaggtctgagcccatccggcccatcgaccctgctgcctgggtgagccacacagctgccatgacaggcaccttccctgcctacggcatgagccccagcctgagcaccatcaccagcaccagcagcagcatcaccagcagcatcccagacacagagcggctggatgacttccacctgagcatccacagcgacatggccgccatcgtgaaggccatggccagccctgagagcggcctggaggtgcgggacaggatgtggctgaagatcaccatccccaatgccttcatcggcagtgatgtggtggactggctgtaccacaacgtggagggcttcacagacagaagagaggccaggaaatatgccagcaacctgctgaaggccggcttcatccgccacacagtgaacaagatcaccttcagcgagcagtgctactacatctttggagacctgtgtggcaacatggccaacctgagcctgcatgaccatgatggcagcagcggggccagtgaccaggacaccctggcccccctgccccaccctggagctgccccctggcccatggccttcccctaccagtacccacctccaccccacccctacaacccccaccctggcttccctgagctgggctacagctatggaggcggcagcgccagcagccagcacagcgagggcagccgcagcagcggcagcaacagaagtggcagtgacaggaggaaggagaaggaccccaaggccggggacagcaagagcggcggcagcggcagcgagagtgaccacaccaccaggagcagcctgcggggcccccgggagcgggcccccagcgagaggagcggccctgctgccagcgagcacagccacaggagccaccacagcctggccagcagcctgcggagccaccacacccaccccagctatggccccccaggagtgccccccctgtatggcccccccatgctgatgatgcctcctcctcctgctgccatgggccccccaggggcccctcctggccgggacctggcctctgtgcccccagagctgacagccagccggcagagcttcaggatggccatgggcaaccccagcgagttctttgtggatgtgatggtgctgcggggctggggcgcctag

SEQ ID NO: 150209 - DNA, 2100 bp, synthetic construct
  misc_feature 1..2100: note = Description of Artificial Sequence: Synthetic coding sequence
  source 1..2100: mol_type = other DNA
atgggagagaccaagatcatctaccacctggatggccaggagaccccctacctggtgaagctgcccctgcctgctgagcgggtgaccctggccgacttcaagggcgtgctgcagaggcccagctacaagttcttcttcaagtccatggatgatgactttggagtggtgaaggaggagatcagtgatgacaatgccaagctgccctgcttcaacggccgggtggtgtcctggctggtgtctgctgagggcagccacccagaccctgcccccttctgtgccgacaaccccagcgagctgcccccacccatggagaggactggaggcattggagacagccggccccccagcttccacccccatgctgggggcggcagccaggagaacctggacaatgacacagaaacagacagcctggtgtctgcccagcgggagcggcccaggagaagagatggccctgagcacgccacccggctgaatggaacagccaagggggagaggagaagagagcccggcggctatgacagcagcagcaccctgatgagcagcgagctggagaccaccagcttctttgacagtgatgaagatgacagcaccagccgcttcagcagcagcacagagcagagcagcgccagccggctgatgagaagacacaagagaagaagaaggaagcagaaggtgtccagaattgaaagaagcagcagcttcagcagcatcacagacagcaccatgagcctgaacatcatcaccgtgaccctgaacatggagaagtacaacttcctgggcatcagcatcgtgggccagagcaatgaaagaggagatggcggcatctacatcggcagcatcatgaagggcggcgctgtggccgcagatggaagaattgagcccggggacatgctgctgcaggtgaatgagatcaactttgagaacatgagcaatgatgatgctgtgcgggtgctgcgggagatcgtgcacaagccaggccccatcaccctgactgtggccaagtgctgggaccccagcccccggggctgcttcaccctgcccaggaccatgacaggcaccttccctgcctacggcatgagccccagcctgagcaccatcaccagcaccagcagcagcatcaccagcagcatcccagacacagagcggctggatgacttccacctgagcatccacagcgacatggccgccatcgtgaaggccatggccagccctgagagcggcctggaggtgcgggacaggatgtggctgaagatcaccatccccaatgccttcatcggcagtgatgtggtggactggctgtaccacaacgtggagggcttcacagaccggcgggaggccaggaaatatgccagcaacctgctgaaggccggcttcatccgccacacagtgaacaagatcaccttcagcgagcagtgctactacatctttggagacctgtgtggcaacatggccaacctgagcctgcatgaccatgatggcagcagcggggccagtgaccaggacaccctggcccccctgccccaccctggggccgccccctggcccatggccttcccctaccagtacccacctccaccccacccctacaacccccaccctggcttccctgagctgggctacagctatggaggcggcagcgccagcagccagcacagcgagggcagccgcagcagcggcagcaacagaagtggcagtgacaggaggaaggagaaggaccccaaggccggggacagcaagagcggcggcagcggcagcgagagtgaccacaccaccaggagcagcctgcggggcccccgggagcgggcccccagcgagaggagcggccctgctgccagcgagcacagccacaggagccaccacagcctggccagcagcctgcggagccaccacacccaccccagctatggccccccaggagtgccccccctgtatggcccccccatgctgatgatgcctcctcctcctgctgccatgggccccccaggggcccctcctggccgggacctggcctctgtgcccccagagctgacagccagccggcagagcttcaggatggccatgggcaaccccagcgagttctttgtggatgtgatgtag

SEQ ID NO: 150210 - DNA, 315 bp, synthetic construct
  misc_feature 1..315: note = Description of Artificial Sequence: Synthetic coding sequence
  source 1..315: mol_type = other DNA
atgcctgaggcccacatgcagcctgccaagctgcagaccagcctgcccaccacagaccacggcagcaagaagcctgtgtcctgctacctgccccccctgagcaatgcccaccccatgtgcatcgaggtgcagaatgcccagaactgcagcagcgctgctgccaccctggagcccagcatcatcagtgacacctgcttctacaagcccatcaccaaggaccagctgagcagccgctctgagctgaacacagtgcggctgaagtgcctgaacagcctgcggggctggaagatcctgaaccagctgagcctgacctag

SEQ ID NO: 150211 - DNA, 1437 bp, synthetic construct
  misc_feature 1..1437: note = Description of Artificial Sequence: Synthetic coding sequence
  source 1..1437: mol_type = other DNA
atgggcagccgctggagcagcgaggaggagcggcagcccctgctgggccctggcctgggccctggcctgggcgcctcctggaggagccgggaggccgctgctgctgccctgcctgctgctgtgcccggccctggccgggtgtatggccgccgctggctggtgctgctgctcttcagcctgctggcctttgtgcagggcctggtgtggaacacctggggccccatccagaacagcgcccggcaggcctacggcttcagctcctgggacatcgccctgctggtgctgtggggccccatcggcttcctgccctgctttgccttcatgtggctgctggacaagaggggcctgcgcatcaccgtgctgctgaccagcttcctgatggtgctgggcaccggcctgcgctgcatccccatcagtgacctgatcctgaagagaagactcatccatggaggccagatgctgaatggcctggccggccccaccgtgatgaatgctgcccccttcctgagcaccacctggttcagcgcagatgagcgggccacagccacagccatcgcctccatgctgagctacctgggcggggcctgtgccttcctggtgggccccctggtggtgcctgccccaaatggcaccagccccctgctggccgctgagagcagccgggcccacatcaaggaccgcatcgaggccgtgctgtatgcagagtttggagtggtgtgcctgatcttcagcgccaccctggcctacttccccccccggccccccctgcccccatctgtggccgccgccagccagaggctgagctaccgccgctctgtgtgccgcctgctgagcaacttccgcttcctgatgattgccctggcctatgccatccccctgggcgtgtttgctggctggagcggcgtgctggacctgatcctgaccccagcccacgtgtcccaggtggatgctggctggattggcttctggagcatcgtgggcggctgtgtggtgggcatcgccatggccaggtttgctgacttcatccggggcatgctgaagctgatcctgctgctgctcttcagcggggccaccctgagcagcacctggttcaccctgacctgcctgaacagcatcacccacctgcccctgaccaccgtgaccctgtatgccagctgcatcctgctgggcgtcttcctgaacagctctgtgcccatcttctttgagctgtttgtggagaccgtgtaccctgtgcctgagggcatcacctgtggggtggtgaccttcctgagcaacatgttcatgggcgtgctgctcttcttcctgaccttctaccacacagagctgtcctggttcaactggtgcctgcccggcagctgcctgctgagcctgctgctgatcctgtgcttccgggagagctatgaccggctgtacctggatgtggtggtgtctgtgtag

SEQ ID NO: 150212 - DNA, 1644 bp, synthetic construct
  misc_feature 1..1644: note = Description of Artificial Sequence: Synthetic coding sequence
  source 1..1644: mol_type = other DNA
atgcctgggggcggcccccagggcgccccagctgctgctgggggcggcggcgtgagccaccgggccggcagccgggactgcctgcccccagctgcctgcttcagaagaagaaggctggcccggcggcccggctacatgaggagcagcacaggccctggcatcggcttcctgagccctgctgtgggcaccctcttccgcttccctgggggcgtgtctggagaggagagccaccacagcgagagccgggcccggcagtgtggcctggacagccggggcctgctggtgcgcagccctgtgtccaagtctgctgctgcccccaccgtgacctctgtgcggggcaccagcgcccacttcggcatccagctgcggggcggcacccggctgcctgaccggctgtcctggccctgtggccctggcagcgctggctggcagcaggagtttgctgccatggacagcagcgagaccctggatgcctcctgggaggccgcctgcagtgatggagccaggagagtgcgggccgccggcagcctgcccagcgctgagctgagcagcaacagctgcagccctggctgcggccctgaggtgccccccaccccacctggcagccacagcgccttcaccagcagcttctccttcatccggctgagcctgggcagcgctggggagcggggggaggccgagggctgcccccccagccgggaggccgagagccactgccagagcccccaggagatgggcgccaaggccgccagcctggatggcccccatgaggacccccgctgcctgagccggcccttcagcctgctggccaccagggtgtctgctgacctggcccaggccgccaggaacagcagcaggcctgagcgggacatgcacagcctgcctgacatggaccccggcagcagcagcagcctggaccccagcctggccggctgtggaggagatggcagcagcggcagcggagatgcccacagctgggacaccctgctgaggaagtgggagcctgtgctgcgggactgcctgctgaggaacagacggcagatggaggtgatcagcctgcggctgaagctgcagaagctgcaggaggatgctgtggagaatgatgattatgacaaggccgagaccctgcagcagaggctggaggacctggagcaggagaagatcagcctgcacttccagctgcccagccggcagcctgccctgagcagcttcctgggccacctggccgcccaggtgcaggccgccctgcggcggggggccacccagcaggccagcggagatgacacccacacccccctgaggatggagccccggctgctggagcccacagcccaggacagcctgcacgtgtccatcacccggcgggactggctgctgcaggagaagcagcagctgcagaaggagattgaggccctgcaggccaggatgtttgtgctggaggccaaggaccagcagctgcggcgggagattgaggagcaggagcagcagctgcagtggcagggctgtgacctgacccccctggtgggccagctgagcctgggccagctgcaggaggtgtccaaggccctgcaggacaccctggccagcgctggccagatccccttccacgccgagcccccagagaccatccgccgctgtgtgtag

SEQ ID NO: 150213 - DNA, 1110 bp, synthetic construct
  misc_feature 1..1110: note = Description of Artificial Sequence: Synthetic coding sequence
  source 1..1110: mol_type = other DNA
atgcctgggggcggcccccagggcgccccagctgctgctgggggcggcggcgtgagccaccgggccggcagccgggactgcctgcccccagctgcctgcttcagaagaagaaggctggcccggcggcccggctacatgaggagcagcacaggccctggcatcggcttcctgagccctgctgtgggcaccctcttccgcttccctgggggcgtgtctggagaggagagccaccacagcgagagccgggcccggcagtgtggcctggacagccggggcctgctggtgcgcagccctgtgtccaagtctgctgctgcccccaccgtgacctctgtgcggggcaccagcgcccacttcggcatccagctgcggggcggcacccggctgcctgaccggctgtcctggccctgtggccctggcagcgctggctggcagcaggagtttgctgccatggacagcagcgagaccctggatgcctcctgggaggccgcctgcagtgatggagccaggagagtgcgggccgccggcagcctgcccagcgctgagctgagcagcaacagctgcagccctggctgcggccctgaggtgccccccaccccacctggcagccacagcgccttcaccagcagcttctccttcatccggctgagcctgggcagcgctggggagcggggggaggccgagggctgcccccccagccgggaggccgagagccactgccagagcccccaggagatgggcgccaaggccgccagcctggatggcccccatgaggacccccgctgcctgagccggcccttcagcctgctggccaccagggtgtctgctgacctggcccaggccgccaggaacagcagcaggcctgagcgggacatgcacagcctgcctgacatggaccccggcagcagcagcagcctggaccccagcctggccggctgtggaggagatggcagcagcggcagcggagatgcccacagctgggacaccctgctgaggaagtgggagcctgtgctgcgggactgcctgctgaggaacagacggcagatggagctggagcccatcgccctggaccccccctggaagcccaggcaccctgagcccaacagctactag

SEQ ID NO: 150214 - DNA, 717 bp, synthetic construct
  misc_feature 1..717: note = Description of Artificial Sequence: Synthetic coding sequence
  source 1..717: mol_type = other DNA
atggacagcagcgagaccctggatgcctcctgggaggccgcctgcagtgatggagcccggcgggtgcgggctgctggcagcctgcccagcgctgagctgagcagcaacagctgcagccctggctgcggccctgaggtgccccccaccccacctggcagccacagcgccttcaccagcagcttctccttcatccggctgagcctgggcagcgctggggagcggggggaggccgagggctgcccccccagccgggaggccgagagccactgccagagcccccaggagatgggcgccaaggccgccagcctggatggcccccatgaggacccccgctgcctgagccggcccttcagcctgctggccaccagggtgtctgctgacctggcccaggccgccaggaacagcagcaggcctgagcgggacatgcacagcctgcctgacatggaccccggcagcagcagcagcctggaccccagcctggccggctgtggaggagatggcagcagcggcagcggagatgcccacagctgggacaccctgctgaggaagtgggagcctgtgctgcgggactgcctgctgaggaacagacggcagatggaggtgatcagcctgcggctgaagctgcagaagctgcaggaggatgctgtggagaatgatgattatgacaaggccggcaccaactgcttcggcagcaccatggaggccagcaccagctag

SEQ ID NO: 150215 - DNA, 2268 bp, synthetic construct
  misc_feature 1..2268: note = Description of Artificial Sequence: Synthetic coding sequence
  source 1..2268: mol_type = other DNA
atgcctgggggcggcccccagggcgccccagctgctgctgggggcggcggcgtgagccaccgggccggcagccgggactgcctgcccccagctgcctgcttcagaagaagaaggctggcccggcggcccggctacatgaggagcagcacaggccctggcatcggcttcctgagccctgctgtgggcaccctcttccgcttccctgggggcgtgtctggagaggagagccaccacagcgagagccgggcccggcagtgtggcctggacagccggggcctgctggtgcgcagccctgtgtccaagtctgctgctgcccccaccgtgacctctgtgcggggcaccagcgcccacttcggcatccagctgcggggcggcacccggctgcctgaccggctgtcctggccctgtggccctggcagcgctggctggcagcaggagtttgctgccatggacagcagcgagaccctggatgcctcctgggaggccgcctgcagtgatggagccaggagagtgcgggccgccggcagcctgcccagcgctgagctgagcagcaacagctgcagccctggctgcggccctgaggtgccccccaccccacctggcagccacagcgccttcaccagcagcttctccttcatccggctgagcctgggcagcgctggggagcggggggaggccgagggctgcccccccagccgggaggccgagagccactgccagagcccccaggagatgggcgccaaggccgccagcctggatggcccccatgaggacccccgctgcctgagccggcccttcagcctgctggccaccagggtgtctgctgacctggcccaggccgccaggaacagcagcaggcctgagcgggacatgcacagcctgcctgacatggaccccggcagcagcagcagcctggaccccagcctggccggctgtggaggagatggcagcagcggcagcggagatgcccacagctgggacaccctgctgaggaagtgggagcctgtgctgcgggactgcctgctgaggaacagacggcagatggaggtgatcagcctgcggctgaagctgcagaagctgcaggaggatgctgtggagaatgatgattatgacaaggccgagaccctgcagcagaggctggaggacctggagcaggagaagatcagcctgcacttccagctgcccagccggcagcctgccctgagcagcttcctgggccacctggccgcccaggtgcaggccgccctgcggcggggggccacccagcaggccagcggagatgacacccacacccccctgaggatggagccccggctgctggagcccacagcccaggacagcctgcacgtgtccatcacccggcgggactggctgctgcaggagaagcagcagctgcagaaggagattgaggccctgcaggccaggatgtttgtgctggaggccaaggaccagcagctgcggcgggagattgaggagcaggagcagcagctgcagtggcagggctgtgacctgacccccctggtgggccagctgagcctgggccagctgcaggaggtgtccaaggccctgcaggacaccctggccagcgctggccagatccccttccacgccgagcccccagagaccatccgcagcctgcaggagcgcatcaagagcctgaacctgagcctgaaggagatcaccaccaaggtgtgcatgtctgagaagttctgcagcaccctgaggaagaaggtgaatgacatcgagacccagctgcctgccctgctggaggccaagatgcacgccatcagcggcaaccacttctggacagccaaggacctgacagaggagatccgcagcctgaccagcgagcgggagggcctggagggcctgctgagcaagctgctggtgctgagcagcagaaatgtgaagaagctgggctctgtgaaggaggactacaaccggctgcggcgggaggtggagcaccaggagacagcctatgatggagtgtccctgtgcaggcctgtgtggagcgctgtggtgcgcagctgcagcctgcagcccctgcccccagagttcaagcagttcagctgcctgagcctgcggagctcctgggactaccgctgccccccaccctgcctggccaactttgtgttcctggtggagatgggcttctaccacgtggaccagacaggcctgaagctgctgaccagcagtgacccccccagcagcgccagccagagcgctggcatcacagacatgagccactgtgcctggcccctgcagtag

SEQ ID NO: 150216 - DNA, 2037 bp, synthetic construct
  misc_feature 1..2037: note = Description of Artificial Sequence: Synthetic coding sequence
  source 1..2037: mol_type = other DNA
atgcctgggggcggcccccagggcgccccagctgctgctgggggcggcggcgtgagccaccgggccggcagccgggactgcctgcccccagctgcctgcttcagaagaagaaggctggcccggcggcccggctacatgaggagcagcacaggccctggcatcggcttcctgagccctgctgtgggcaccctcttccgcttccctgggggcgtgtctggagaggagagccaccacagcgagagccgggcccggcagtgtggcctggacagccggggcctgctggtgcgcagccctgtgtccaagtctgctgctgcccccaccgtgacctctgtgcggggcaccagcgcccacttcggcatccagctgcggggcggcacccggctgcctgaccggctgtcctggccctgtggccctggcagcgctggctggcagcaggagtttgctgccatggacagcagcgagaccctggatgcctcctgggaggccgcctgcagtgatggagccaggagagtgcgggccgccggcagcctgcccagcgctgagctgagcagcaacagctgcagccctggctgcggccctgaggtgccccccaccccacctggcagccacagcgccttcaccagcagcttctccttcatccggctgagcctgggcagcgctggggagcggggggaggccgagggctgcccccccagccgggaggccgagagccactgccagagcccccaggagatgggcgccaaggccgccagcctggatggcccccatgaggacccccgctgcctgagccggcccttcagcctgctggccaccagggtgtctgctgacctggcccaggccgccaggaacagcagcaggcctgagcgggacatgcacagcctgcctgacatggaccccggcagcagcagcagcctggaccccagcctggccggctgtggaggagatggcagcagcggcagcggagatgcccacagctgggacaccctgctgaggaagtgggagcctgtgctgcgggactgcctgctgaggaacagacggcagatggaggtgatcagcctgcggctgaagctgcagaagctgcaggaggatgctgtggagaatgatgattatgacaaggccgagaccctgcagcagaggctggaggacctggagcaggagaagatcagcctgcacttccagctgcccagccggcagcctgccctgagcagcttcctgggccacctggccgcccaggtgcaggccgccctgcggcggggggccacccagcaggccagcggagatgacacccacacccccctgaggatggagccccggctgctggagcccacagcccaggacagcctgcacgtgtccatcacccggcgggactggctgctgcaggagaagcagcagctgcagaaggagattgaggccctgcaggccaggatgtttgtgctggaggccaaggaccagcagctgcggcgggagattgaggagcaggagcagcagctgcagtggcagggctgtgacctgacccccctggtgggccagctgagcctgggccagctgcaggaggtgtccaaggccctgcaggacaccctggccagcgctggccagatccccttccacgccgagcccccagagaccatccgcagcctgcaggagcgcatcaagagcctgaacctgagcctgaaggagatcaccaccaaggtgtgcatgtctgagaagttctgcagcaccctgaggaagaaggtgaatgacatcgagacccagctgcctgccctgctggaggccaagatgcacgccatcagcggcaaccacttctggacagccaaggacctgacagaggagatccgcagcctgaccagcgagcgggagggcctggagggcctgctgagcaagctgctggtgctgagcagcagaaatgtgaagaagctgggctctgtgaaggaggactacaaccggctgcggcgggaggtggagcaccaggagacagcctacggctacaagtactgtgatgctgagagctggacccagaggagccagcagctggcctag

SEQ ID NO: 150217 - DNA, 2499 bp, synthetic construct
  misc_feature 1..2499: note = Description of Artificial Sequence: Synthetic coding sequence
  source 1..2499: mol_type = other DNA
atgcctgggggcggcccccagggcgccccagctgctgctgggggcggcggcgtgagccaccgggccggcagccgggactgcctgcccccagctgcctgcttcagaagaagaaggctggcccggcggcccggctacatgaggagcagcacaggccctggcatcggcttcctgagccctgctgtgggcaccctcttccgcttccctgggggcgtgtctggagaggagagccaccacagcgagagccgggcccggcagtgtggcctggacagccggggcctgctggtgcgcagccctgtgtccaagtctgctgctgcccccaccgtgacctctgtgcggggcaccagcgcccacttcggcatccagctgcggggcggcacccggctgcctgaccggctgtcctggccctgtggccctggcagcgctggctggcagcaggagtttgctgccatggacagcagcgagaccctggatgcctcctgggaggccgcctgcagtgatggagccaggagagtgcgggccgccggcagcctgcccagcgctgagctgagcagcaacagctgcagccctggctgcggccctgaggtgccccccaccccacctggcagccacagcgccttcaccagcagcttctccttcatccggctgagcctgggcagcgctggggagcggggggaggccgagggctgcccccccagccgggaggccgagagccactgccagagcccccaggagatgggcgccaaggccgccagcctggatggcccccatgaggacccccgctgcctgagccggcccttcagcctgctggccaccagggtgtctgctgacctggcccaggccgccaggaacagcagcaggcctgagcgggacatgcacagcctgcctgacatggaccccggcagcagcagcagcctggaccccagcctggccggctgtggaggagatggcagcagcggcagcggagatgcccacagctgggacaccctgctgaggaagtgggagcctgtgctgcgggactgcctgctgaggaacagacggcagatggaggtgatcagcctgcggctgaagctgcagaagctgcaggaggatgctgtggagaatgatgattatgacaaggccgagaccctgcagcagaggctggaggacctggagcaggagaagatcagcctgcacttccagctgcccagccggcagcctgccctgagcagcttcctgggccacctggccgcccaggtgcaggccgccctgcggcggggggccacccagcaggccagcggagatgacacccacacccccctgaggatggagccccggctgctggagcccacagcccaggacagcctgcacgtgtccatcacccggcgggactggctgctgcaggagaagcagcagctgcagaaggagattgaggccctgcaggccaggatgtttgtgctggaggccaaggaccagcagctgcggcgggagattgaggagcaggagcagcagctgcagtggcagggctgtgacctgacccccctggtgggccagctgagcctgggccagctgcaggaggtgtccaaggccctgcaggacaccctggccagcgctggccagatccccttccacgccgagcccccagagaccatccgcagcctgcaggagcgcatcaagagcctgaacctgagcctgaaggagatcaccaccaaggtgtgcatgtctgagaagttctgcagcaccctgaggaagaaggtgaatgacatcgagacccagctgcctgccctgctggaggccaagatgcacgccatcagcggcaaccacttctggacagccaaggacctgacagaggagatccgcagcctgaccagcgagcgggagggcctggagggcctgctgagcaagctgctggtgctgagcagcagaaatgtgaagaagctgggctctgtgaaggaggactacaaccggctgcggcgggaggtggagcaccaggagacagcctatgagacctctgtgaaggagaacaccatgaagtacatggagaccctgaagaacaagctgtgcagctgcaagtgccccctgctgggcaaggtgtgggaggccgacctggaggcctgccgcctgctgatccagagcctgcagctgcaggaggcccggggcagcctgtctgtggaggatgagcggcagatggatgacctggagggcgccgccccacccatccccccccggctgcacagcgaggacaagaggaagacccccctgaaggagagctacatcctgtctgctgagctgggggagaagtgtgaagatattggcaagaagctgctgtacctggaggaccagctgcacacagccatccacagccatgatgaagatctcatccacagcctgcggcgggagctgcagatggtgaaggagaccctgcaggccatgatcctgcagctgcagcctgccaaggaggccggggagcgggaggccgccgccagctgcatgacagctggggtgcatgaggcccaggcctag

SEQ ID NO: 150218 - DNA, 2661 bp, synthetic construct
  misc_feature 1..2661: note = Description of Artificial Sequence: Synthetic coding sequence
  source 1..2661: mol_type = other DNA
atgcctgggggcggcccccagggcgccccagctgctgctgggggcggcggcgtgagccaccgggccggcagccgggactgcctgcccccagctgcctgcttcagaagaagaaggctggcccggcggcccggctacatgaggagcagcacaggccctggcatcggcttcctgagccctgctgtgggcaccctcttccgcttccctgggggcgtgtctggagaggagagccaccacagcgagagccgggcccggcagtgtggcctggacagccggggcctgctggtgcgcagccctgtgtccaagtctgctgctgcccccaccgtgacctctgtgcggggcaccagcgcccacttcggcatccagctgcggggcggcacccggctgcctgaccggctgtcctggccctgtggccctggcagcgctggctggcagcaggagtttgctgccatggacagcagcgagaccctggatgcctcctgggaggccgcctgcagtgatggagccaggagagtgcgggccgccggcagcctgcccagcgctgagctgagcagcaacagctgcagccctggctgcggccctgaggtgccccccaccccacctggcagccacagcgccttcaccagcagcttctccttcatccggctgagcctgggcagcgctggggagcggggggaggccgagggctgcccccccagccgggaggccgagagccactgccagagcccccaggagatgggcgccaaggccgccagcctggatggcccccatgaggacccccgctgcctgagccggcccttcagcctgctggccaccagggtgtctgctgacctggcccaggccgccaggaacagcagcaggcctgagcgggacatgcacagcctgcctgacatggaccccggcagcagcagcagcctggaccccagcctggccggctgtggaggagatggcagcagcggcagcggagatgcccacagctgggacaccctgctgaggaagtgggagcctgtgctgcgggactgcctgctgaggaacagacggcagatggaggtgatcagcctgcggctgaagctgcagaagctgcaggaggatgctgtggagaatgatgattatgacaaggtggagaccggcttccactacgtgggccaggccggcctggagctgctgaccagcagcaaccccccagccagcgccagccagagcgctggcatcacagctgagaccctgcagcagaggctggaggacctggagcaggagaagatcagcctgcacttccagctgcccagccggcagcctgccctgagcagcttcctgggccacctggccgcccaggtgcaggccgccctgcggcggggggccacccagcaggccagcggagatgacacccacacccccctgaggatggagccccggctgctggagcccacagcccaggacagcctgcacgtgtccatcacccggcgggactggctgctgcaggagaagcagcagctgcagaaggagattgaggccctgcaggccaggatgtttgtgctggaggccaaggaccagcagctgcggcgggagattgaggagcaggagcagcagctgcagtggcagggctgtgacctgacccccctggtgggccagctgagcctgggccagctgcaggaggtgtccaaggccctgcaggacaccctggccagcgctggccagatccccttccacgccgagcccccagagaccatccgcagcctgcaggagcgcatcaagagcctgaacctgagcctgaaggagatcaccaccaaggtgtgcatgtctgagaagttctgcagcaccctgaggaagaaggtgaatgacatcgagacccagctgcctgccctgctggaggccaagatgcacgccatcagcggcaaccacttctggacagccaaggacctgacagaggagatccgcagcctgaccagcgagcgggagggcctggagggcctgctgagcaagctgctggtgctgagcagcagaaatgtgaagaagctgggctctgtgaaggaggactacaaccggctgcggcgggaggtggagcaccaggagacagcctatgagacctctgtgaaggagaacaccatgaagtacatggagaccctgaagaacaagctgtgcagctgcaagtgccccctgctgggcaaggtgtgggaggccgacctggaggcctgccgcctgctgatccagagcctgcagctgcaggaggcccggggcagcctgtctgtggaggatgagcggcagatggatgacctggagggcgccgccccacccatccccccccggctgcacagcgaggacaagaggaagacccccctgaaggtgctggaggagtggaagacccacctgatccccagcctgcactgtgccggcggggagcagaaggaggagagctacatcctgtctgctgagctgggggagaagtgtgaagatattggcaagaagctgctgtacctggaggaccagctgcacacagccatccacagccatgatgaagatctcatccacagcctgcggcgggagctgcagatggtgaaggagaccctgcaggccatgatcctgcagctgcagcctgccaaggaggccggggagcgggaggccgccgccagctgcatgacagctggggtgcatgaggcccaggcctag

SEQ ID NO: 150219 - DNA, 621 bp, synthetic construct
  misc_feature 1..621: note = Description of Artificial Sequence: Synthetic coding sequence
  source 1..621: mol_type = other DNA
tgaaaccacttctggacagccaaggacctgacagaggagatccgcagcctgaccagcgagcgggagggcctggagggcctgctgagcaagctgctggtgctgagcagcagaaatgtgaagaagctgggctctgtgaaggaggactacaaccggctgcggcgggaggtggagcaccaggagacagcctatgagacctctgtgaaggagaacaccatgaagtacatggagaccctgaagaacaagctgtgcagctgcaagtgccccctgctgggcaaggtgtgggaggccgacctggaggcctgccgcctgctgatccagagcctgcagctgcaggaggcccggggcagcctgtctgtggaggatgagcggcagatggatgacctggagggcgccgccccacccatccccccccggctgcacagcgaggacaagaggaagacccccctgaaggtgctggaggagtggaagacccacctgatccccagcctgcactgtgccggcggggagcagaaggaggtgtgccccttccacatggccagcagaggagacccctacagcaagggctgcttcggcaccatgctgcagatgggcaccatcaacatcggcaaggccagccactag

SEQ ID NO: 150220 - DNA, 279 bp, synthetic construct
  misc_feature 1..279: note = Description of Artificial Sequence: Synthetic coding sequence
  source 1..279: mol_type = other DNA
atgaagtacatggagaccctgaagaacaagctgtgcagctgcaagtgccccctgctgggcaaggtgtgggaggccgacctggaggcctgccgcctgctgatccagagcctgcagctgcaggaggcccggggcagcctgtctgtggaggatgagcggcagatggatgacctggagggcgccgccccacccatccccccccggctgcacagcgaggacaagaggaagacccccctgaaggtgctggaggagtggaagacccacctgatccccagcctgtag

SEQ ID NO: 150221 - DNA, 2565 bp, synthetic construct
  misc_feature 1..2565: note = Description of Artificial Sequence: Synthetic coding sequence
  source 1..2565: mol_type = other DNA
atgcctgggggcggcccccagggcgccccagctgctgctgggggcggcggcgtgagccaccgggccggcagccgggactgcctgcccccagctgcctgcttcagaagaagaaggctggcccggcggcccggctacatgaggagcagcacaggccctggcatcggcttcctgagccctgctgtgggcaccctcttccgcttccctgggggcgtgtctggagaggagagccaccacagcgagagccgggcccggcagtgtggcctggacagccggggcctgctggtgcgcagccctgtgtccaagtctgctgctgcccccaccgtgacctctgtgcggggcaccagcgcccacttcggcatccagctgcggggcggcacccggctgcctgaccggctgtcctggccctgtggccctggcagcgctggctggcagcaggagtttgctgccatggacagcagcgagaccctggatgcctcctgggaggccgcctgcagtgatggagccaggagagtgcgggccgccggcagcctgcccagcgctgagctgagcagcaacagctgcagccctggctgcggccctgaggtgccccccaccccacctggcagccacagcgccttcaccagcagcttctccttcatccggctgagcctgggcagcgctggggagcggggggaggccgagggctgcccccccagccgggaggccgagagccactgccagagcccccaggagatgggcgccaaggccgccagcctggatggcccccatgaggacccccgctgcctgagccggcccttcagcctgctggccaccagggtgtctgctgacctggcccaggccgccaggaacagcagcaggcctgagcgggacatgcacagcctgcctgacatggaccccggcagcagcagcagcctggaccccagcctggccggctgtggaggagatggcagcagcggcagcggagatgcccacagctgggacaccctgctgaggaagtgggagcctgtgctgcgggactgcctgctgaggaacagacggcagatggaggtgatcagcctgcggctgaagctgcagaagctgcaggaggatgctgtggagaatgatgattatgacaaggccgagaccctgcagcagaggctggaggacctggagcaggagaagatcagcctgcacttccagctgcccagccggcagcctgccctgagcagcttcctgggccacctggccgcccaggtgcaggccgccctgcggcggggggccacccagcaggccagcggagatgacacccacacccccctgaggatggagccccggctgctggagcccacagcccaggacagcctgcacgtgtccatcacccggcgggactggctgctgcaggagaagcagcagctgcagaaggagattgaggccctgcaggccaggatgtttgtgctggaggccaaggaccagcagctgcggcgggagattgaggagcaggagcagcagctgcagtggcagggctgtgacctgacccccctggtgggccagctgagcctgggccagctgcaggaggtgtccaaggccctgcaggacaccctggccagcgctggccagatccccttccacgccgagcccccagagaccatccgcagcctgcaggagcgcatcaagagcctgaacctgagcctgaaggagatcaccaccaaggtgtgcatgtctgagaagttctgcagcaccctgaggaagaaggtgaatgacatcgagacccagctgcctgccctgctggaggccaagatgcacgccatcagcggcaaccacttctggacagccaaggacctgacagaggagatccgcagcctgaccagcgagcgggagggcctggagggcctgctgagcaagctgctggtgctgagcagcagaaatgtgaagaagctgggctctgtgaaggaggactacaaccggctgcggcgggaggtggagcaccaggagacagcctatgagacctctgtgaaggagaacaccatgaagtacatggagaccctgaagaacaagctgtgcagctgcaagtgccccctgctgggcaaggtgtgggaggccgacctggaggcctgccgcctgctgatccagagcctgcagctgcaggaggcccggggcagcctgtctgtggaggatgagcggcagatggatgacctggagggcgccgccccacccatccccccccggctgcacagcgaggacaagaggaagacccccctgaaggtgctggaggagtggaagacccacctgatccccagcctgcactgtgccggcggggagcagaaggaggagagctacatcctgtctgctgagctgggggagaagtgtgaagatattggcaagaagctgctgtacctggaggaccagctgcacacagccatccacagccatgatgaagatctcatccacagcctgcggcgggagctgcagatggtgaaggagaccctgcaggccatgatcctgcagctgcagcctgccaaggaggccggggagcgggaggccgccgccagctgcatgacagctggggtgcatgaggcccaggcctag

SEQ ID NO: 150222 - DNA, 2199 bp, synthetic construct
  misc_feature 1..2199: note = Description of Artificial Sequence: Synthetic coding sequence
  source 1..2199: mol_type = other DNA
atgcctgggggcggcccccagggcgccccagctgctgctgggggcggcggcgtgagccaccgggccggcagccgggactgcctgcccccagctgcctgcttcagaagaagaaggctggcccggcggcccggctacatgaggagcagcacaggccctggcatcggcttcctgagccctgctgtgggcaccctcttccgcttccctgggggcgtgtctggagaggagagccaccacagcgagagccgggcccggcagtgtggcctggacagccggggcctgctggtgcgcagccctgtgtccaagtctgctgctgcccccaccgtgacctctgtgcggggcaccagcgcccacttcggcatccagctgcggggcggcacccggctgcctgaccggctgtcctggccctgtggccctggcagcgctggctggcagcaggagtttgctgccatggacagcagcgagaccctggatgcctcctgggaggccgcctgcagtgatggagccaggagagtgcgggccgccggcagcctgcccagcgctgagctgagcagcaacagctgcagccctggctgcggccctgaggtgccccccaccccacctggcagccacagcgccttcaccagcagcttctccttcatccggctgagcctgggcagcgctggggagcggggggaggccgagggctgcccccccagccgggaggccgagagccactgccagagcccccaggagatgggcgccaaggccgccagcctggatggcccccatgaggacccccgctgcctgagccggcccttcagcctgctggccaccagggtgtctgctgacctggcccaggccgccaggaacagcagcaggcctgagcgggacatgcacagcctgcctgacatggaccccggcagcagcagcagcctggaccccagcctggccggctgtggaggagatggcagcagcggcagcggagatgcccacagctgggacaccctgctgaggaagtgggagcctgtgctgcgggactgcctgctgaggaacagacggcagatggaggtgatcagcctgcggctgaagctgcagaagctgcaggaggatgctgtggagaatgatgattatgacaaggccgagaccctgcagcagaggctggaggacctggagcaggagaagatcagcctgcacttccagctgcccagccggcagcctgccctgagcagcttcctgggccacctggccgcccaggtgcaggccgccctgcggcggggggccacccagcacctgcaggagcgcatcaagagcctgaacctgagcctgaaggagatcaccaccaaggtgtgcatgtctgagaagttctgcagcaccctgaggaagaaggtgaatgacatcgagacccagctgcctgccctgctggaggccaagatgcacgccatcagcggcaaccacttctggacagccaaggacctgacagaggagatccgcagcctgaccagcgagcgggagggcctggagggcctgctgagcaagctgctggtgctgagcagcagaaatgtgaagaagctgggctctgtgaaggaggactacaaccggctgcggcgggaggtggagcaccaggagacagcctatgagacctctgtgaaggagaacaccatgaagtacatggagaccctgaagaacaagctgtgcagctgcaagtgccccctgctgggcaaggtgtgggaggccgacctggaggcctgccgcctgctgatccagagcctgcagctgcaggaggcccggggcagcctgtctgtggaggatgagcggcagatggatgacctggagggcgccgccccacccatccccccccggctgcacagcgaggacaagaggaagacccccctgaaggtgctggaggagtggaagacccacctgatccccagcctgcactgtgccggcggggagcagaaggaggagagctacatcctgtctgctgagctgggggagaagtgtgaagatattggcaagaagctgctgtacctggaggaccagctgcacacagccatccacagccatgatgaagatctcatccacagcctgcggcgggagctgcagatggtgaaggagaccctgcaggccatgatcctgcagctgcagcctgccaaggaggccggggagcgggaggccgccgccagctgcatgacagctggggtgcatgaggcccaggcctag

SEQ ID NO: 150223 - DNA, 1830 bp, synthetic construct
  misc_feature 1..1830: note = Description of Artificial Sequence: Synthetic coding sequence
  source 1..1830: mol_type = other DNA
atgcctgggggcggcccccagggcgccccagctgctgctgggggcggcggcgtgagccaccgggccggcagccgggactgcctgcccccagctgcctgcttcagaagaagaaggctggcccggcggcccggctacatgaggagcagcacaggccctggcatcggcttcctgagccctgctgtgggcaccctcttccgcttccctgggggcgtgtctggagaggagagccaccacagcgagagccgggcccggcagtgtggcctggacagccggggcctgctggtgcgcagccctgtgtccaagtctgctgctgcccccaccgtgacctctgtgcggggcaccagcgcccacttcggcatccagctgcggggcggcacccggctgcctgaccggctgtcctggccctgtggccctggcagcgctggctggcagcaggagtttgctgccatggacagcagcgagaccctggatgcctcctgggaggccgcctgcagtgatggagccaggagagtgcgggccgccggcagcctgcccagcgctgagctgagcagcaacagctgcagccctggctgcggccctgaggtgccccccaccccacctggcagccacagcgccttcaccagcagcttctccttcatccggctgagcctgggcagcgctggggagcggggggaggccgagggctgcccccccagccgggaggccgagagccactgccagagcccccaggagatgggcgccaaggccgccagcctggatggcccccatgaggacccccgctgcctgagccggcccttcagcctgctggccaccagggtgtctgctgacctggcccaggccgccaggaacagcagcaggcctgagcgggacatgcacagcctgcctgacatggaccccggcagcagcagcagcctggaccccagcctggccggctgtggaggagatggcagcagcggcagcggagatgcccacagctgggacaccctgctgaggaagtgggagcctgtgctgcgggactgcctgctgaggaacagacggcagatggaggtgatcagcctgcggctgaagctgcagaagctgcaggaggatgctgtggagaatgatgattatgacaaggccgagaccctgcagcagaggctggaggacctggagcaggagaagatcagcctgcacttccagctgcccagccggcagcctgccctgagcagcttcctgggccacctggccgcccaggtgcaggccgccctgcggcggggggccacccagcaggccagcggagatgacacccacacccccctgaggatggagccccggctgctggagcccacagcccaggacagcctgcacgtgtccatcacccggcgggactggctgctgcaggagaagcagcagctgcagaaggagattgaggccctgcaggccaggatgtttgtgctggaggccaaggaccagcagctgcggcgggagattgaggagcaggagcagcagctgcagtggcagggctgtgacctgacccccctggtgggccagctgagcctgggccagctgcaggaggtgtccaaggccctgcaggacaccctggccagcgctggccagatccccttccacgccgagcccccagagaccatccggcgggaggtgcgccaccagacagccccctgcaggaaccaccagctggagaagcctgtgatcaacatctgggccttccacctgcggaggaagatctgcctcttccaggctgatggcctgcagcacggcagcgctgaggtgaagcacctgaaggagacctctgtggagcctgctggcagcacagccagcaggaaggagtag

SEQ ID NO: 150224 - DNA, 2088 bp, synthetic construct
  misc_feature 1..2088: note = Description of Artificial Sequence: Synthetic coding sequence
  source 1..2088: mol_type = other DNA
atgcctgggggcggcccccagggcgccccagctgctgctgggggcggcggcgtgagccaccgggccggcagccgggactgcctgcccccagctgcctgcttcagaagaagaaggctggcccggcggcccggctacatgaggagcagcacaggccctggcatcggcttcctgagccctgctgtgggcaccctcttccgcttccctgggggcgtgtctggagaggagagccaccacagcgagagccgggcccggcagtgtggcctggacagccggggcctgctggtgcgcagccctgtgtccaagtctgctgctgcccccaccgtgacctctgtgcggggcaccagcgcccacttcggcatccagctgcggggcggcacccggctgcctgaccggctgtcctggccctgtggccctggcagcgctggctggcagcaggagtttgctgccatggacagcagcgagaccctggatgcctcctgggaggccgcctgcagtgatggagccaggagagtgcgggccgccggcagcctgcccagcgctgagctgagcagcaacagctgcagccctggctgcggccctgaggtgccccccaccccacctggcagccacagcgccttcaccagcagcttctccttcatccggctgagcctgggcagcgctggggagcggggggaggccgagggctgcccccccagccgggaggccgagagccactgccagagcccccaggagatgggcgccaaggccgccagcctggatggcccccatgaggacccccgctgcctgagccggcccttcagcctgctggccaccagggtgtctgctgacctggcccaggccgccaggaacagcagcaggcctgagcgggacatgcacagcctgcctgacatggaccccggcagcagcagcagcctggaccccagcctggccggctgtggaggagatggcagcagcggcagcggagatgcccacagctgggacaccctgctgaggaagtgggagcctgtgctgcgggactgcctgctgaggaacagacggcagatggaggtgatcagcctgcggctgaagctgcagaagctgcaggaggatgctgtggagaatgatgattatgacaaggccgagaccctgcagcagaggctggaggacctggagcaggagaagatcagcctgcacttccagctgcccagccggcagcctgccctgagcagcttcctgggccacctggccgcccaggtgcaggccgccctgcggcggggggccacccagcaggccagcggagatgacacccacacccccctgaggatggagccccggctgctggagcccacagcccaggacagcctgcacgtgtccatcacccggcgggactggctgctgcaggagaagcagcagctgcagaaggagattgaggccctgcaggccaggatgtttgtgctggaggccaaggaccagcagctgcggcgggagattgaggagcaggagcagcagctgcagtggcagggctgtgacctgacccccctggtgggccagctgagcctgggccagctgcaggaggtgtccaaggccctgcaggacaccctggccagcgctggccagatccccttccacgccgagcccccagagaccatccgcagcctgcaggagcgcatcaagagcctgaacctgagcctgaaggagatcaccaccaaggtgtgcatgtctgagaagttctgcagcaccctgaggaagaaggtgaatgacatcgagacccagctgcctgccctgctggaggccaagatgcacgccatcagcggcaaccacttctggacagccaaggacctgacagaggagatccgcagcctgaccagcgagcgggagggcctggagggcctgctgagcaagctgctggtgctgagcagcagaaatgtgaagaagctgggctctgtgaaggaggactacaaccggctgcggcgggaggtggagcaccaggagacagcctatgctgcctctgtgcactgcctgggcaaatgtgggaagctgacctggaagctggtggactgcctgagccgggcctacagcagcaggaagccaggagaggcctgcctgtag

SEQ ID NO: 150225 - DNA, 1680 bp, synthetic construct
  misc_feature 1..1680: note = Description of Artificial Sequence: Synthetic coding sequence
  source 1..1680: mol_type = other DNA
atgcctgggggcggcccccagggcgccccagctgctgctgggggcggcggcgtgagccaccgggccggcagccgggactgcctgcccccagctgcctgcttcagaagaagaaggctggcccggcggcccggctacatgaggagcagcacaggccctggcatcggcttcctgagccctgctgtgggcaccctcttccgcttccctgggggcgtgtctggagaggagagccaccacagcgagagccgggcccggcagtgtggcctggacagccggggcctgctggtgcgcagccctgtgtccaagtctgctgctgcccccaccgtgacctctgtgcggggcaccagcgcccacttcggcatccagctgcggggcggcacccggctgcctgaccggctgtcctggccctgtggccctggcagcgctggctggcagcaggagtttgctgccatggacagcagcgagaccctggatgcctcctgggaggccgcctgcagtgatggagccaggagagtgcgggccgccggcagcctgcccagcgctgagctgagcagcaacagctgcagccctggctgcggccctgaggtgccccccaccccacctggcagccacagcgccttcaccagcagcttctccttcatccggctgagcctgggcagcgctggggagcggggggaggccgagggctgcccccccagccgggaggccgagagccactgccagagcccccaggagatgggcgccaaggccgccagcctggatggcccccatgaggacccccgctgcctgagccggcccttcagcctgctggccaccagggtgtctgctgacctggcccaggccgccaggaacagcagcaggcctgagcgggacatgcacagcctgcctgacatggaccccggcagcagcagcagcctggaccccagcctggccggctgtggaggagatggcagcagcggcagcggagatgcccacagctgggacaccctgctgaggaagtgggagcctgtgctgcgggactgcctgctgaggaacagacggcagatggaggtgatcagcctgcggctgaagctgcagaagctgcaggaggatgctgtggagaatgatgattatgacaaggccgagaccctgcagcagaggctggaggacctggagcaggagaagatcagcctgcacttccagctgcccagccggcagcctgccctgagcagcttcctgggccacctggccgcccaggtgcaggccgccctgcggcggggggccacccagcaggccagcggagatgacacccacacccccctgaggatggagccccggctgctggagcccacagcccaggacagcctgcacgtgtccatcacccggcgggactggctgctgcaggagaagcagcagctgcagaaggagattgaggccctgcaggccaggatgtttgtgctggaggccaaggaccagcagctgcggcgggagattgaggagcaggagcagcagctgcagtggcagggctgtgacctgacccccctggtgggccagctgagcctgggccagctgcaggaggtgtccaaggccctgcaggacaccctggccagcgctggccagatccccttccacgccgagcccccagagaccatcagaagaaataaatgtgagggcaagtactatgaggtgcacggcaacacctag

SEQ ID NO: 150226 - DNA, 1740 bp, synthetic construct
  misc_feature 1..1740: note = Description of Artificial Sequence: Synthetic coding sequence
  source 1..1740: mol_type = other DNA
atgcctgggggcggcccccagggcgccccagctgctgctgggggcggcggcgtgagccaccgggccggcagccgggactgcctgcccccagctgcctgcttcagaagaagaaggctggcccggcggcccggctacatgaggagcagcacaggccctggcatcggcttcctgagccctgctgtgggcaccctcttccgcttccctgggggcgtgtctggagaggagagccaccacagcgagagccgggcccggcagtgtggcctggacagccggggcctgctggtgcgcagccctgtgtccaagtctgctgctgcccccaccgtgacctctgtgcggggcaccagcgcccacttcggcatccagctgcggggcggcacccggctgcctgaccggctgtcctggccctgtggccctggcagcgctggctggcagcaggagtttgctgccatggacagcagcgagaccctggatgcctcctgggaggccgcctgcagtgatggagccaggagagtgcgggccgccggcagcctgcccagcgctgagctgagcagcaacagctgcagccctggctgcggccctgaggtgccccccaccccacctggcagccacagcgccttcaccagcagcttctccttcatccggctgagcctgggcagcgctggggagcggggggaggccgagggctgcccccccagccgggaggccgagagccactgccagagcccccaggagatgggcgccaaggccgccagcctggatggcccccatgaggacccccgctgcctgagccggcccttcagcctgctggccaccagggtgtctgctgacctggcccaggccgccaggaacagcagcaggcctgagcgggacatgcacagcctgcctgacatggaccccggcagcagcagcagcctggaccccagcctggccggctgtggaggagatggcagcagcggcagcggagatgcccacagctgggacaccctgctgaggaagtgggagcctgtgctgcgggactgcctgctgaggaacagacggcagatggaggtgatcagcctgcggctgaagctgcagaagctgcaggaggatgctgtggagaatgatgattatgacaaggccgagaccctgcagcagaggctggaggacctggagcaggagaagatcagcctgcacttccagctgcccagccggcagcctgccctgagcagcttcctgggccacctggccgcccaggtgcaggccgccctgcggcggggggccacccagcaggccagcggagatgacacccacacccccctgaggatggagccccggctgctggagcccacagcccaggacagcctgcacgtgtccatcacccggcgggactggctgctgcaggagaagcagcagctgcagaaggagattgaggccctgcaggccaggatgtttgtgctggaggccaaggaccagcagctgcggcgggagattgaggagcaggagcagcagctgcagtggcagggctgtgacctgacccccctggtgggccagctgagcctgggccagctgcaggaggtgtccaaggccctgcaggacaccctggccagcgctggccagatccccttccacgccgagcccccagagaccatccgcagcctgcaggagcgcatcaagagcctgaacctgagcctgaaggagatcaccaccaaggagaccatcagcggccgcctgaagaccagcccccggcggctggaccactag

SEQ ID NO: 150227 - DNA, 390 bp, synthetic construct
  misc_feature 1..390: note = Description of Artificial Sequence: Synthetic coding sequence
  source 1..390: mol_type = other DNA
atgaccatgaccaccatgcctgagagcctgaacagccctgtgtctgggaaggctgtgttcatggagtttggaccacccaaccagcagatgagccccagccccatgagccacggccactacagcatgcactgcctgcacagcgctggccacagccagccagatggagcctacagcagcgccagcagcttcagccggcccctgggctacccctacgtgaacagcgtgagcagccacgccagcagcccctacatcagctctgtgcagagctacccaggcagcgccagcctggcccagagccggctggaggaccccggccaggacctggtgcccaagcaggccatccaggtgcaggaggctgatgaggccggctggggcggcagcggcggctag

SEQ ID NO: 150228 - DNA, 516 bp, synthetic construct
  misc_feature 1..516: note = Description of Artificial Sequence: Synthetic coding sequence
  source 1..516: mol_type = other DNA
atgaccatgaccaccatgcctgagagcctgaacagccctgtgtctgggaaggctgtgttcatggagtttggaccacccaaccagcagatgagccccagccccatgagccacggccactacagcatgcactgcctgcacagcgctggccacagccagccagatggagcctacagcagcgccagcagcttcagccggcccctgggctacccctacgtgaacagcgtgagcagccacgccagcagcccctacatcagctctgtgcagagctacccaggcagcgccagcctggcccagagccggctggaggaccccggggctgacagcgagaagagcacagtggtggagggcggggaggtgcgcttcaacgggaagggcaagaagatcaggaagcccaggaccatctacagcagcctgcagctgcaggccctgaacagacgcttccagcagacccagtacctggccctgcctgagagagctgagctggccgccagcctgggcctgacccagacccagtag

SEQ ID NO: 150229 - DNA, 768 bp, synthetic construct
  misc_feature 1..768: note = Description of Artificial Sequence: Synthetic coding sequence
  source 1..768: mol_type = other DNA
atgaccatgaccaccatgcctgagagcctgaacagccctgtgtctgggaaggctgtgttcatggagtttggaccacccaaccagcagatgagccccagccccatgagccacggccactacagcatgcactgcctgcacagcgctggccacagccagccagatggagcctacagcagcgccagcagcttcagccggcccctgggctacccctacgtgaacagcgtgagcagccacgccagcagcccctacatcagctctgtgcagagctacccaggcagcgccagcctggcccagagccggctggaggaccccggggctgacagcgagaagagcacagtggtggagggcggggaggtgcgcttcaacgggaagggcaagaagatcaggaagcccaggaccatctacagcagcctgcagctgcaggccctgaacagacgcttccagcagacccagtacctggccctgcctgagagagctgagctggccgccagcctgggcctgacccagacccaggtgaagatctggttccagaacaagaggagcaagttcaagaagctgatgaagcagggcggggccgccctggagggcagcgccctggccaacggccgggccctgtctgctggcagcccccctgtgcccccaggctggaaccccaacagcagcagcggcaagggcagcggcggcaatgccggcagctacatccccagctacacctcctggtaccccagcgcccaccaggaggccatgcagcagccccagctgatgtag

SEQ ID NO: 150230 - DNA, 564 bp, synthetic construct
  misc_feature 1..564: note = Description of Artificial Sequence: Synthetic coding sequence
  source 1..564: mol_type = other DNA
atgaccatgaccaccatgcctgagagcctgaacagccctgtgtctgggaaggctgtgttcatggagtttggaccacccaaccagcagatgagccccagccccatgagccacggccactacagcatgcactgcctgcacagcgctggccacagccagccagatggagcctacagcagcgccagcagcttcagccggcccctgggctacccctacgtgaacagcgtgagcagccacgccagcagcccctacatcagctctgtgcagagctacccaggcagcgccagcctggcccagagccggctggaggaccccggggctgacagcgagaagagcacagtggtggagggcggggaggtgcgcttcaacgggaagggcaagaagatcaggaagcccaggaccatctacagcagcctgcagctgcaggccctgaacagacgcttccagcagacccagtacctggccctgcctgagagagctgagctggccgccagcctgggcctgacccagacccaggtgaagatctggttccagaacaagaggagcaagttcaagaagctgatgtag

SEQ ID NO: 150231 - DNA, 1722 bp, synthetic construct
  misc_feature 1..1722: note = Description of Artificial Sequence: Synthetic coding sequence
  source 1..1722: mol_type = other DNA
atgggcaagtgcctgagctgctgcaaggaggaccagagcttccagcgctgcagccctgaggaccaggtgtccacagatgcccagcacagaggagccagcagcatcagccagcccagcatcagcctgggccacaagaccagctacagccctgtgacccacaaggtgaatgctgccaaggccagccggcggctgctgtctgtgagcagccccagcttcagcgagcggcgctacagcctgtttgtgggcttccagaagagaaatgccagcccctactggcagcagagccgggccaactttgattctgaggaggacaccggcttcacagacatcaagagcagcagtgaccactgcggcagcttcatcagcagaagaagacgcttcagcagcaggaagctgagcatcgtgtcctactacaagagcgccatcttctttgacccccaggccagcggccagaatgtgttcaacctgaatgaaattgagatcttcagcaagaccagcagcaacacagatgccaagaagcacatcaccatcagcgcccctgagtacaacaccaagaacttcaagaactttgagaccaacaccaccagccctgcctttggaaacaccatcgacacagccagctaccagcagagcaccagcagcttcttcagcctggccagtgacatcagcagcccagaccagcagaatggaattgccaatgacatccagcagaggggccagctgtgcaaggacctgaaggacttcctgcaccccaggcctgagagctacagcacaggccacagccccatcatgatcccccagcaccccagccagagcggcaccttccccttcctgcacaaggccggcttcagcagcagctacaagaacagcggctgcttcatccccccccagagcgagctgaccagcggcctgtttgaagatgaggactttgctgtgctcttccaggatgaagatagaagcagccccatcgagatccccaagatccgctacatcacagccaacacagacacagaggagcagagcttccctgtgcccaaggccttcaacaccagggtggaggagctgaacctggatgtgctgctgcagaaggtggaccacctgaggatgtctgagagcggcaagtctgagagctttgagctgctgcgggaccacaaggagaagttcagagatgaaattgagttcatgtggaggtttgcccgggcctacggggacatgtatgagctgagcaccaacacccaggagaagaagcactacgccaacatcggcaagaccctgtctgagcgggccatcaacagagcccccatgaatggccactgccacctgtggtatgctgtgctgtgtggctacgtgtctgaatttgagggcctgcagaacaagatcaactacggccacctgttcaaggagcacctggacatcgccatcaagctgctgcctgaggagcccttcctgtactacctgaagggccgctactgctacacagtgtccaagctgtcctggattgagaagaagatggccgccaccctgtttgggaagatccccagcagcacagtgcaggaggccctgcacaacttcctgaaggccgaggagctgtgccccggctacagcaaccccaactacatgtacctggccaagtgctacacagacctggaggagaaccagaatgccctgaagttctgcaacctggccctgctgctgcccaccgtgaccaaggaggagctgtag

SEQ ID NO: 150232 - DNA, 654 bp, synthetic construct
  misc_feature 1..654: note = Description of Artificial Sequence: Synthetic coding sequence
  source 1..654: mol_type = other DNA
atgactggagtgtttgacagcctggtggccgacatgcacagcacccagattgctgccagcagcacctaccaccagcaccagcagcccccatctgggggcggggccggccctgggggcaacagcagcagcagcagcagcctgcacaagccccaggagagccccaccctgcctgtgtccacagccacagacagcagctactacaccaaccagcagcaccctgctgggggcggcggcggcggcggcagcccctatgcccacatgggcagctaccagtaccaggccagcggcctgaacaacgtgccctacagcgccaagagcagctatgacctgggctacacagctgcctacaccagctatgccccctacggcaccagcagcagccctgccaacaatgaacctgagaaggaggacctggagcctgagatccgcatcgtgaatggcaagcccaagaaggtgaggaagcccaggaccatctacagcagcttccagctggccgccctgcagaggcgcttccagaagacccagtacctggccctgcctgagagagctgagctggccgccagcctgggcctgacccagacccaggtgggcctggccccctgccgcggggaggagagcgctggcctgcgctggctgggcagcagaagagtgtag

SEQ ID NO: 150233 - DNA, 864 bp, synthetic construct
  misc_feature 1..864: note = Description of Artificial Sequence: Synthetic coding sequence
  source 1..864: mol_type = other DNA
atgagcggcagctttgacaggaagctgagcagcatcctgacagacatcagcagcagcctgagctgccacgccggcagcaaggacagccccaccctgcctgagagctctgtgacagacctgggctactacagcgccccccagcacgactactacagcggccagccctacggccagacagtgaacccctacacctaccaccaccagttcaacctgaatggcctggccggcactggagcctacagccccaagtctgagtacacctacggggccagctaccggcagtatggagcctaccgggagcagcccctgcctgcccaggaccctgtgtctgtgaaggaggagcctgaggccgaggtgaggatggtgaatggcaagcccaagaaggtgaggaagcccaggaccatctacagcagctaccagctggccgccctgcagaggcgcttccagaaggcccagtacctggccctgcctgagcgggcagagctggccgcccagctgggcctgacccagacccaggtgaagatctggttccagaacagaagaagcaagttcaagaagctgtacaagaatggagaggtgcccctggagcacagccccaacaacagcgacagcatggcctgcaacagcccccccagccctgccctgtgggacaccagcagccacagcaccccagccccagcccggagccagctgcccccacccctgccctacagcgccagccccagctacctggatgaccccaccaacagctggtaccacgcccagaacctgagcggcccccacctgcagcagcagcccccccagcctgccaccctgcaccacgccagccctggccccccacccaaccctggagctgtgtactag

SEQ ID NO: 150234 - DNA, 723 bp, synthetic construct
  misc_feature 1..723: note = Description of Artificial Sequence: Synthetic coding sequence
  source 1..723: mol_type = other DNA
atgaccagcctgccctgccccctgcccggcagagatgccagcaaggctgtgtttcctgacctggcccctgtgcccagcgtggccgccgcctaccccctgggcctgagccccaccacagctgccagccccaacctgagctacagccggccctacggccacctgctgagctacccctacacagagcccgccaaccctggggacagctacctgagctgccagcagcctgctgccctgagccagcccctgtgtggccctgctgagcacccccaggagctggaggccgacagcgagaagccccggctgagccctgagcccagcgagcggcggccccaggccccagccaagaagctgaggaagcccaggaccatctacagcagcctgcagctgcagcacctgaaccagcgcttccagcacacccagtacctggccctgcctgagcgggcccagctggccgcccagctgggcctgacccagacccaggtgaagatctggttccagaacaagaggagcaagtacaagaagctgctgaagcagaacagcggcggccaggagggggacttccctggccgcaccttctctgtgagcccctgcagcccccccctgcccagcctgtgggacctgcccaaggccggcaccctgcccaccagcggctacggcaacagctttggagcctggtaccagcaccacagcagtgatgtgctggccagcccccagatgatgtag

SEQ ID NO: 150235 - DNA, 507 bp, synthetic construct
  misc_feature 1..507: note = Description of Artificial Sequence: Synthetic coding sequence
  source 1..507: mol_type = other DNA
atgaagctgtctgtgctgcccccaagaagcctgctggccccctacacagtgctgtgctgccccccagacagcgagaagccccggctgagccctgagcccagcgagcggcggccccaggccccagccaagaagctgaggaagcccaggaccatctacagcagcctgcagctgcagcacctgaaccagcgcttccagcacacccagtacctggccctgcctgagcgggcccagctggccgcccagctgggcctgacccagacccaggtgaagatctggttccagaacaagaggagcaagtacaagaagctgctgaagcagaacagcggcggccaggagggggacttccctggccgcaccttctctgtgagcccctgcagcccccccctgcccagcctgtgggacctgcccaaggccggcaccctgcccaccagcggctacggcaacagctttggagcctggtaccagcaccacagcagtgatgtgctggccagcccccagatgatgtag

SEQ ID NO: 150236 - DNA, 1473 bp, synthetic construct
  misc_feature 1..1473: note = Description of Artificial Sequence: Synthetic coding sequence
  source 1..1473: mol_type = other DNA
atggaccacacagacaatgagctgcagggcaccaacagcagcggcagcctgggcggcctggatgtgagaagacgcatccccatcaagctgatcagcaagcaggccaacaaggccaagccagcccccaggacccagaggaccatcaacaggatgcctgccaaggcccctcctggagatgagggctttgactacaatgaggaggagagatatgactgcaagggcggggagctgtttgccaaccagaggcgcttccctggccacctgttctgggacttccagatcaacatcctgggggagaaggatgacacccctgtgcacttctgtgacaagtgtggcctgcccatcaagatctacggccgcatgatcccctgcaagcacgtgttctgctatgactgtgccatcctgcacgagaagaagggggacaagatgtgccccggctgcagcgaccctgtgcagagaattgagcagtgcacccggggcagcctcttcatgtgcagcatcgtgcagggctgcaagaggacctacctgagccagagggacctgcaggcccacatcaaccaccgccacatgagagctgggaagcctgtgacccgggccagcctggagaatgtgcacccccccatcgcccccccacccacagagatccctgagcgcttcatcatgcccccagacaagcaccacatgagccacatcccccccaagcagcacatcatgatgcctcctccacccctgcagcacgtgccccatgagcactacaaccagccccatgaggacatccgggcccccccagctgagctgtccatggcccctcctccacccaggtctgtgtcccaggagaccttccgcatcagcaccaggaagcacagcaacctgatcaccgtgcccatccaggatgacagcaacagcggggcccgggagcccccacctccagccccagccccagcccaccaccaccctgagtaccagggccagcctgtggtgagccacccccaccacatcatgccaccccagcagcactacgcccctcctcctcctcctcctccacccatcagccaccccatgccccaccccccccaggccgccggcaccccccacctggtgtacagccaggcccctcctccacccatgaccagcgcccccccacccatcaccccacctcctggccacatcatcgcccagatgccaccctacatgaaccaccccccacctggccccccaccaccccagcacggcggcccccctgtgacagcccccccaccccaccactacaaccccaacagcctgccccagttcacagaggaccagggcaccctgagcccccccttcacccagcccggcggcatgagccctggcatctggccagccccccggggccccccacctccaccccggctgcagggcccccccagccagacccccctgcccggcccccaccacccagaccagacccgctaccggccctactaccagtag

SEQ ID NO: 150237 - DNA, 798 bp, synthetic construct
  misc_feature 1..798: note = Description of Artificial Sequence: Synthetic coding sequence
  source 1..798: mol_type = other DNA
atgatgaccatgaccaccatggctgatggcctggagggccaggacagcagcaagagcgccttcatggagtttggccagcagcagcagcagcagcacagccctgccatggccggggcccactaccccctgcactgcctgcacagcgctgctgctgctgctgctgctggcagccaccaccaccaccaccaccagcaccaccaccacggcagcccctatgccagcggcggcggcaacagctacaaccacaggagcctggccgcctacccctacatgagccacagccagcacagcccctacctgcagagctaccacaacagcagcgctgctgcccagaccagaggagatgacacagaccagcagaagaccaccgtgattgaaaatggagagatccgcttcaacgggaagggcaagaagatcaggaagcccaggaccatctacagcagcctgcagctgcaggccctgaaccaccgcttccagcagacccagtacctggccctgcctgagcgggcagagctggccgccagcctgggcctgacccagacccaggtgaagatctggttccagaacaagaggagcaagttcaagaagctgctgaagcagggcagcaacccccatgaaagtgaccccctgcagggcagcgctgccctgagccccaggagccctgccctgccccctgtgtgggatgtgtctgccagcgccaagggcgtgtccatgccacccaacagctacatgcctggctacagccactggtacagcagcccccaccaggacaccatgcagaggccccagatgatgtag

SEQ ID NO: 150238 - DNA, 882 bp, synthetic construct
  misc_feature 1..882: note = Description of Artificial Sequence: Synthetic coding sequence
  source 1..882: mol_type = other DNA
atgatgaccatgaccaccatggctgatggcctggagggccaggacagcagcaagagcgccttcatggagtttggccagcagcagcagcagcagcagcagcagcagcagcagcagcagcagcagcagcagcagcccccacctcctcctcctcctccaccccagccccacagccagcagagcagccctgccatggccggggcccactaccccctgcactgcctgcacagcgctgctgctgctgctgctgctggcagccaccaccaccaccaccaccagcaccaccaccacggcagcccctatgccagcggcggcggcaacagctacaaccacaggagcctggccgcctacccctacatgagccacagccagcacagcccctacctgcagagctaccacaacagcagcgctgctgcccagaccagaggagatgacacagaccagcagaagaccaccgtgattgaaaatggagagatccgcttcaacgggaagggcaagaagatcaggaagcccaggaccatctacagcagcctgcagctgcaggccctgaaccaccgcttccagcagacccagtacctggccctgcctgagcgggcagagctggccgccagcctgggcctgacccagacccaggtgaagatctggttccagaacaagaggagcaagttcaagaagctgctgaagcagggcagcaacccccatgaaagtgaccccctgcagggcagcgctgccctgagccccaggagccctgccctgccccctgtgtgggatgtgtctgccagcgccaagggcgtgtccatgccacccaacagctacatgcctggctacagccactggtacagcagcccccaccaggacaccatgcagaggccccagatgatgtag

SEQ ID NO: 150239 - DNA, 9084 bp, synthetic construct
  misc_feature 1..9084: note = Description of Artificial Sequence: Synthetic coding sequence
  source 1..9084: mol_type = other DNA
atgaacctgcaccaggtgctgaccggggctgtgaaccctggggaccactgcttctctgtgggcagcattggagaccagcgcttcaccgcctatgccagcggctgtgacatcgtcatcctgggcagtgactttgagcggctgcagatcatccctggggccaagcacggcaacatccaggtgggctgtgtggactgcagcatgcagcagggcaagattgctgccagctatggaaatgtcatcagcatctttgagcctgtgaacctgcccaagcagaagaagaacctggagctgtacagccagtggcagaagagcggccagttcttcctggagagcatcgcccacaacatcacctgggaccccaccggcagccggctgctgaccggcagcagctacctgcagctgtggagcaacaccaacctggagaagcccacagaagatgagaacctgaacaagacagacctgaactttggagactggaagtgcatctggcactgcaagacagccagccaggtgcacctgatgaagttctccccagatggagagttctttgccacagctgggaaggatgactgcctgctgaaggtgtggtacaacgtggagaactggaggacagctgtgaccagcccagatggcagcagcgagaagcagagccagggcgagattgacttctcctttgtgtacctggcccaccccagggctgtgaatggcttctcctggaggaagaccagcaagtacatgccccgggcctctgtgtgcaatgtgctgctgacctgctgcaaggacaacgtgtgccgcctgtgggtggagaccttcctgcccaatgactgcctgctgtatggaggagactgcagccactggacagagagcatcaacctgaccaacaacttcaagagaaatgccagcagcaaggagcgggtgcagaatgccctggaggtgaacctgcggcacttccggcggggcagaagaagaagcctggccctggtggcccacacaggctacctgccccaccagcaggacccccaccacgtgcacaggaacacccccctgcacgccaatgccctgtgccacttccacatcgccgccagcatcaacccagccacagacatccccctgctgcccagcatcaccagcctgagcctgaatgaaaatgaggagaagacaggcccctttgtggtgcactggctgaacaacaaggagctgcacttcaccctgtccatggaggtgttcctgcagcagctgaggaagagctttgagcagcccagcagcgaggcctctgtggaggacagcaaccaggctgatgtgaagagtgatgaggagacagatgatggagtggatgacctgaagatcaaccctgagaagaaggagctgggctgtgacaagatggtgcccaacagcagcttcaccagcctgagcagcgctgccatcgaccaccagatcgaggtgctgctgtctgagtggagcaagaatgctgacatgctgttcagcatccaccccatggatggcagcctgctggtgtggcacgtggactggctggatgagtaccagcccggcatgttccggcaggtgcaggtgtcctttgtgagccgcatccctgtggccttccccactggagatgccaacagcctgtgcaagagcatcatgatgtatgcctgcaccaagaatgtggacctggccatccagcagggcaagcagaagcccagcggcctgaccaggagcacctccatgctgatcagcagcggccacaacaagagcagcaacagcctgaagctgagcatcttcacccccaacgtgatgatgatcagcaagcatgctgatggcagcctgaaccagtggctggtgtcctttgctgaggagagcgccttcagcacagtgctgagcatcagccacaagagccgctactgcggccaccgcttccacctgaatgacctggcctgccacagcgtgctgcccctgctgctgaccaccagccaccacaatgccctgcggaccccagatgtggacaaccctgagcagccctttgatgccctgaacatcgaggagtgcagcctgacccagcagaacaagagcacagtggatgtggccttccaggaccccagcgctgtgtacagcgagctgatcctgtggagggtggaccctgtgggccccctgtccttctctggaggagtgtctgagctggcccgcatcaacagcctgcacgtgtctgccttcagcaatgtggcctggctgcccaccctcatccccagctactgcctgggcgcctactgcaacagccccagcgcctgctttgtggccagtgatggccagtacctgcggctgtatgaagctgtgattgatgccaagaagctgctgtctgagctgagcaaccctgagatcagcaaatatgtgggggaggtgttcaacatcgtgtcccagcagagcacagcccggcccggctgcatcatcgccctggaccccatcaccaagctgcacggcaggaagacccagctgctgcacgtgtttgaggaggacttcatcctgaacaacctggagaagaagagcctgggcaaggacagcatcctgagcaatgccggcagcagccccaacggcttcagcgagaagttctacctgattgtgattgaatgtacccaggacaacagaagcctgctgcacatgtggaacctgcacctgaagagcatccctgtgtccctggatgagaaggtggacaccaagctgtctgaggccgtgtggcagcctgaggagcactacagcagcagccctgagaagatcctgagccccttcagccagaagtaccaggcctgccgggccaacctgcagagcaccagccggctgaccctcttcagcgagatggtgtacagccaggagctgcacctgcctgagggcgtggagatcatcagcatcaagcccagcgctggccacctgagcagcagcagcatctacccagcctgcagcgccccctacctgctggccaccagctgcagtgatgagaaggtgcgcttctggcgctgccgggtgacagatggagagagcgccaccagcaagaatggcaagattgacctggcctacatctgggaggagtggcccctgctgattgaagatggcctgcagagcaacagcagcatcaccgtgcccggccggcctgtggaggtgtcctgtgcccacaccaaccggctggccgtggcctacaagcagcctgccagcaacagccgcagcagccaggactttgtgatgcacgtgtccatctttgaatgtgagagcactggaggcagctgctgggtgctggagcagaccatccacctggatgagctgagcacagtgctggacagcggcatctctgtggacagcaacctggtggcctacaacaagcaggacatgtacctgagcagcaaggagaacatcaccagcaacaccaagcacctggtgcacctggactggatgagccgggaggatggcagccacatcctgactgtgggcatcggcagcaagctgttcatgtatggccccctggccggcaaggtgcaggaccagacaggcaaggagaccctggccttccccctgtgggagagcaccaaggtggtgcccctgagcaagtttgtgctgctgcggtctgtggacctggtgtcctctgtggatggcagcccccccttccctgtgtccctgtcctgggtgagagatggcatcctggtggtgggcatggactgtgagatgcacgtgtactgccagtggcagcccagcagcaagcaggagcctgtgatcacagacagctacagcggcagcacccccagcatcaccagcctcatcaagcagagcaacagcagcagcggcctgcacccccccaagaagaccctgaccaggtccatgaccagcctggcccagaagatctgtgggaagaagacagcctttgaccccagcgtggacatggaggacagcggcctgtttgaggccgcccacgtgctgagccccaccctgccccagtaccaccccctgcagctgctggagctgatggacctgggcaaggtgcggcgggccaaggccatcctgagccacctggtgaagtgcatcgccggggaggtggtggccctgaatgaagctgagagcaaccatgaaagaaggctgcggagcctgaccatcagcgccagcggcagcaccacccgggacccccaggccttcaacaaggcagaaaatacagactacacagaaattgacagcgtgccccccctgcccctgtatgccctgctggccgcagatgatgacagctgctacagcagcctggagaagagcagcaatgaaagcaccctgagcaagagcaaccagctgagcaaggagagctatgatgagctgttccagacccagctgctgatgacagacacccacatgctggagacagatgaggagaacaccaagccccgggtgattgacctgagccagtacagccccacctactttggacctgagcacgcccaggtgctgagcggccacctgctgcacagcagcctgcccggcctgagcaggatggagcagatgagcctgatggccctggccgacaccatcgccaccaccagcacagacattggagagagccgggacaggagccagggcggggagaccctggatgaatgtggcctgaagttcctgctggccgtgcggctgcacaccttcctgaccaccagcctgcctgcctaccgggcccagctgctgcaccagggcctgagcaccagccactttgcctgggccttccacagcgtggccgaggaggagctgctgaacatgctgcctgccatgcagaaggatgaccccacctggagcgagctgcgggccatgggcgtgggctggtgggtgaggaacacccgcatcctgaggaagtgcatcgagaaggtggccaaggccgccttctacaggaagaatgaccccctggatgctgccatcttctacctggccatgaagaagaaggccgtcatctggggcctgtacagagctgagaagaacaccaggatgacccagttcttcggccacaactttgaagatgagcgctggaggaaggccgccctgaagaatgccttcagcctgctgggcaagcagagatttgagcacagcgctgccttcttcctgctggccggctgcctgagagatgccatcgaggtgtgcctggagaagctgaatgacatccagctggccctggtgattgcccggctgtatgaaagtgaatttgacaccagcgctgcctacaagagcatcctgaggaagaaggtgctgggcatcgacagccctgtgtctgagctgtgcagcctgaacatcaacatgcaccacgaccccttcctgcgctccatggcctactggatcctggaggactacagcggggccctggagaccctcatcaagcagcccatcagagaaaatgatgaccaggtgctgagcgccagcaaccccaccgtcttcaacttctacaactacctgcggacccaccccctgctgctgcggcggcacttcggcagcagtgacaccttcagcacccacatgagcctgaccgggaagagcggcctggccggcaccatcaacctgtctgaaagaagactcttcttcaccacagccagcgcccacctgaaggccggctgccccatgctggccctggaggtgctgagcaagatgcccaaggtgatcaagaagacccggcccttctaccgggccagcagcttcctggacaccagcaaggactgcagccccagcagccccctgaagctggatgcccgggaggacaagagcagcgctgtggactggagccagagcctcatcaatggcttcggcagcagcagcgagggcagcagcgagaagcagagcaacagcaccctgagctttgactggagccagcccagcgtggtgttccaggatgacagcctggagctgaagtgggacagcgacaatgatgaagaaaatgaagatgtgcccatctccatgaaggagctgaagcccctgcagaggaagacagacaagaagctggatgacatcagcagcaactacacagagagcttcagcaccctggatgaaaatgacctgctgaaccccagcgaggacatcatcgctgtgcagctgaagttccgggcctgcctgaagatcctgactgtggagctgcggaccctgagcacaggctatgaaattgatggcggcaagctgcgctaccagctgtaccactggctggagaaggaggtgattgccctgcagaggacctgtgacttctgcagtgatgctgaggagctgcagagcgcctttggaagaaatgaagatgaatttggcctgaatgaagatgctgaggacctgccccaccagaccaaggtgaagcagctgcgggagaacttccaggagaagaggcagtggctgctgaagtaccagagcctgctgaggatgttcctgagctactgcatcctgcacggcagccatggaggcggcctggcctctgtgaggatggagctgatcctgctgctgcaggagagccagcaggagaccagcgagcccctcttcagcagccccctgtctgagcagacctctgtgcccctgctgtttgcctgcacagccaatgccaagacagtggtggccaaccccctgctgcacctgagcaacctgacccatgacatcctgcacgccatcatcaactttgacagccccccccacccagacatccagagcaacaaggtgtatgtgatgcacaccctggccgccagcctgagcgcctgcatctaccagtgcctgtgtggcagccacaactacagcagcttccagaccaaccagttcaccggcatggtgtaccagacagtgctgctgccccaccggcccagcctgaagacaggcagcctggatgaggccctgacccccaacaccagccctgcccagtggccaggcatcacctgcctgatccggctgctgaacagcagtggagaggaggcccagagcggcctgactgtgctgctgtgtgagatcctgacagctgtgtacctgagcctcttcatccacggcctggccacccacagcagcaatgaactcttccgcatcgtggcccaccccctgaatgagaagatgtggagcgctgtgtttggaggaggagcccacgtgcccagcaaggagcagacccacagcaagaccctgcctgtgagcagcctggtggaggagggggagaagcagaacaagcgcttccggcccagcaagatgagctgccgggagagcgcccccctgacccccagcagcgcccctgtgtcccaggagagcctggccgtgaaggagaagttcatccccccagagctgagcatctgggactacttcatcgccaagcccttcctgcccagcagccagagcagagcagaatatgacagcgaggagagcctgggcagtgatgatgatgacaatgatgatgatgatgatgtgctggccagtgacttccacctgcaggagcacagcaacagcaacagctacagctggagcctgatgaggctggccatggtgcagctggtgctgaacaacctgaagaccttctacccctttgctggccatgacctggccgagctgcctgtgagcagccccctgtgccacgctgtgctgaagaccctgcagtgctgggagcaggtgctgctgcggcggctggagatccacggcggccccccccagaactacatcgccagccacacagctgaggagagcctgtctgctggccctgccatcctgcggcacaaggccctgctggagcccaccaacacccccttcaagagcaagcaccacctggccctgtctgtgaagaggctgtggcagtacctggtgaagcaggaggagatccaggagaccttcatcaagaacatcttcaccaagaagcgctgcctgaatgaaattgaggccgacctgggctacccaggcggcaaggcccgcatcatccacaaggagagtgacatcatcacagcctttgctgtgaacaaggccaacagaaactgcatcgccatcgccagcagccatgatgtgcaggagctggatgtgtctggcatcctggccacccaggtgtacacctgggtggatgatgacatcgaggtggagaccaagggcagcgaggacttcctggtgattcatgccagagatgacctgacagctgtgcagggcaccaccccctacacccacagcaaccctggcacccccatcaacatgccctggctgggcagcacccagacaggccgcggggcctctgtgatgatcaagaaggccatcaacaacgtgcggaggatgaccagccaccccaccctgccctactacctgactggagcccaggacggctctgtgaggatgtttgagtggggccacagccagcagatcacctgcttccgcagcggcggcaacagccgggtgaccaggatgaggttcaactaccagggcaacaagtttggcatcgtggatgctgatggctacctgagcctgtaccagaccaactggaagtgctgccctgtgacaggctccatgcccaagccctacctgacctggcagtgccacaacaagacagccaatgactttgtgtttgtgagcagcagcagcctgattgccacagctggcctgagcacagacaacagaaatgtgtgcctgtgggacaccctggtggccccagccaacagcctggtgcacgccttcacctgccatgattctggggccaccgtgctggcctatgcccccaagcaccagctgctgatcagcggcggcaggaagggcttcacctacgtgtttgacctgtgccagaggcagcagaggcagctgttccagagccatgacagccctgtgaaggctgtggccgtggaccccacagaggagtactttgtgactggatctgctgagggcaacatcaagatctggagcctgagcaccttcggcctgctgcacacctttgtgtctgagcacgcccggcagagcatcttcagaaatattggaactggagtgatgcagatcgagaccggccctgccaaccacatcttcagctgtggggctgatggcaccatgaagatgaggatcctgcctgaccagttcagccccctgaatgaggtgctgaagaatgatgtgaagttcatgctgtag

SEQ ID NO: 150240 - DNA, 1770 bp, synthetic construct
  misc_feature 1..1770: note = Description of Artificial Sequence: Synthetic coding sequence
  source 1..1770: mol_type = other DNA
atgaacctgcaccaggtgctgaccggggctgtgaaccctggggaccactgcttctctgtgggcagcattggagaccagcgcttcaccgcctatgccagcggctgtgacatcgtcatcctgggcagtgactttgagcggctgcagatcatccctggggccaagcacggcaacatccaggtgggctgtgtggactgcagcatgcagcagggcaagattgctgccagctatggaaatgtcatcagcatctttgagcctgtgaacctgcccaagcagaagaagaacctggagctgtacagccagtggcagaagagcggccagttcttcctggagagcatcgcccacaacatcacctgggaccccaccggcagccggctgctgaccggcagcagctacctgcagctgtggagcaacaccaacctggagaagcccacagaagatgagaacctgaacaagacagacctgaactttggagactggaagtgcatctggcactgcaagacagccagccaggtgcacctgatgaagttctccccagatggagagttctttgccacagctgggaaggatgactgcctgctgaaggtgtggtacaacgtggagaactggaggacagctgtgaccagcccagatggcagcagcgagaagcagagccagggcgagattgacttctcctttgtgtacctggcccaccccagggctgtgaatggcttctcctggaggaagaccagcaagtacatgccccgggcctctgtgtgcaatgtgctgctgacctgctgcaaggacaacgtgtgccgcctgtgggtggagaccttcctgcccaatgactgcctgctgtatggaggagactgcagccactggacagagagcatcaacctgaccaacaacttcaagagaaatgccagcagcaaggagcgggtgcagaatgccctggaggtgaacctgcggcacttccggcggggcagaagaagaagcctggccctggtggcccacacaggctacctgccccaccagcaggacccccaccacgtgcacaggaacacccccctgcacgccaatgccctgtgccacttccacatcgccgccagcatcaacccagccacagacatccccctgctgcccagcatcaccagcctgagcctgaatgaaaatgaggagaagacaggcccctttgtggtgcactggctgaacaacaaggagctgcacttcaccctgtccatggaggtgttcctgcagcagctgaggaagagctttgagcagcccagcagcgaggcctctgtggaggacagcaaccaggctgatgtgaagagtgatgaggagacagatgatggagtggatgacctgaagatcaaccctgagaagaaggagctgggctgtgacaagatggtgcccaacagcagcttcaccagcctgagcagcgctgccatcgaccaccagatcgaggtgctgctgtctgagtggagcaagaatgctgacatgctgttcagcatccaccccatggatggcagcctgctggtgtggcacgtggactggctggatgagtaccagcccggcatgttccggcaggtgcaggtgtcctttgtgagccgcatccctgtggccttccccactggagatgccaacagcctgtgcaagagcatcatgatgtatgcctgcaccaagaatgtggacctggccatccagcagggcaagcagaagcccagcggcctgaccaggagcacctccatgctgatcagcagcggccacaacaagagcagcaacagcctgaagtag

SEQ ID NO: 150241 - DNA, 9147 bp, synthetic construct
  misc_feature 1..9147: note = Description of Artificial Sequence: Synthetic coding sequence
  source 1..9147: mol_type = other DNA
atgaacctgcaccaggtgctgaccggggctgtgaaccctggggaccactgcttctctgtgggcagcattggagaccagcgcttcaccgcctatgccagcggctgtgacatcgtcatcctgggcagtgactttgagcggctgcagatcatccctggggccaagcacggcaacatccaggtgggctgtgtggactgcagcatgcagcagggcaagattgctgccagctatggaaatgtcatcagcatctttgagcctgtgaacctgcccaagcagaagaagaacctggagctgtacagccagtggcagaagagcggccagttcttcctggagagcatcgcccacaacatcacctgggaccccaccggcagccggctgctgaccggcagcagctacctgcagctgtggagcaacaccaacctggagaagcccacagaagatgagaacctgaacaagacagacctgaactttggagactggaagtgcatctggcactgcaagacagccagccaggtgcacctgatgaagttctccccagatggagagttctttgccacagctgggaaggatgactgcctgctgaaggtgtggtacaacgtggagaactggaggacagctgtgaccagcccagatggcagcagcgagaagcagagccagggcgagattgacttctcctttgtgtacctggcccaccccagggctgtgaatggcttctcctggaggaagaccagcaagtacatgccccgggcctctgtgtgcaatgtgctgctgacctgctgcaaggacaacgtgtgccgcctgtgggtggagaccttcctgcccaatgactgcctgctgtatggaggagactgcagccactggacagagagcatcaacctgaccaacaacttcaagagaaatgccagcagcaaggagcgggtgcagaatgccctggaggtgaacctgcggcacttccggcggggcagaagaagaagcctggccctggtggcccacacaggctacctgccccaccagcaggacccccaccacgtgcacaggaacacccccctgcacgccaatgccctgtgccacttccacatcgccgccagcatcaacccagccacagacatccccctgctgcccagcatcaccagcctgagcctgaatgaaaatgaggagaagacaggcccctttgtggtgcactggctgaacaacaaggagctgcacttcaccctgtccatggaggtgttcctgcagcagctgaggaagagctttgagcagcccagcagcgaggcctctgtggaggacagcaaccaggctgatgtgaagagtgatgaggagacagatgatggagtggatgacctgaagatcaaccctgagaagaaggagctgggctgtgacaagatggtgcccaacagcagcttcaccagcctgagcagcgctgccatcgaccaccagatcgaggtgctgctgtctgagtggagcaagaatgctgacatgctgttcagcatccaccccatggatggcagcctgctggtgtggcacgtggactggctggatgagtaccagcccggcatgttccggcaggtgcaggtgtcctttgtgagccgcatccctgtggccttccccactggagatgccaacagcctgtgcaagagcatcatgatgtatgcctgcaccaagaatgtggacctggccatccagcagggcaagcagaagcccagcggcctgaccaggagcacctccatgctgatcagcagcggccacaacaagagcagcaacagcctgaagctgagcatcttcacccccaacgtgatgatgatcagcaagcatgctgatggcagcctgaaccagtggctggtgtcctttgctgaggagagcgccttcagcacagtgctgagcatcagccacaagagccgctactgcggccaccgcttccacctgaatgacctggcctgccacagcgtgctgcccctgctgctgaccaccagccaccacaatgccctgcggaccccagatgtggacaaccctgagcagccctttgatgccctgaacatcgaggagtgcagcctgacccagcagaacaagagcacagtggatgtggccttccaggaccccagcgctgtgtacagcgagctgatcctgtggagggtggaccctgtgggccccctgtccttctctggaggagtgtctgagctggcccgcatcaacagcctgcacgtgtctgccttcagcaatgtggcctggctgcccaccctcatccccagctactgcctgggcgcctactgcaacagccccagcgcctgctttgtggccagtgatggccagtacctgcggctgtatgaagctgtgattgatgccaagaagctgctgtctgagctgagcaaccctgagatcagcaaatatgtgggggaggtgttcaacatcgtgtcccagcagagcacagcccggcccggctgcatcatcgccctggaccccatcaccaagctgcacggcaggaagacccagctgctgcacgtgtttgaggaggacttcatcctgaacaacctggagaagaagagcctgggcaaggacagcatcctgagcaatgccggcagcagccccaacggcttcagcgagaagttctacctgattgtgattgaatgtacccaggacaacagaagcctgctgcacatgtggaacctgcacctgaagagcatccctgtgtccctggatgagaaggtggacaccaagctgtctgaggccgtgtggcagcctgaggagcactacagcagcagccctgagaagatcctgagccccttcagccagaagtaccaggcctgccgggccaacctgcagagcaccagccggctgaccctcttcagcgagatggtgtacagccaggagctgcacctgcctgagggcgtggagatcatcagcatcaagcccagcgctggccacctgagcagcagcagcatctacccagcctgcagcgccccctacctgctggccaccagctgcagtgatgagaaggtgcgcttctggcgctgccgggtgacagatggagagagcgccaccagcaagaatggcaagattgacctggcctacatctgggaggagtggcccctgctgattgaagatggcctgcagagcaacagcagcatcaccgtgcccggccggcctgtggaggtgtcctgtgcccacaccaaccggctggccgtggcctacaagcagcctgccagcaacagccgcagcagccaggactttgtgatgcacgtgtccatctttgaatgtgagagcactggaggcagctgctgggtgctggagcagaccatccacctggatgagctgagcacagtgctggacagcggcatctctgtggacagcaacctggtggcctacaacaagcaggacatgtacctgagcagcaaggagaacatcaccagcaacaccaagcacctggtgcacctggactggatgagccgggaggatggcagccacatcctgactgtgggcatcggcagcaagctgttcatgtatggccccctggccggcaaggtgcaggaccagacaggcaaggagaccctggccttccccctgtgggagagcaccaaggtggtgcccctgagcaagtttgtgctgctgcggtctgtggacctggtgtcctctgtggatggcagcccccccttccctgtgtccctgtcctgggtgagagatggcatcctggtggtgggcatggactgtgagatgcacgtgtactgccagtggcagcccagcagcaagcaggagcctgtgatcacagacagctacagcggcagcacccccagcatcaccagcctcatcaagcagagcaacagcagcagcggcctgcacccccccaagaagaccctgaccaggtccatgaccagcctggcccagaagatctgtgggaagaagacagcctttgaccccagcgtggacatggaggacagcggcctgtttgaggccgcccacgtgctgagccccaccctgccccagtaccaccccctgcagctgctggagctgatggacctgggcaaggtgcggcgggccaaggccatcctgagccacctggtgaagtgcatcgccggggaggtggtggccctgaatgaagctgagagcaaccatgaaagaaggctgcggagcctgaccatcagcgccagcggcagcaccacccgggacccccaggccttcaacaaggcagaaaatacagactacacagaaattgacagcgtgccccccctgcccctgtatgccctgctggccgcagatgatgacagctgctacagcagcctggagaagagcagcaatgaaagcaccctgagcaagagcaaccagctgagcaaggagagctatgatgagctgttccagacccagctgctgatgacagacacccacatgctggagacagatgaggagaacaccaagccccgggtgattgacctgagccagtacagccccacctactttggacctgagcacgcccaggtgctgagcggccacctgctgcacagcagcctgcccggcctgagcaggatggagcagatgagcctgatggccctggccgacaccatcgccaccaccagcacagacattggagagagccgggacaggagccagggcggggagaccctggatgaatgtggcctgaagttcctgctggccgtgcggctgcacaccttcctgaccaccagcctgcctgcctaccgggcccagctgctgcaccagggcctgagcaccagccactttgcctgggccttccacagcgtggccgaggaggagctgctgaacatgctgcctgccatgcagaaggatgaccccacctggagcgagctgcgggccatgggcgtgggctggtgggtgaggaacacccgcatcctgaggaagtgcatcgagaaggtggccaaggccgccttctacaggaagaatgaccccctggatgctgccatcttctacctggccatgaagaagaaggccgtcatctggggcctgtacagagctgagaagaacaccaggatgacccagttcttcggccacaactttgaagatgagcgctggaggaaggccgccctgaagaatgccttcagcctgctgggcaagcagagatttgagcacagcgctgccttcttcctgctggccggctgcctgagagatgccatcgaggtgtgcctggagaagctgaatgacatccagctggccctggtgattgcccggctgtatgaaagtgaatttgacaccagcgctgcctacaagagcatcctgaggaagaaggtgctgggcatcgacagccctgtgtctgagctgtgcagcctgaacatcaacatgcaccacgaccccttcctgcgctccatggcctactggatcctggaggactacagcggggccctggagaccctcatcaagcagcccatcagagaaaatgatgaccaggtgctgagcgccagcaaccccaccgtcttcaacttctacaactacctgcggacccaccccctgctgctgcggcggcacttcggcagcagtgacaccttcagcacccacatgagcctgaccgggaagagcggcctggccggcaccatcaacctgtctgaaagaagactcttcttcaccacagccagcgcccacctgaaggccggctgccccatgctggccctggaggtgctgagcaagatgcccaaggtgatcaagaagacccggcccttctaccgggccagcagcttcctggacaccagcaaggactgcagccccagcagccccctgaagctggatgcccgggaggacaagagcagcgctgtggactggagccagagcctcatcaatggcttcggcagcagcagcgagggcagcagcgagaagcagagcaacagcaccctgagctttgactggagccagcccagcgtggtgttccaggatgacagcctggagctgaagtgggacagcgacaatgatgaagaaaatgaagatgtgcccatctccatgaaggagctgaagcccctgcagaggaagacagacaagaagctggatgacatcagcagcaactacacagagagcttcagcaccctggatgaaaatgacctgctgaaccccagcgaggacatcatcgctgtgcagctgaagttccgggcctgcctgaagatcctgactgtggagctgcggaccctgagcacaggctatgaaattgatggcggcaagctgcgctaccagctgtaccactggctggagaaggaggtgattgccctgcagaggacctgtgacttctgcagtgatgctgaggagctgcagagcgcctttggaagaaatgaagatgaatttggcctgaatgaagatgctgaggacctgccccaccagaccaaggtgaagcagctgcgggagaacttccaggagaagaggcagtggctgctgaagtaccagagcctgctgaggatgttcctgagctactgcatcctgcacggcagccatggaggcggcctggcctctgtgaggatggagctgatcctgctgctgcaggagagccagcaggagaccagcgagcccctcttcagcagccccctgtctgagcagacctctgtgcccctgctgtttgcctgcacagccaatgccaagacagtggtggccaaccccctgctgcacctgagcaacctgacccatgacatcctgcacgccatcatcaactttgacagccccccccacccagacatccagagcaacaaggtgtatgtgatgcacaccctggccgccagcctgagcgcctgcatctaccagtgcctgtgtggcagccacaactacagcagcttccagaccaaccagttcaccggcatggtgtaccagacagtgctgctgccccaccggcccagcctgaagacaggcagcctggatgaggccctgacccccaacaccagccctgcccagtggccaggcatcacctgcctgatccggctgctgaacagcagtggagaggaggcccagagcggcctgactgtgctgctgtgtgagatcctgacagctgtgtacctgagcctcttcatccacggcctggccacccacagcagcaatgaactcttccgcatcgtggcccaccccctgaatgagaagatgtggagcgctgtgtttggaggaggagcccacgtgcccagcaaggagcagacccacagcaagaccctgcctgtgagcagcctggtggaggagggggagaagcagaacaagcgcttccggcccagcaagatgagctgccgggagagcgcccccctgacccccagcagcgcccctgtgtcccaggagagcctggccgtgaaggagaagttcatccccccagagctgagcatctgggactacttcatcgccaagcccttcctgcccagcagccagagcagagcagaatatgacagcgaggagagcctgggcagtgatgatgatgacaatgatgatgatgatgatgtgctggccagtgacttccacctgcaggagcacagcaacagcaacagctacagctggagcctgatgaggctggccatggtgcagctggtgctgaacaacctgaagaccttctacccctttgctggccatgacctggccgagctgcctgtgagcagccccctgtgccacgctgtgctgaagaccctgcagtgctgggagcaggtgctgctgcggcggctggagatccacggcggccccccccagaactacatcgccagccacacagctgaggagagcctgtctgctggccctgccatcctgcggcacaaggccctgctggagcccaccaacacccccttcaagagcaagcaccacctggccctgtctgtgaagaggctgtggcagtacctggtgaagcaggaggagatccaggagaccttcatcaagaacatcttcaccaagaagcgctgcctgaatgaaagcctggaggacaacagcgagaccatcaagaacagcatgatggaggagcccaacatcaacaagattgaagctgacctgggctacccaggcggcaaggcccgcatcatccacaaggagagtgacatcatcacagcctttgctgtgaacaaggccaacagaaactgcatcgccatcgccagcagccatgatgtgcaggagctggatgtgtctggcatcctggccacccaggtgtacacctgggtggatgatgacatcgaggtggagaccaagggcagcgaggacttcctggtgatccacgccagagatgacctgacagctgtgcagggcaccaccccctacacccacagcaaccctggcacccccatcaacatgccctggctgggcagcacccagacaggccgcggggcctctgtgatgatcaagaaggccatcaacaacgtgcggaggatgaccagccaccccaccctgccctactacctgaccggggcccaggacggctctgtgaggatgtttgagtggggccacagccagcagatcacctgcttccgcagcggcggcaacagccgggtgaccaggatgaggttcaactaccagggcaacaagtttggaattgtggatgctgatggctacctgagcctgtaccagaccaactggaagtgctgccctgtgacaggctccatgcccaagccctacctgacctggcagtgccacaacaagacagccaatgactttgtgtttgtgagcagcagcagcctcatcgccacagctggcctgagcacagacaacagaaatgtgtgcctgtgggacaccctggtggccccagccaacagcctggtgcacgccttcacctgccacgacagcggggccaccgtgctggcctatgcccccaagcaccagctgctgatcagcggcggcaggaagggcttcacctacgtgtttgacctgtgccagaggcagcagaggcagctgttccagagccatgacagccctgtgaaggctgtggccgtggaccccacagaggagtactttgtgacaggcagcgctgagggcaacatcaagatctggagcctgagcaccttcggcctgctgcacacctttgtgtctgaacatgcccggcagagcatcttcaggaacatcggcaccggggtgatgcagattgaaacaggccctgccaaccacatcttcagctgtggggctgatggcaccatgaagatgaggatcctgcctgaccagttcagccccctgaatgaggtgctgaagaatgatgtgaagttcatgctgtag

SEQ ID NO: 150242 - DNA, 9111 bp, synthetic construct
  misc_feature 1..9111: note = Description of Artificial Sequence: Synthetic coding sequence
  source 1..9111: mol_type = other DNA
atgcacctgcaccaggtgctgaccggggctgtgaaccctggggacaactgctacagcgtgggctctgtgggagatgtgcccttcaccgcctacggcagcggctgtgacatcgtcatcctggccaatgactttgaatgtgtgcagatcatccctggggccaagcacggcaacatccaggtgtcctgtgtggagtgcagcaaccagcagggcagaattgctgccagctatggaaatgctgtgtgcatctttgagcccctgggcatcaacagccacaagaggaactgccagctgaagtgccagtggctgaagacaggccagttcttcctgagctctgtgacctacaacctggcctgggacccccaggacaaccggctgctgacagccacagacagcatccagctgtgggcccctcctggagatgacatcctggaggaggaggaggagattgacaacacagtgccccctgtgctgaatgactggaagtgtgtgtggcagtgcaagacctctgtgtctgtgcacctgatggagtggagcccagatggagagtactttgccacagctgggaaggatgactgcctgctgaaggtgtggtaccccatgacaggctggaagagcagcatcatcccccaggaccaccacgaggtgaagaggcggcagagcagcacccagttctcctttgtgtacctggcccaccccagggctgtgacaggcttctcctggaggaagaccagcaagtacatgccccggggctctgtgtgcaatgtgctgctgaccagctgccatgatggagtgtgccgcctgtgggccgagaccctgctgcctgaggactgcctgctgggggagcagatctgtgagaccaccaccagcagcatcgccagcagcctgagccacgccggccgccacaaggaccgcatccagcacgccctggagaccatccaccacctgaagaacctgaggaagggccagaggaggagctctgtgctggtgacccacgccgagctgatgccagaccagacagccatgcatgaggtgcagaggcacatcagccaccacgccaatgccctgtgccacttccacatcgccgccagcatcaacccagccacagacatccccaacgtgctggtgggcacagccttcaacgtggatgatggaaatggaggctttgtggtgcactggctgaacaacaaggagttccacttcaccagcagcacagaggtgttcatgcaccagctgaggaagctgagtgacaagcaggtggaccatgaaaatgatgatgctgacagagaagatgaggagcacagccaggaggaccgggagcggggcctgcacatgaagctggaccatgacctgagcctggaccgggagagcgaggccggcaccggcagcagcgagcatgaagatggagagcgggagggcagccccaggacctacagccggctgtctgtgcccatgcccctgcccaccgtgctgctggacaggaagattgagaccctgctgacagagtggaacaagaacccagacatgctgttcaccatccaccctgtggatggcaccttcctggtgtggcacgtgaagtacctggatgagtacaaccctggcatcttccggcaggtgcaggtgtccttcagcagccgcatccctgtggccttccccagcggagatgccagcagcctgagcaagaacatcatgatgtatgcctgcatcaatgccaccaaggacagccaccacaccctgctgcaccaggagggcatgtctgtgggcagcccccacggcagccagccccacagccgcagccacagcacccacatgaacatcctggcccccaccgtgatgatgatcagcaagcacattgatggcagcctgaaccagtgggccgtgacctttgctgacaagagcgccttcaccaccgtgctgactgtgagccacaagttccgctactgcggccaccgcttccacctgaatgacctggcctgccacagcgtgctgcccctgctgctgaccagcagccaccacaatgccctgctgaccccagagctggactgccagtgggacagcgacaacaagctgagccggctgatggaccctgtgaagcacatcaagggcagcagcaagcagcccctgagaaatgctgccaccaggaccttccatgaccccaatgccatctacagcgagctgatcctgtggagggtggaccccatcggccccctgagctacacaggaggagtgtctgagctggcccgcatcaacagcctgcacaccagcgccttcagcaatgtggcctggctgcccaccctcatccccagctactgcctgggcacctactgcaacagcgccagcgcctgctttgtggccagtgatggcaagaacctgcggctgtaccaggccgtggtggatgccaggaagctgctggatgagctgagtgaccctgagagcagcaagctgattggagaggtgttcaacatcgtgtcccagcagagcacagcccggcccggctgcatcatcgagctggatgccatcaccaaccagtgtggcagcaacacccagctgctgcacgtgttccaggaggacttcatcatcggctacaagccccacaaggaggacatggagaagaaggagacagagatcttcttccagcccagccagggctacagacctccacccttcagcgagaagttcttcctggtggtgattgagaaggacagcaacaacaacagcatcctgcacatgtggcacctgcacctgaagtctgtgcaggcctgcctggccaaggccagcgagggcgccagcagcgagagcctgctgtctgtgcccggccagaagaatgtggacagcagccctgagaccagccccagcgtgagccccatgccccacagcagcagcatcgccaacctgcagacagccagcaagctgatcctgagcagccggctggtgtacagccagcccctggacctgcctgagagcgtggaggtgatccgggccacccccagcgctggccacctgagcagcagcagcatctaccctgtgtgcctggccccctacctggtggtgaccacctgcagcgacaacaaggtgcgcttctggaagtgctgcatggaggccaaccctgagtgcaacaagagtgatgagaaggagatctaccactggaagcgctggcccctgatgaatgatgaaggagaggacaacagcagcacagtgtccatcgtgggccggcctgtggccgtgtcctgcagctacacaggccgcctggccgtggcctacaagcagcccatccaccacaatggatttgtgtccaaggagttctccatgcacgtgtgcatctttgaatgtgagagcactggaggcagcgagtgggtgctggagcagaccatccacctggatgacctggtgaaggtgggctctgtgctggacagccgggtgtctgtggacagcaacctgtttgtgtacagcaagagtgatgccctgctgagcaaggaccgctacctgatccccaacatcaagcacctggtgcacctggactgggtgtccaaagaagatggcagccacatcctgactgtgggcgtgggcgccaacatcttcatgtatggccgcctgagcggcatcgtgacagagcagaccaacagcaaggatggagtggccgtcatcaccctgcccctgggcggcagcatcaagcagggcgtgaagagccgctgggtgctgctgcggagcattgacctggtgtcctctgtggatggcacccccagcctgcctgtgtccctgtcctgggtgagagatggcatcctggtggtgggcatggactgtgagatgcacgtgtatgcccagtggaagcatgctgtgaagtttggagacacagaagctgacagcagcaatgctgaggaggccgccatgcaggaccacagcaccttcaagagcaacatgctggccaggaagtctgtggtggagggcacagccatcagtgatgatgtgttctgcagccccaccgtcatccaggacggcggcctgtttgaggccgcccacgtgctgagccccaccctgccccagtaccaccccacccagctgctggagctgatggacctgggcaaggtgcggcgggccaaggccatcctgagccacctggtgaagtgcatcgccggggaggtggccatcgtgcgggaccctgatgctggggagggcaccaagaggcacctgagcaggaccatctctgtgtctggcagcacagccaaggagaccgtgacagtgggcaaggatggcacccgggactacacagaaattgacagcatcccccccctgcccctgtatgccctgctggccgctgaccaggacaccagctaccgcatcagcgaggagagcaccaagatcccccagagctatgaggaccagacagtgtcccagcctgaggaccagtacagcgagctgttccagatccaggacatccccacagatgacatcgacctggagcctgagaagcgggagaacaagagcaaggtgatcaacctgagccagtatggccctgcctacttcggccaggagcacgcccgggtgctgagcagccacctgatgcacagcagcctgcccggcctgacccggctggagcagatgttcctggtggccctggccgacacagtggccaccaccagcacagagctggatgagagccgggacaagagctgcagcggccgggacaccctggatgaatgtggcctgcgctacctgctggccatgaggctgcacacctgcctgctgaccagcctgccccccctgtacagagtgcagctgctgcaccagggcgtgtccacctgccactttgcctgggccttccacagcgaggccgaggaggagctgatcaacatgatcccagccatccagagaggagacccccagtggagcgagctgcgggccatgggcatcggctggtgggtgaggaacatcaacaccctgcggcgctgcatcgagaaggtggccaaggccagcttccagagaaataatgatgccctggatgctgccctcttctacctgtccatgaagaagaaggctgtggtgtggggcctcttccgcagccagcatgatgagaagatgaccaccttcttcagccacaacttcaatgaagatcgctggaggaaggccgccctgaagaatgccttcagcctgctgggcaagcagagatttgagcagagcgctgccttcttcctgctggccggcagcctgaaggatgccatcgaggtgtgcctggagaagatggaggacatccagctggccatggtgattgcccggctgtatgagagcgagtttgagaccagcagcacctacatcagcatcctgaaccagaagatcctgggctgccagaaggatggcagcggcttcagctgcaagaggctgcacccagaccccttcctgcggagcctggcctactgggtgatgaaggactacacccgggccctggacaccctgctggagcagacccccaaggaggatgatgagcaccaggtgatcatcaagagctgcaaccctgtggccttctccttctacaactacctgcggacccaccccctgctgatcagaagaaacctggccagccctgagggcaccctggccaccctgggcctgaagacagagaagaactttgtggacaagatcaacctgattgaaaggaagctgttcttcaccacagccaatgcccacttcaaggtgggctgccctgtgctggccctggaggtgctgagcaagatccccaaggtgaccaagaccagcgccctgagcgccaagaaggaccagcctgacttcatcagccacaggatggatgatgtgcccagccacagcaaggccctgagtgatggaaatggcagcagcggcatcgagtggagcaatgtgaccagcagccagtatgactggagccagcccatcgtgaaggtggatgaggagcccctgaacctggactggggcgaggaccatgacagcgccctggatgaggaggaggatgatgctgtgggcctggtgatgaagagcacagatgcccgggagaaggacaagcagagcgaccagaaggccagtgaccccaacatgctgctgaccccccaggaggaggatgatcctgagggggacacagaggtggatgtgattgctgagcagctgaagttccgggcctgcctgaagatcctgatgacagagctgcggaccctggccaccggctatgaggtggatggcggcaagctgcgcttccagctgtacaactggctggagaaggagattgctgccctgcacgagatctgcaaccacgagagcgtcatcaaggagtacagcagcaagacctacagcaaggtggagagtgacctgctggaccaggaggagatggtggacaagccagacatcggcagctatgaaagacaccagattgaaagaagaaggctgcaggccaagcgggagcacgccgagaggaggaagtcctggctgcagaagaaccaggacctgctgcgggtcttcctgagctactgcagcctgcatggagcccagggcggcggcctggcctctgtgaggatggagctgaagttcctgctgcaggagagccagcaggagaccaccgtgaagcagctgcagagccccctgcccctgcccaccaccctgcccctgctgagcgccagcatcgccagcaccaagacagtgattgccaaccctgtgctgtacctgaacaaccacatccatgacatcctgtacaccatcgtgcagatgaagaccccaccccaccccagcattgaagatgtgaaggtgcacaccctgcacagcctggccgccagcctgagcgccagcatctaccaggccctgtgtgacagccacagctacagccagacagagggcaaccagttcaccggcatggcctaccagggcctgctgctgagtgacagaagaaggctgaggacagagagcattgaggagcacgccacccccaacagcagccctgcccagtggccaggagtgagcagcctcatcaacctgctgagcagcgcccaggatgaggaccagcccaagctgaacatcctgctgtgtgaggccgtggtggccgtgtacctgagcctgctgatccacgccctggccaccaacagcagcagcgagctgttccggctggccgcccaccccctgaacaacaggatgtgggccgctgtgtttggaggcggcgtgaagctggtggtgaagccccggcggcagagcgagaacatcagcgcccctcctgtgctgtctgaggacatcgacaagcacagaagacgcttcaacatgaggatgctggtgcccggccggcctgtgaaggatgccaccccacctcctgtgcctgctgagcggcccagctacaaggagaagttcatccccccagagctgtccatgtgggactactttgtggccaagcccttcctgcccctgagtgacagcggggtcatctatgacagtgatgagagcatccacagtgatgaggaggatgatgccttcttcagtgacacccagatccaggagcaccaggaccccaacagctacagctgggccctgctgcacctgaccatggtgaagctggccctgcacaacgtgaagaacttcttccccatcgccggcctggagttcagcgagctgcctgtgaccagccccctgggcattgctgtgatcaagaacctggagaactgggagcagatcctgcaggagaagatggaccagtttgagggccccccacccaactacatcaacacctaccccacagacctgtctgtgggcgccggccctgccatcctgaggaacaaggccatgctggagcctgagaacacccccttcaagagccgggacagcagcgccttccctgtgaagaggctgtggcacttcctggtgaagcaggaggtgctgcaggagaccttcatccgctacatcttcaccaagaagaggaagcagagcgaggtggaggccgacctgggctacccaggcggcaaggccaaggtgatccacaaggagagtgacatgatcatggccttctctgtgaacaaggccaactgcaatgagatcgtgctggccagcacccatgatgtgcaggagctggatgtgaccagcctgctggcctgccagagctacatctggattggagaggagtatgaccgggagagcaagagcagtgatgatgtggactaccggggcagcaccaccaccctgtaccagcccagcgccaccagctacagcgccagccaggtgcacccccccagcagcctgccctggctgggcaccggccagaccagcactggagcctctgtgctgatgaagaggaacctgcacaacgtgaagaggatgaccagccaccctgtgcaccagtactacctgaccggggcccaggacggctctgtgaggatgtttgagtggacccggccccagcagctggtgtgcttccggcaggccggaaatgcccgggtgacccggctgtacttcaacagccagggcaacaagtgtggggtggctgatggagagggcttcctgagcatctggcaggtgaaccagacagccagcaaccccaagccctacatgtcctggcagtgccacagcaaggccaccagtgactttgccttcatcaccagcagcagcctggtggccaccagcggccacagcaatgacaacagaaatgtgtgcctgtgggacaccctcatcagccctggcaacagcctcatccacggcttcacctgccacgaccatggagccaccgtgctgcagtatgcccccaagcagcagctgctgatcagcggcggcaggaaaggacatgtgtgcatctttgacatccggcagaggcagctgatccacaccttccaggcccatgattctgccatcaaggccctggccctggacccctatgaggagtacttcaccactggatctgctgagggcaacatcaaggtgtggaggctgaccggccacggcctcatccacagcttcaagtctgagcacgccaagcagagcatcttcagaaatattggagctggggtgatgcagattgacatcatccagggcaacagactcttcagctgtggggctgatggcaccctgaagaccagggtgctgcccaatgccttcaacatccccaaccgcatcctggacatcctgtag

SEQ ID NO: 150243 - DNA, 1809 bp, synthetic construct
  misc_feature 1..1809: note = Description of Artificial Sequence: Synthetic coding sequence
  source 1..1809: mol_type = other DNA
atgtgggactactttgtggccaagcccttcctgcccctgagtgacagcggggtcatctatgacagtgatgagagcatccacagtgatgaagaagatgatgccttcttcagtgacacccagatccaggagcaccaggaccccaacagctacagctgggccctgctgcacctgaccatggtgaagctggccctgcacaacgtgaagaacttcttccccatcgccggcctggagttcagcgagctgcctgtgaccagccccctgggcattgctgtgatcaagaacctggagaactgggagcagatcctgcaggagaagatggaccagtttgagggccccccacccaactacatcaacacctaccccacagacctgtctgtgggcgccggccctgccatcctgaggaacaaggccatgctggagcctgagaacacccccttcaagagccgggacagcagcgccttccctgtgaagaggctgtggcacttcctggtgaagcaggaggtgctgcaggagaccttcatccgctacatcttcaccaagaagaggaagcagagcgagagcattgaggagcacgtggagcaggtgaaccagaactgcatcgccgaggactgccacatcaaggtggaggccgacctgggctacccaggcggcaaggccaaggtgatccacaaggagagtgacatgatcatggccttctctgtgaacaaggccaactgcaatgagatcgtgctggccagcacccatgatgtgcaggagctggatgtgaccagcctgctggcctgccagagctacatctggattggagaggagtatgaccgggagagcaagagcagtgatgatgtggactaccggggcagcaccaccaccctgtaccagcccagcgccaccagctacagcgccagccaggtgcacccccccagcagcctgccctggctgggcaccggccagaccagcactggagcctctgtgctgatgaagaggaacctgcacaacgtgaagaggatgaccagccaccctgtgcaccagtactacctgaccggggcccaggacggctctgtgaggatgtttgagtggacccggccccagcagctggtgtgcttccggcaggccggaaatgcccgggtgacccggctgtacttcaacagccagggcaacaagtgtggggtggctgatggagagggcttcctgagcatctggcaggtgaaccagacagccagcaaccccaagccctacatgtcctggcagtgccacagcaaggccaccagtgactttgccttcatcaccagcagcagcctggtggccaccagcggccacagcaatgacaacagaaatgtgtgcctgtgggacaccctcatcagccctggcaacagcctcatccacggcttcacctgccacgaccatggagccaccgtgctgcagtatgcccccaagcagcagctgctgatcagcggcggcaggaaaggacatgtgtgcatctttgacatccggcagaggcagctgatccacaccttccaggcccatgattctgccatcaaggccctggccctggacccctatgaggagtacttcaccactggatctgctgagggcaacatcaaggtgtggaggctgaccggccacggcctcatccacagcttcaagtctgagcacgccaagcagagcatcttcagaaatattggagctggggtgatgcagattgacatcatccagggcaacagactcttcagctgtggggctgatggcaccctgaagaccagggtgctgcccaatgccttcaacatccccaaccgcatcctggacatcctgtag

SEQ ID NO: 150244 - DNA, 7203 bp, synthetic construct
  misc_feature 1..7203: note = Description of Artificial Sequence: Synthetic coding sequence
  source 1..7203: mol_type = other DNA
atgcacctgcaccaggtgctgaccggggctgtgaaccctggggacaactgctacagcgtgggctctgtgggagatgtgcccttcaccgcctacggcagcggctgtgacatcgtcatcctggccaatgactttgaatgtgtgcagatcatccctggggccaagcacggcaacatccaggtgtcctgtgtggagtgcagcaaccagcagggcagaattgctgccagctatggaaatgctgtgtgcatctttgagcccctgggcatcaacagccacaagaggaactgccagctgaagtgccagtggctgaagacaggccagttcttcctgagctctgtgacctacaacctggcctgggacccccaggacaaccggctgctgacagccacagacagcatccagctgtgggcccctcctggagatgacatcctggaggaggaggaggagattgacaacacagtgccccctgtgctgaatgactggaagtgtgtgtggcagtgcaagacctctgtgtctgtgcacctgatggagtggagcccagatggagagtactttgccacagctgggaaggatgactgcctgctgaaggtgtggtaccccatgacaggctggaagagcagcatcatcccccaggaccaccacgaggtgaagaggcggcagagcagcacccagttctcctttgtgtacctggcccaccccagggctgtgacaggcttctcctggaggaagaccagcaagtacatgccccggggctctgtgtgcaatgtgctgctgaccagctgccatgatggagtgtgccgcctgtgggccgagaccctgctgcctgaggactgcctgctgggggagcagatctgtgagaccaccaccagcagcatcgccagcagcctgagccacgccggccgccacaaggaccgcatccagcacgccctggagaccatccaccacctgaagaacctgaggaagggccagaggaggagctctgtgctggtgacccacgccgagctgatgccagaccagacagccatgcatgaggtgcagaggcacatcagccaccacgccaatgccctgtgccacttccacatcgccgccagcatcaacccagccacagacatccccaacgtgctggtgggcacagccttcaacgtggatgatggaaatggaggctttgtggtgcactggctgaacaacaaggagttccacttcaccagcagcacagaggtgttcatgcaccagctgaggaagctgagtgacaagcaggtggaccatgaaaatgatgatgctgacagagaagatgaggagcacagccaggaggaccgggagcggggcctgcacatgaagctggaccatgacctgagcctggaccgggagagcgaggccggcaccggcagcagcgagcatgaagatggagagcgggagggcagccccaggacctacagccggctgtctgtgcccatgcccctgcccaccgtgctgctggacaggaagattgagaccctgctgacagagtggaacaagaacccagacatgctgttcaccatccaccctgtggatggcaccttcctggtgtggcacgtgaagtacctggatgagtacaaccctggcatcttccggcaggtgcaggtgtccttcagcagccgcatccctgtggccttccccagcggagatgccagcagcctgagcaagaacatcatgatgtatgcctgcatcaatgccaccaaggacagccaccacaccctgctgcaccaggagggcatgtctgtgggcagcccccacggcagccagccccacagccgcagccacagcacccacatgaacatcctggcccccaccgtgatgatgatcagcaagcacattgatggcagcctgaaccagtgggccgtgacctttgctgacaagagcgccttcaccaccgtgctgactgtgagccacaagttccgctactgcggccaccgcttccacctgaatgacctggcctgccacagcgtgctgcccctgctgctgaccagcagccaccacaatgccctgctgaccccagagctggactgccagtgggacagcgacaacaagctgagccggctgatggaccctgtgaagcacatcaagggcagcagcaagcagcccctgagaaatgctgccaccaggaccttccatgaccccaatgccatctacagcgagctgatcctgtggagggtggaccccatcggccccctgagctacacaggaggagtgtctgagctggcccgcatcaacagcctgcacaccagcgccttcagcaatgtggcctggctgcccaccctcatccccagctactgcctgggcacctactgcaacagcgccagcgcctgctttgtggccagtgatggcaagaacctgcggctgtaccaggccgtggtggatgccaggaagctgctggatgagctgagtgaccctgagagcagcaagctgattggagaggtgttcaacatcgtgtcccagcagagcacagcccggcccggctgcatcatcgagctggatgccatcaccaaccagtgtggcagcaacacccagctgctgcacgtgttccaggaggacttcatcatcggctacaagccccacaaggaggacatggagaagaaggagacagagatcttcttccagcccagccagggctacagacctccacccttcagcgagaagttcttcctggtggtgattgagaaggacagcaacaacaacagcatcctgcacatgtggcacctgcacctgaagtctgtgcaggcctgcctgggccgggacaccctggatgaatgtggcctgcgctacctgctggccatgaggctgcacacctgcctgctgaccagcctgccccccctgtacagagtgcagctgctgcaccagggcgtgtccacctgccactttgcctgggccttccacagcgaggccgaggaggagctgatcaacatgatcccagccatccagagaggagacccccagtggagcgagctgcgggccatgggcatcggctggtgggtgaggaacatcaacaccctgcggcgctgcatcgagaaggtggccaaggccagcttccagagaaataatgatgccctggatgctgccctcttctacctgtccatgaagaagaaggctgtggtgtggggcctcttccgcagccagcatgatgagaagatgaccaccttcttcagccacaacttcaatgaagatcgctggaggaaggccgccctgaagaatgccttcagcctgctgggcaagcagagatttgagcagagcgctgccttcttcctgctggccggcagcctgaaggatgccatcgaggtgtgcctggagaagatggaggacatccagctggccatggtgattgcccggctgtatgagagcgagtttgagaccagcagcacctacatcagcatcctgaaccagaagatcctgggctgccagaaggatggcagcggcttcagctgcaagaggctgcacccagaccccttcctgcggagcctggcctactgggtgatgaaggactacacccgggccctggacaccctgctggagcagacccccaaggaggatgatgagcaccaggtgatcatcaagagctgcaaccctgtggccttctccttctacaactacctgcggacccaccccctgctgatcagaagaaacctggccagccctgagggcaccctggccaccctgggcctgaagacagagaagaactttgtggacaagatcaacctgattgaaaggaagctgttcttcaccacagccaatgcccacttcaaggtgggctgccctgtgctggccctggaggtgctgagcaagatccccaaggtgaccaagaccagcgccctgagcgccaagaaggaccagcctgacttcatcagccacaggatggatgatgtgcccagccacagcaaggccctgagtgatggaaatggcagcagcggcatcgagtggagcaatgtgaccagcagccagtatgactggagccagcccatcgtgaaggtggatgaggagcccctgaacctggactggggcgaggaccatgacagcgccctggatgaggaggaggatgatgctgtgggcctggtgatgaagagcacagatgcccgggagaaggacaagcagagcgaccagaaggccagtgaccccaacatgctgctgaccccccaggaggaggatgatcctgagggggacacagaggtggatgtgattgctgagcagctgaagttccgggcctgcctgaagatcctgatgacagagctgcggaccctggccaccggctatgaggtggatggcggcaagctgcgcttccagctgtacaactggctggagaaggagattgctgccctgcacgagatctgcaaccacgagagcgtcatcaaggagtacagcagcaagacctacagcaaggtggagagtgacctgctggaccaggaggagatggtggacaagccagacatcggcagctatgaaagacaccagattgaaagaagaaggctgcaggccaagcgggagcacgccgagaggaggaagtcctggctgcagaagaaccaggacctgctgcgggtcttcctgagctactgcagcctgcatggagcccagggcggcggcctggcctctgtgaggatggagctgaagttcctgctgcaggagagccagcaggagaccaccgtgaagcagctgcagagccccctgcccctgcccaccaccctgcccctgctgagcgccagcatcgccagcaccaagacagtgattgccaaccctgtgctgtacctgaacaaccacatccatgacatcctgtacaccatcgtgcagatgaagaccccaccccaccccagcattgaagatgtgaaggtgcacaccctgcacagcctggccgccagcctgagcgccagcatctaccaggccctgtgtgacagccacagctacagccagacagagggcaaccagttcaccggcatggcctaccagggcctgctgctgagtgacagaagaaggctgaggacagagagcattgaggagcacgccacccccaacagcagccctgcccagtggccaggagtgagcagcctcatcaacctgctgagcagcgcccaggatgaggaccagcccaagctgaacatcctgctgtgtgaggccgtggtggccgtgtacctgagcctgctgatccacgccctggccaccaacagcagcagcgagctgttccggctggccgcccaccccctgaacaacaggatgtgggccgctgtgtttggaggcggcgtgaagctggtggtgaagccccggcggcagagcgagaacatcagcgcccctcctgtgctgtctgaggacatcgacaagcacagaagacgcttcaacatgaggatgctggtgcccggccggcctgtgaaggatgccaccccacctcctgtgcctgctgagcggcccagctacaaggagaagttcatccccccagagctgtccatgtgggactactttgtggccaagcccttcctgcccctgagtgacagcggggtcatctatgacagtgatgagagcatccacagtgatgaggaggatgatgccttcttcagtgacacccagatccaggagcaccaggaccccaacagctacagctgggccctgctgcacctgaccatggtgaagctggccctgcacaacgtgaagaacttcttccccatcgccggcctggagttcagcgagctgcctgtgaccagccccctgggcattgctgtgatcaagaacctggagaactgggagcagatcctgcaggagaagatggaccagtttgagggccccccacccaactacatcaacacctaccccacagacctgtctgtgggcgccggccctgccatcctgaggaacaaggccatgctggagcctgagaacacccccttcaagagccgggacagcagcgccttccctgtgaagaggctgtggcacttcctggtgaagcaggaggtgctgcaggagaccttcatccgctacatcttcaccaagaagaggaagcagagcgaggtggaggccgacctgggctacccaggcggcaaggccaaggtgatccacaaggagagtgacatgatcatggccttctctgtgaacaaggccaactgcaatgagatcgtgctggccagcacccatgatgtgcaggagctggatgtgaccagcctgctggcctgccagagctacatctggattggagaggagtatgaccgggagagcaagagcagtgatgatgtggactaccggggcagcaccaccaccctgtaccagcccagcgccaccagctacagcgccagccaggtgcacccccccagcagcctgccctggctgggcaccggccagaccagcactggagcctctgtgctgatgaagaggaacctgcacaacgtgaagaggatgaccagccaccctgtgcaccagtactacctgaccggggcccaggacggctctgtgaggatgtttgagtggacccggccccagcagctggtgtgcttccggcaggccggaaatgcccgggtgacccggctgtacttcaacagccagggcaacaagtgtggggtggctgatggagagggcttcctgagcatctggcaggtgaaccagacagccagcaaccccaagccctacatgtcctggcagtgccacagcaaggccaccagtgactttgccttcatcaccagcagcagcctggtggccaccagcggccacagcaatgacaacagaaatgtgtgcctgtgggacaccctcatcagccctggcaacagcctcatccacggcttcacctgccacgaccatggagccaccgtgctgcagtatgcccccaagcagcagctgctgatcagcggcggcaggaaaggacatgtgtgcatctttgacatccggcagaggcagctgatccacaccttccaggcccatgattctgccatcaaggccctggccctggacccctatgaggagtacttcaccactggatctgctgagggcaacatcaaggtgtggaggctgaccggccacggcctcatccacagcttcaagtctgagcacgccaagcagagcatcttcagaaatattggagctggggtgatgcagattgacatcatccagggcaacagactcttcagctgtggggctgatggcaccctgaagaccagggtgctgcccaatgccttcaacatccccaaccgcatcctggacatcctgtag

SEQ ID NO: 150245 - DNA, 9114 bp, synthetic construct
  misc_feature 1..9114: note = Description of Artificial Sequence: Synthetic coding sequence
  source 1..9114: mol_type = other DNA
atgcacctgcaccaggtgctgaccggggctgtgaaccctggggacaactgctacagcgtgggctctgtgggagatgtgcccttcaccgcctacggcagcggctgtgacatcgtcatcctggccaatgactttgaatgtgtgcagatcatccctggggccaagcacggcaacatccaggtgtcctgtgtggagtgcagcaaccagcagggcagaattgctgccagctatggaaatgctgtgtgcatctttgagcccctgggcatcaacagccacaagaggaactgccagctgaagtgccagtggctgaagacaggccagttcttcctgagctctgtgacctacaacctggcctgggacccccaggacaaccggctgctgacagccacagacagcatccagctgtgggcccctcctggagatgacatcctggaggaggaggaggagattgacaacacagtgccccctgtgctgaatgactggaagtgtgtgtggcagtgcaagacctctgtgtctgtgcacctgatggagtggagcccagatggagagtactttgccacagctgggaaggatgactgcctgctgaaggtgtggtaccccatgacaggctggaagagcagcatcatcccccaggaccaccacgaggtgaagaggcggcagagcagcacccagttctcctttgtgtacctggcccaccccagggctgtgacaggcttctcctggaggaagaccagcaagtacatgccccggggctctgtgtgcaatgtgctgctgaccagctgccatgatggagtgtgccgcctgtgggccgagaccctgctgcctgaggactgcctgctgggggagcagatctgtgagaccaccaccagcagcatcgccagcagcctgagccacgccggccgccacaaggaccgcatccagcacgccctggagaccatccaccacctgaagaacctgaggaagggccagaggaggagctctgtgctggtgacccacgccgagctgatgccagaccagacagccatgcatgaggtgcagaggcacatcagccaccacgccaatgccctgtgccacttccacatcgccgccagcatcaacccagccacagacatccccaacgtgctggtgggcacagccttcaacgtggatgatggaaatggaggctttgtggtgcactggctgaacaacaaggagttccacttcaccagcagcacagaggtgttcatgcaccagctgaggaagctgagtgacaagcaggtggaccatgaaaatgatgatgctgacagagaagatgaggagcacagccaggaggaccgggagcggggcctgcacatgaagctggaccatgacctgagcctggaccgggagagcgaggccggcaccggcagcagcgagcatgaagatggagagcgggagggcagccccaggacctacagccggctgtctgtgcccatgcccctgcccaccgtgctgctggacaggaagattgagaccctgctgacagagtggaacaagaacccagacatgctgttcaccatccaccctgtggatggcaccttcctggtgtggcacgtgaagtacctggatgagtacaaccctggcatcttccggcaggtgcaggtgtccttcagcagccgcatccctgtggccttccccagcggagatgccagcagcctgagcaagaacatcatgatgtatgcctgcatcaatgccaccaaggacagccaccacaccctgctgcaccaggagggcatgtctgtgggcagcccccacggcagccagccccacagccgcagccacagcacccacatgaacatcctggcccccaccgtgatgatgatcagcaagcacattgatggcagcctgaaccagtgggccgtgacctttgctgacaagagcgccttcaccaccgtgctgactgtgagccacaagttccgctactgcggccaccgcttccacctgaatgacctggcctgccacagcgtgctgcccctgctgctgaccagcagccaccacaatgccctgctgaccccagagctggactgccagtgggacagcgacaacaagctgagccggctgatggaccctgtgaagcacatcaagggcagcagcaagcagcccctgagaaatgctgccaccaggaccttccatgaccccaatgccatctacagcgagctgatcctgtggagggtggaccccatcggccccctgagctacacaggaggagtgtctgagctggcccgcatcaacagcctgcacaccagcgccttcagcaatgtggcctggctgcccaccctcatccccagctactgcctgggcacctactgcaacagcgccagcgcctgctttgtggccagtgatggcaagaacctgcggctgtaccaggccgtggtggatgccaggaagctgctggatgagctgagtgaccctgagagcagcaagctgattggagaggtgttcaacatcgtgtcccagcagagcacagcccggcccggctgcatcatcgagctggatgccatcaccaaccagtgtggcagcaacacccagctgctgcacgtgttccaggaggacttcatcatcggctacaagccccacaaggaggacatggagaagaaggagacagagatcttcttccagcccagccagggctacagacctccacccttcagcgagaagttcttcctggtggtgattgagaaggacagcaacaacaacagcatcctgcacatgtggcacctgcacctgaagtctgtgcaggcctgcctggccaaggccagcgagggcgccagcagcgagagcctgctgtctgtgcccggccagaagaatgtggacagcagccctgagaccagccccagcgtgagccccatgccccacagcagcagcatcgccaacctgcagacagccagcaagctgatcctgagcagccggctggtgtacagccagcccctggacctgcctgagagcgtggaggtgatccgggccacccccagcgctggccacctgagcagcagcagcatctaccctgtgtgcctggccccctacctggtggtgaccacctgcagcgacaacaaggtgcgcttctggaagtgctgcatggaggccaaccctgagtgcaacaagagtgatgagaaggagatctaccactggaagcgctggcccctgatgaatgatgaaggagaggacaacagcagcacagtgtccatcgtgggccggcctgtggccgtgtcctgcagctacacaggccgcctggccgtggcctacaagcagcccatccaccacaatggatttgtgtccaaggagttctccatgcacgtgtgcatctttgaatgtgagagcactggaggcagcgagtgggtgctggagcagaccatccacctggatgacctggtgaaggtgggctctgtgctggacagccgggtgtctgtggacagcaacctgtttgtgtacagcaagagtgatgccctgctgagcaaggaccgctacctgatccccaacatcaagcacctggtgcacctggactgggtgtccaaagaagatggcagccacatcctgactgtgggcgtgggcgccaacatcttcatgtatggccgcctgagcggcatcgtgacagagcagaccaacagcaaggatggagtggccgtcatcaccctgcccctgggcggcagcatcaagcagggcgtgaagagccgctgggtgctgctgcggagcattgacctggtgtcctctgtggatggcacccccagcctgcctgtgtccctgtcctgggtgagagatggcatcctggtggtgggcatggactgtgagatgcacgtgtatgcccagtggaagcatgctgtgaagtttggagacacagaagctgacagcagcaatgctgaggaggccgccatgcaggaccacagcaccttcaagagcaacatgctggccaggaagtctgtggtggagggcacagccatcagtgatgatgtgttctgcagccccaccgtcatccaggacggcggcctgtttgaggccgcccacgtgctgagccccaccctgccccagtaccaccccacccagctgctggagctgatggacctgggcaaggtgcggcgggccaaggccatcctgagccacctggtgaagtgcatcgccggggaggtggccatcgtgcgggaccctgatgctggggagggcaccaagaggcacctgagcaggaccatctctgtgtctggcagcacagccaaggagaccgtgacagtgggcaaggatggcacccgggactacacagaaattgacagcatcccccccctgcccctgtatgccctgctggccgctgaccaggacaccagctaccgcatcagcgaggagagcaccaagatcccccagagctatgaggaccagacagtgtcccagcctgaggaccagtacagcgagctgttccagatccaggacatccccacagatgacatcgacctggagcctgagaagcgggagaacaagagcaaggtgatcaacctgagccagtatggccctgcctacttcggccaggagcacgcccgggtgctgagcagccacctgatgcacagcagcctgcccggcctgacccggctggagcagatgttcctggtggccctggccgacacagtggccaccaccagcacagagctggatgagagccgggacaagagctgcagcggccgggacaccctggatgaatgtggcctgcgctacctgctggccatgaggctgcacacctgcctgctgaccagcctgccccccctgtacagagtgcagctgctgcaccagggcgtgtccacctgccactttgcctgggccttccacagcgaggccgaggaggagctgatcaacatgatcccagccatccagagaggagacccccagtggagcgagctgcgggccatgggcatcggctggtgggtgaggaacatcaacaccctgcggcgctgcatcgagaaggtggccaaggccagcttccagagaaataatgatgccctggatgctgccctcttctacctgtccatgaagaagaaggctgtggtgtggggcctcttccgcagccagcatgatgagaagatgaccaccttcttcagccacaacttcaatgaagatcgctggaggaaggccgccctgaagaatgccttcagcctgctgggcaagcagagatttgagcagagcgctgccttcttcctgctggccggcagcctgaaggatgccatcgaggtgtgcctggagaagatggaggacatccagctggccatggtgattgcccggctgtatgagagcgagtttgagaccagcagcacctacatcagcatcctgaaccagaagatcctgggctgccagaaggatggcagcggcttcagctgcaagaggctgcacccagaccccttcctgcggagcctggcctactgggtgatgaaggactacacccgggccctggacaccctgctggagcagacccccaaggaggatgatgagcaccaggtgatcatcaagagctgcaaccctgtggccttctccttctacaactacctgcggacccaccccctgctgatcagaagaaacctggccagccctgagggcaccctggccaccctgggcctgaagacagagaagaactttgtggacaagatcaacctgattgaaaggaagctgttcttcaccacagccaatgcccacttcaaggtgggctgccctgtgctggccctggaggtgctgagcaagatccccaaggtgaccaagaccagcgccctgagcgccaagaaggaccagcctgacttcatcagccacaggatggatgatgtgcccagccacagcaaggccctgagtgatggaaatggcagcagcggcatcgagtggagcaatgtgaccagcagccagtatgactggagccagcccatcgtgaaggtggatgaggagcccctgaacctggactggggcgaggaccatgacagcgccctggatgaggaggaggatgatgctgtgggcctggtgatgaagagcacagatgcccgggagaaggacaagcagagcgaccagaaggccagtgaccccaacatgctgctgaccccccaggaggaggatgatcctgagggggacacagaggtggatgtgattgctgagcagctgaagttccgggcctgcctgaagatcctgatgacagagctgcggaccctggccaccggctatgaggtggatggcggcaagctgcgcttccagctgtacaactggctggagaaggagattgctgccctgcacgagatctgcaaccacgagagcgtcatcaaggagtacagcagcaagacctacagcaaggtggagagtgacctgctggaccaggaggagatggtggacaagccagacatcggcagctatgaaagacaccagattgaaagaagaaggctgcaggccaagcgggagcacgccgagaggaggaagtcctggctgcagaagaaccaggacctgctgcgggtcttcctgagctactgcagcctgcatggagcccagggcggcggcctggcctctgtgaggatggagctgaagttcctgctgcaggagagccagcaggagaccaccgtgaagcagctgcagagccccctgcccctgcccaccaccctgcccctgctgagcgccagcatcgccagcaccaagacagtgattgccaaccctgtgctgtacctgaacaaccacatccatgacatcctgtacaccatcgtgcagatgaagaccccaccccaccccagcattgaagatgtgaaggtgcacaccctgcacagcctggccgccagcctgagcgccagcatctaccaggccctgtgtgacagccacagctacagcagccagacagagggcaaccagttcaccggcatggcctaccagggcctgctgctgagtgacagaagaaggctgaggacagagagcattgaggagcacgccacccccaacagcagccctgcccagtggccaggagtgagcagcctcatcaacctgctgagcagcgcccaggatgaggaccagcccaagctgaacatcctgctgtgtgaggccgtggtggccgtgtacctgagcctgctgattcatgccctggccaccaacagcagcagcgagctgttccggctggccgcccaccccctgaacaacaggatgtgggccgctgtgtttggaggaggagtgaagctggtggtgaagccccggcggcagagcgagaacatcagcgcccctcctgtgctgtctgaagatattgacaagcacagaagacgcttcaacatgaggatgctggtgcccggccggcctgtgaaggatgccaccccacctcctgtgcctgctgagcggcccagctacaaggagaagttcatccccccagagctgtccatgtgggactactttgtggccaagcccttcctgcccctgagtgacagcggggtcatctatgacagtgatgagagcatccacagtgatgaagaagatgatgccttcttcagtgacacccagatccaggagcaccaggaccccaacagctacagctgggccctgctgcacctgaccatggtgaagctggccctgcacaacgtgaagaacttcttccccatcgccggcctggagttcagcgagctgcctgtgaccagccccctgggcattgctgtgatcaagaacctggagaactgggagcagatcctgcaggagaagatggaccagtttgagggccccccacccaactacatcaacacctaccccacagacctgtctgtgggcgccggccctgccatcctgaggaacaaggccatgctggagcctgagaacacccccttcaagagccgggacagcagcgccttccctgtgaagaggctgtggcacttcctggtgaagcaggaggtgctgcaggagaccttcatccgctacatcttcaccaagaagaggaagcagagcgaggtggaggccgacctgggctacccaggcggcaaggccaaggtgatccacaaggagagtgacatgatcatggccttctctgtgaacaaggccaactgcaatgaaattgtgctggccagcacccatgatgtgcaggagctggatgtgaccagcctgctggcctgccagagctacatctggattggagaggagtatgaccgggagagcaagagcagtgatgatgtggactaccggggcagcaccaccaccctgtaccagcccagcgccaccagctacagcgccagccaggtgcacccccccagcagcctgccctggctgggcaccggccagaccagcactggagcctctgtgctgatgaagaggaacctgcacaacgtgaagaggatgaccagccaccctgtgcaccagtactacctgactggagcccaggacggctctgtgaggatgtttgagtggacccggccccagcagctggtgtgcttccggcaggccggaaatgcccgggtgacccggctgtacttcaacagccagggcaacaagtgtggggtggctgatggagagggcttcctgagcatctggcaggtgaaccagacagccagcaaccccaagccctacatgtcctggcagtgccacagcaaggccaccagtgactttgccttcatcaccagcagcagcctggtggccaccagcggccacagcaatgacaacagaaatgtgtgcctgtgggacaccctcatcagccctggcaacagcctcatccacggcttcacctgccacgaccacggggccaccgtgctgcagtatgcccccaagcagcagctgctgatcagcggcggcaggaagggccacgtgtgcatctttgacatccggcagaggcagctgatccacaccttccaggcccatgacagcgccatcaaggccctggccctggacccctatgaggagtacttcaccaccggcagcgctgagggcaacatcaaggtgtggaggctgactggacatggcctcatccacagcttcaagtcagaacatgccaagcagagcatcttcaggaacatcggggccggcgtgatgcagattgacatcatccagggcaacagactcttcagctgtggggctgatggcaccctgaagaccagggtgctgcccaatgccttcaacatccccaaccgcatcctggacatcctgtag

SEQ ID NO: 150246 - DNA, 4851 bp, synthetic construct
  misc_feature 1..4851: note = Description of Artificial Sequence: Synthetic coding sequence
  source 1..4851: mol_type = other DNA
atgcctgccaggacagccccagcccgggtgcccaccctggccgtgcctgccatcagcctgcctgatgatgtgagaagaaggctgaaggacctggagcgggacagcctgacagagaaggaatgtgtgaaggagaagctgaacctgctgcacgagttcctgcagacagagatcaagaaccagctgtgtgacctggagaccaagctgaggaaggaggagctgtctgaggagggctacctggccaaggtgaagagcctgctgaacaaggacctgagcctggagaatggagcccacgcctacaaccgggaggtgaatggccgcctggagaatggaaaccaggcccggtctgaggcccggcgggtgggcatggctgatgccaacagcccccccaagcccctgagcaagcccaggaccccaagaagaagcaagagtgatggagaggccaagccagagcccagccccagcccccgcatcaccaggaagagcacccggcagaccaccatcaccagccactttgccaagggccctgccaagaggaagccccaggaggagagcgagcgggccaagagtgatgagagcatcaaggaggaggacaaggaccaggatgagaagagaagaagagtgaccagccgggagcgggtggcccggcccctgcctgctgaggagcctgagcgggccaagagcggcaccaggacagagaaggaggaggagagagatgagaaggaggagaagaggctgcggagccagaccaaggagcccacccccaagcagaagctgaaggaggagccagaccgggaggcccgggccggcgtgcaggctgatgaagatgaagatggagatgagaaggatgagaagaagcacaggagccagcccaaggacctggccgccaagagaagacctgaggagaaggagcctgagaaggtgaacccccagatcagtgatgagaaggatgaagatgagaaggaggagaagaggaggaagaccacccccaaggagcccacagagaagaagatggcccgggccaagacagtgatgaacagcaagacccacccccccaagtgcatccagtgtggccagtacctggatgatcctgacctgaagtatggccagcaccccccagatgctgtggatgagccccagatgctgaccaatgagaagctgagcatctttgatgccaatgaaagtggctttgagagctatgaggccctgccccagcacaagctgacctgcttctctgtgtactgcaagcacggccacctgtgccccatcgacaccggcctgattgagaagaacatcgagctgttcttcagcggcagcgccaagcccatctatgatgatgaccccagcctggagggcggcgtgaatggcaagaacctgggccccatcaatgagtggtggatcactggatttgatggaggagagaaggccctgattggcttcagcaccagctttgctgagtacatcctgatggaccccagcccagaatatgcccccatcttcggcctgatgcaggagaagatctacatcagcaagatcgtggtggagttcctgcagagcaacagcgacagcacctatgaagatctcatcaacaagattgagaccaccgtgccccccagcggcctgaacctgaaccgcttcacagaggacagcctgctgcggcatgcccagtttgtggtggagcaggtggagagctatgatgaagctggggacagtgatgagcagcccatcttcctgaccccctgcatgagggacctgatcaagctggccggcgtgaccctgggccagaggcgggcccaggcccggcggcagaccatccgccacagcacccgggagaaggaccggggccccaccaaggccaccaccaccaagctggtgtaccagatctttgacaccttctttgctgagcagatcgagaaggatgaccgggaggacaaggaaaatgccttcaagagaagaagatgtggggtgtgtgaggtgtgccagcagccagaatgtgggaagtgcaaggcctgcaaggacatggtgaagtttggaggcagcggccgcagcaagcaggcctgccaggagcggcgctgccccaacatggccatgaaggaggctgatgatgatgaggaggtggatgacaacatccctgagatgcccagccccaagaagatgcaccagggcaagaagaagaagcagaacaagaaccgcatctcctgggtgggggaggccgtgaagacagatggcaagaagagctactacaagaaggtgtgcattgatgctgagaccctggaggtgggggactgtgtgtctgtcatcccagatgacagcagcaagcccctgtacctggcccgggtgacagccctgtgggaggacagcagcaatggccagatgtttcatgcccactggttctgtgccggcacagacacagtgctgggcgccaccagtgaccccctggagctgttcctggtggatgaatgtgaggacatgcagctgagctacatccacagcaaggtgaaggtgatctacaaggcccccagcgagaactgggccatggagggcggcatggaccctgagagcctgctggagggagatgatggcaagacctacttctaccagctgtggtatgaccaggactatgccaggtttgagagcccccccaagacccagcccacagaggacaacaagttcaagttctgtgtgtcctgtgcccggctggccgagatgaggcagaaggagatcccccgggtgctggagcagctggaggacctggacagccgggtgctgtactacagcgccaccaagaatggcatcctgtacagagtgggagatggagtgtacctgcccccagaggccttcaccttcaacatcaagctgagcagccctgtgaagaggcccaggaaggagcctgtggatgaggacctgtacccagagcactacaggaagtacagcgactacatcaagggcagcaacctggatgcccctgagccctacagaattggccgcatcaaggagatcttctgccccaagaagagcaatggccggcccaatgaaacagacatcaagatccgggtgaacaagttctacagacctgagaacacccacaagagcaccccagccagctaccacgccgacatcaacctgctgtactggagcgatgaggaggccgtggtggacttcaaggctgtgcagggccgctgcaccgtggagtatggagaggacctgcctgaatgtgtgcaggtgtacagcatgggcggccccaaccgcttctacttcctggaggcctacaatgccaagagcaagagctttgaagatcctcccaaccacgcccggagccctggcaacaagggcaagggcaagggcaagggcaagggcaagcccaagagccaggcctgtgagcccagcgagcctgagattgagatcaagctgcccaagctgcggaccctggatgtgttcagcggctgcggcggcctgtctgagggcttccaccaggccggcatcagtgacaccctgtgggccatcgagatgtgggaccctgctgcccaggccttccggctgaacaaccctggcagcacagtgttcacagaggactgcaacatcctgctgaagctggtgatggccggggagaccaccaacagccggggccagaggctgccccagaagggagatgtggagatgctgtgtggcggccccccctgccagggcttcagcggcatgaaccgcttcaacagcaggacctacagcaagttcaagaacagcctggtggtgtccttcctgagctactgtgactactaccggccccgcttcttcctgctggagaatgtgaggaactttgtgtccttcaagaggtccatggtgctgaagctgaccctgcgctgcctggtgaggatgggctaccagtgcaccttcggcgtgctgcaggccggccagtatggagtggcccagaccaggagaagagccatcatcctggccgccgcccctggagagaagctgcccctcttccctgagcccctgcacgtgtttgccccccgggcctgccagctgtctgtggtggtggatgacaagaagtttgtgagcaacatcacccggctgagcagcggccccttccgcaccatcaccgtgcgggacaccatgtctgacctgcctgaggtgagaaatggagccagcgccctggagatctcctacaatggagagccccagagctggttccagaggcagctgcggggggcccagtaccagcccatcctgcgggaccacatctgcaaggacatgtctgccctggtggccgccaggatgaggcacatccccctggcccctggcagtgactggagggacctgcccaacatcgaggtgcggctgagtgatggcaccatggccaggaagctgcgctacacccaccacgacaggaagaatggccgcagcagcagcggggccctgcggggcgtgtgcagctgtgtggaggccggcaaggcctgtgaccctgctgcccggcagttcaacaccctcatcccctggtgcctgccccacactggaaacagacacaaccactgggccggcctgtatggccgcctggagtgggatggcttcttcagcaccaccgtgaccaaccctgagcccatgggcaagcagggccgggtgctgcaccctgagcagcaccgggtggtgtctgtgcgggagtgtgcccggagccagggcttcccagacacctaccgcctgtttggaaacatcctggacaagcaccggcaggtgggcaatgctgtgcccccacccctggccaaggccatcggcctggagatcaagctgtgcatgctggccaaggcccgggagagcgccagcgccaagatcaaggaggaggaggccgccaaggactag

SEQ ID NO: 150247 - DNA, 4899 bp, synthetic construct
  misc_feature 1..4899: note = Description of Artificial Sequence: Synthetic coding sequence
  source 1..4899: mol_type = other DNA
atgcctgccaggacagccccagcccgggtgcccaccctggccgtgcctgccatcagcctgcctgatgatgtgagaagaaggctgaaggacctggagcgggacagcctgacagagaaggaatgtgtgaaggagaagctgaacctgctgcacgagttcctgcagacagagatcaagaaccagctgtgtgacctggagaccaagctgaggaaggaggagctgtctgaggagggctacctggccaaggtgaagagcctgctgaacaaggacctgagcctggagaatggagcccacgcctacaaccgggaggtgaatggccgcctggagaatggaaaccaggcccggtctgaggcccggcgggtgggcatggctgatgccaacagcccccccaagcccctgagcaagcccaggaccccaagaagaagcaagagtgatggagaggccaagaggagccgggaccccccagccagcgccagccaggtgacaggcatccgggcagagcccagccccagcccccgcatcaccaggaagagcacccggcagaccaccatcaccagccactttgccaagggccctgccaagaggaagccccaggaggagagcgagcgggccaagagtgatgagagcatcaaggaggaggacaaggaccaggatgagaagagaagaagagtgaccagccgggagcgggtggcccggcccctgcctgctgaggagcctgagcgggccaagagcggcaccaggacagagaaggaggaggagagagatgagaaggaggagaagaggctgcggagccagaccaaggagcccacccccaagcagaagctgaaggaggagccagaccgggaggcccgggccggcgtgcaggctgatgaagatgaagatggagatgagaaggatgagaagaagcacaggagccagcccaaggacctggccgccaagagaagacctgaggagaaggagcctgagaaggtgaacccccagatcagtgatgagaaggatgaagatgagaaggaggagaagaggaggaagaccacccccaaggagcccacagagaagaagatggcccgggccaagacagtgatgaacagcaagacccacccccccaagtgcatccagtgtggccagtacctggatgatcctgacctgaagtatggccagcaccccccagatgctgtggatgagccccagatgctgaccaatgagaagctgagcatctttgatgccaatgaaagtggctttgagagctatgaggccctgccccagcacaagctgacctgcttctctgtgtactgcaagcacggccacctgtgccccatcgacaccggcctgattgagaagaacatcgagctgttcttcagcggcagcgccaagcccatctatgatgatgaccccagcctggagggcggcgtgaatggcaagaacctgggccccatcaatgagtggtggatcactggatttgatggaggagagaaggccctgattggcttcagcaccagctttgctgagtacatcctgatggaccccagcccagaatatgcccccatcttcggcctgatgcaggagaagatctacatcagcaagatcgtggtggagttcctgcagagcaacagcgacagcacctatgaagatctcatcaacaagattgagaccaccgtgccccccagcggcctgaacctgaaccgcttcacagaggacagcctgctgcggcatgcccagtttgtggtggagcaggtggagagctatgatgaagctggggacagtgatgagcagcccatcttcctgaccccctgcatgagggacctgatcaagctggccggcgtgaccctgggccagaggcgggcccaggcccggcggcagaccatccgccacagcacccgggagaaggaccggggccccaccaaggccaccaccaccaagctggtgtaccagatctttgacaccttctttgctgagcagatcgagaaggatgaccgggaggacaaggaaaatgccttcaagagaagaagatgtggggtgtgtgaggtgtgccagcagccagaatgtgggaagtgcaaggcctgcaaggacatggtgaagtttggaggcagcggccgcagcaagcaggcctgccaggagcggcgctgccccaacatggccatgaaggaggctgatgatgatgaggaggtggatgacaacatccctgagatgcccagccccaagaagatgcaccagggcaagaagaagaagcagaacaagaaccgcatctcctgggtgggggaggccgtgaagacagatggcaagaagagctactacaagaaggtgtgcattgatgctgagaccctggaggtgggggactgtgtgtctgtcatcccagatgacagcagcaagcccctgtacctggcccgggtgacagccctgtgggaggacagcagcaatggccagatgtttcatgcccactggttctgtgccggcacagacacagtgctgggcgccaccagtgaccccctggagctgttcctggtggatgaatgtgaggacatgcagctgagctacatccacagcaaggtgaaggtgatctacaaggcccccagcgagaactgggccatggagggcggcatggaccctgagagcctgctggagggagatgatggcaagacctacttctaccagctgtggtatgaccaggactatgccaggtttgagagcccccccaagacccagcccacagaggacaacaagttcaagttctgtgtgtcctgtgcccggctggccgagatgaggcagaaggagatcccccgggtgctggagcagctggaggacctggacagccgggtgctgtactacagcgccaccaagaatggcatcctgtacagagtgggagatggagtgtacctgcccccagaggccttcaccttcaacatcaagctgagcagccctgtgaagaggcccaggaaggagcctgtggatgaggacctgtacccagagcactacaggaagtacagcgactacatcaagggcagcaacctggatgcccctgagccctacagaattggccgcatcaaggagatcttctgccccaagaagagcaatggccggcccaatgaaacagacatcaagatccgggtgaacaagttctacagacctgagaacacccacaagagcaccccagccagctaccacgccgacatcaacctgctgtactggagcgatgaggaggccgtggtggacttcaaggctgtgcagggccgctgcaccgtggagtatggagaggacctgcctgaatgtgtgcaggtgtacagcatgggcggccccaaccgcttctacttcctggaggcctacaatgccaagagcaagagctttgaagatcctcccaaccacgcccggagccctggcaacaagggcaagggcaagggcaagggcaagggcaagcccaagagccaggcctgtgagcccagcgagcctgagattgagatcaagctgcccaagctgcggaccctggatgtgttcagcggctgcggcggcctgtctgagggcttccaccaggccggcatcagtgacaccctgtgggccatcgagatgtgggaccctgctgcccaggccttccggctgaacaaccctggcagcacagtgttcacagaggactgcaacatcctgctgaagctggtgatggccggggagaccaccaacagccggggccagaggctgccccagaagggagatgtggagatgctgtgtggcggccccccctgccagggcttcagcggcatgaaccgcttcaacagcaggacctacagcaagttcaagaacagcctggtggtgtccttcctgagctactgtgactactaccggccccgcttcttcctgctggagaatgtgaggaactttgtgtccttcaagaggtccatggtgctgaagctgaccctgcgctgcctggtgaggatgggctaccagtgcaccttcggcgtgctgcaggccggccagtatggagtggcccagaccaggagaagagccatcatcctggccgccgcccctggagagaagctgcccctcttccctgagcccctgcacgtgtttgccccccgggcctgccagctgtctgtggtggtggatgacaagaagtttgtgagcaacatcacccggctgagcagcggccccttccgcaccatcaccgtgcgggacaccatgtctgacctgcctgaggtgagaaatggagccagcgccctggagatctcctacaatggagagccccagagctggttccagaggcagctgcggggggcccagtaccagcccatcctgcgggaccacatctgcaaggacatgtctgccctggtggccgccaggatgaggcacatccccctggcccctggcagtgactggagggacctgcccaacatcgaggtgcggctgagtgatggcaccatggccaggaagctgcgctacacccaccacgacaggaagaatggccgcagcagcagcggggccctgcggggcgtgtgcagctgtgtggaggccggcaaggcctgtgaccctgctgcccggcagttcaacaccctcatcccctggtgcctgccccacactggaaacagacacaaccactgggccggcctgtatggccgcctggagtgggatggcttcttcagcaccaccgtgaccaaccctgagcccatgggcaagcagggccgggtgctgcaccctgagcagcaccgggtggtgtctgtgcgggagtgtgcccggagccagggcttcccagacacctaccgcctgtttggaaacatcctggacaagcaccggcaggtgggcaatgctgtgcccccacccctggccaaggccatcggcctggagatcaagctgtgcatgctggccaaggcccgggagagcgccagcgccaagatcaaggaggaggaggccgccaaggactag

SEQ ID NO: 150248 - DNA, 4860 bp, synthetic construct
  misc_feature 1..4860: note = Description of Artificial Sequence: Synthetic coding sequence
  source 1..4860: mol_type = other DNA
atgcctgccaggacagccccagcccgggtgcccaccctggccgtgcctgccatcagcctgcctgatgatgtgagaagaaggctgaaggacctggagcgggacagcctgacagagaaggaatgtgtgaaggagaagctgaacctgctgcacgagttcctgcagacagagatcaagaaccagctgtgtgacctggagaccaagctgaggaaggaggagctgtctgaggagggctacctggccaaggtgaagagcctgctgaacaaggacctgagcctggagaatggagcccacgcctacaaccgggaggtgaatggccgcctggagaatggaaaccaggcccggtctgaggcccggcgggtgggcatggctgatgccaacagcccccccaagcccctgagcaagcccaggaccccaagaagaagcaagagtgatggagaggccaagccagagcccagccccagcccccgcatcaccaggaagagcacccggcagaccaccatcaccagccactttgccaagggccctgccaagaggaagccccaggaggagagcgagcgggccaagagtgatgagagcatcaaggaggaggacaaggaccaggatgagaagagaagaagagtgaccagccgggagcgggtggcccggcccctgcctgctgaggagcctgagcgggccaagagcggcaccaggacagagaaggaggaggagagagatgagaaggaggagaagaggctgcggagccagaccaaggagcccacccccaagcagaagctgaaggaggagccagaccgggaggcccgggccggcgtgcaggctgatgaagatgaagatggagatgagaaggatgagaagaagcacaggagccagcccaaggacctggccgccaagagaagacctgaggagaaggagcctgagaaggtgaacccccagatcagtgatgagaaggatgaagatgagaaggaggagaagaggaggaagaccacccccaaggagcccacagagaagaagatggcccgggccaagacagtgatgaacagcaagacccacccccccaagtgcatccagtgtggccagtacctggatgatcctgacctgaagtatggccagcaccccccagatgctgtggatgagccccagatgctgaccaatgagaagctgagcatctttgatgccaatgaaagtggctttgagagctatgaggccctgccccagcacaagctgacctgcttctctgtgtactgcaagcacggccacctgtgccccatcgacaccggcctgattgagaagaacatcgagctgttcttcagcggcagcgccaagcccatctatgatgatgaccccagcctggagggcggcgtgaatggcaagaacctgggccccatcaatgagtggtggatcactggatttgatggaggagagaaggccctgattggcttcagcaccagctttgctgagtacatcctgatggaccccagcccagaatatgcccccatcttcggcctgatgcaggagaagatctacatcagcaagatcgtggtggagttcctgcagagcaacagcgacagcacctatgaagatctcatcaacaagattgagaccaccgtgccccccagcggcctgaacctgaaccgcttcacagaggacagcctgctgcggcatgcccagtttgtggtggagcaggtggagagctatgatgaagctggggacagtgatgagcagcccatcttcctgaccccctgcatgagggacctgatcaagctggccggcgtgaccctgggccagaggcgggcccaggcccggcggcagaccatccgccacagcacccgggagaaggaccggggccccaccaaggccaccaccaccaagctggtgtaccagatctttgacaccttctttgctgagcagatcgagaaggatgaccgggaggacaaggaaaatgccttcaagagaagaagatgtggggtgtgtgaggtgtgccagcagccagaatgtgggaagtgcaaggcctgcaaggacatggtgaagtttggaggcagcggccgcagcaagcaggcctgccaggagcggcgctgccccaacatggccatgaaggaggctgatgatgatgaggaggtggatgacaacatccctgagatgcccagccccaagaagatgcaccagggcaagaagaagaagcagaacaagaaccgcatctcctgggtgggggaggccgtgaagacagatggcaagaagagctactacaagaaggtgtgcattgatgctgagaccctggaggtgggggactgtgtgtctgtcatcccagatgacagcagcaagcccctgtacctggcccgggtgacagccctgtgggaggacagcagcaatggccagatgtttcatgcccactggttctgtgccggcacagacacagtgctgggcgccaccagtgaccccctggagctgttcctggtggatgaatgtgaggacatgcagctgagctacatccacagcaaggtgaaggtgatctacaaggcccccagcgagaactgggccatggagggcggcatggaccctgagagcctgctggagggagatgatggcaagacctacttctaccagctgtggtatgaccaggactatgccaggtttgagagcccccccaagacccagcccacagaggacaacaagttcaagttctgtgtgtcctgtgcccggctggccgagatgaggcagaaggagatcccccgggtgctggagcagctggaggacctggacagccgggtgctgtactacagcgccaccaagaatggcatcctgtacagagtgggagatggagtgtacctgcccccagaggccttcaccttcaacatcaagctgagcagccctgtgaagaggcccaggaaggagcctgtggatgaggacctgtacccagagcactacaggaagtacagcgactacatcaagggcagcaacctggatgcccctgagccctacagaattggccgcatcaaggagatcttctgccccaagaagagcaatggccggcccaatgaaacagacatcaagatccgggtgaacaagttctacagacctgagaacacccacaagagcaccccagccagctaccacgccgacatcaacctgctgtactggagcgatgaggaggccgtggtggacttcaaggctgtgcagggccgctgcaccgtggagtatggagaggacctgcctgaatgtgtgcaggtgtacagcatgggcggccccaaccgcttctacttcctggaggcctacaatgccaagagcaagagctttgaagatcctcccaaccacgcccggagccctggcaacaagggcaagggcaagggcaagggcaagggcaagcccaagagccaggcctgtgagcccagcgagcctgagattgagatcaagctgcccaagctgcggaccctggatgtgttcagcggctgcggcggcctgtctgagggcttccaccaggccggcatcagtgacaccctgtgggccatcgagatgtgggaccctgctgcccaggccttccggctgaacaaccctggcagcacagtgttcacagaggactgcaacatcctgctgaagctggtgatggccggggagaccaccaacagccggggccagaggctgccccagaagggagatgtggagatgctgtgtggcggccccccctgccagggcttcagcggcatgaaccgcttcaacagcaggacctacagcaagttcaagaacagcctggtggtgtccttcctgagctactgtgactactaccggccccgcttcttcctgctggagaatgtgaggaactttgtgtccttcaagaggtccatggtgctgaagctgaccctgcgctgcctggtgaggatgggctaccagtgcaccttcggcgtgctgcaggccggccagtatggagtggcccagaccaggagaagagccatcatcctggccgccgcccctggagagaagctgcccctcttccctgagcccctgcacgtgtttgccccccgggcctgccagctgtctgtggtggtggatgacaagaagtttgtgagcaacatcacccggctgagcagcggccccttccgcaccatcaccgtgcgggacaccatgtctgacctgcctgaggtgagaaatggagccagcgccctggagatctcctacaatggagagccccagagctggttccagaggcagctgcggggggcccagtaccagcccatcctgcgggaccacatctgcaaggacatgtctgccctggtggccgccaggatgaggcacatccccctggcccctggcagtgactggagggacctgcccaacatcgaggtgcggctgagtgatggcaccatggccaggaagctgcgctacacccaccacgacaggaagaatggccgcagcagcagcggggccctgcggggcgtgtgcagctgtgtggagggcggcagcagcggcaaggcctgtgaccctgctgcccggcagttcaacaccctcatcccctggtgcctgccccacacaggcaacagacacaaccactgggccggcctgtatggccgcctggagtgggatggcttcttcagcaccaccgtgaccaaccctgagcccatgggcaagcagggccgggtgctgcaccctgagcagcaccgggtggtgtctgtgagagaatgtgcccggagccagggcttcccagacacctaccgcctgtttggaaacatcctggacaagcaccggcaggtgggcaatgctgtgcccccacccctggccaaggccatcggcctggagatcaagctgtgcatgctggccaaggcccgggagagcgccagcgccaagatcaaggaggaggaggccgccaaggactag

SEQ ID NO: 150249 - DNA, 4455 bp, synthetic construct
  misc_feature 1..4455: note = Description of Artificial Sequence: Synthetic coding sequence
  source 1..4455: mol_type = other DNA
ggcagctgccacagccctgccagcgccagccaggtggccggcaccacagctgagcccagccccagcccccgcatcaccaggaagagcacccggcagaccaccatcaccagccactttgccaagggccctgccaagaggaagccccaggaggagagcgagcgggccaagagtgatgagagcatcaaggaggaggacaaggaccaggatgagaagagaagaagagtgaccagccgggagcgggtggcccggcccctgcctgctgaggagcctgagcgggccaagagcggcaccaggacagagaaggaggaggagagagatgagaaggaggagaagaggctgcggagccagaccaaggagcccacccccaagcagaagctgaaggaggagccagaccgggaggcccgggccggcgtgcaggctgatgaagatgaagatggagatgagaaggatgagaagaagcacaggagccagcccaaggacctggccgccaagagaagacctgaggagaaggagcctgagaaggtgaacccccagatcagtgatgagaaggatgaagatgagaaggaggagaagaggaggaagaccacccccaaggagcccacagagaagaagatggcccgggccaagacagtgatgaacagcaagacccacccccccaagtgcatccagtgtggccagtacctggatgatcctgacctgaagtatggccagcaccccccagatgctgtggatgagccccagatgctgaccaatgagaagctgagcatctttgatgccaatgaaagtggctttgagagctatgaggccctgccccagcacaagctgacctgcttctctgtgtactgcaagcacggccacctgtgccccatcgacaccggcctgattgagaagaacatcgagctgttcttcagcggcagcgccaagcccatctatgatgatgaccccagcctggagggcggcgtgaatggcaagaacctgggccccatcaatgagtggtggatcactggatttgatggaggagagaaggccctgattggcttcagcaccagctttgctgagtacatcctgatggaccccagcccagaatatgcccccatcttcggcctgatgcaggagaagatctacatcagcaagatcgtggtggagttcctgcagagcaacagcgacagcacctatgaagatctcatcaacaagattgagaccaccgtgccccccagcggcctgaacctgaaccgcttcacagaggacagcctgctgcggcatgcccagtttgtggtggagcaggtggagagctatgatgaagctggggacagtgatgagcagcccatcttcctgaccccctgcatgagggacctgatcaagctggccggcgtgaccctgggccagaggcgggcccaggcccggcggcagaccatccgccacagcacccgggagaaggaccggggccccaccaaggccaccaccaccaagctggtgtaccagatctttgacaccttctttgctgagcagatcgagaaggatgaccgggaggacaaggaaaatgccttcaagagaagaagatgtggggtgtgtgaggtgtgccagcagccagaatgtgggaagtgcaaggcctgcaaggacatggtgaagtttggaggcagcggccgcagcaagcaggcctgccaggagcggcgctgccccaacatggccatgaaggaggctgatgatgatgaggaggtggatgacaacatccctgagatgcccagccccaagaagatgcaccagggcaagaagaagaagcagaacaagaaccgcatctcctgggtgggggaggccgtgaagacagatggcaagaagagctactacaagaaggtgtgcattgatgctgagaccctggaggtgggggactgtgtgtctgtcatcccagatgacagcagcaagcccctgtacctggcccgggtgacagccctgtgggaggacagcagcaatggccagatgtttcatgcccactggttctgtgccggcacagacacagtgctgggcgccaccagtgaccccctggagctgttcctggtggatgaatgtgaggacatgcagctgagctacatccacagcaaggtgaaggtgatctacaaggcccccagcgagaactgggccatggagggcggcatggaccctgagagcctgctggagggagatgatggcaagacctacttctaccagctgtggtatgaccaggactatgccaggtttgagagcccccccaagacccagcccacagaggacaacaagttcaagttctgtgtgtcctgtgcccggctggccgagatgaggcagaaggagatcccccgggtgctggagcagctggaggacctggacagccgggtgctgtactacagcgccaccaagaatggcatcctgtacagagtgggagatggagtgtacctgcccccagaggccttcaccttcaacatcaagctgagcagccctgtgaagaggcccaggaaggagcctgtggatgaggacctgtacccagagcactacaggaagtacagcgactacatcaagggcagcaacctggatgcccctgagccctacagaattggccgcatcaaggagatcttctgccccaagaagagcaatggccggcccaatgaaacagacatcaagatccgggtgaacaagttctacagacctgagaacacccacaagagcaccccagccagctaccacgccgacatcaacctgctgtactggagcgatgaggaggccgtggtggacttcaaggctgtgcagggccgctgcaccgtggagtatggagaggacctgcctgaatgtgtgcaggtgtacagcatgggcggccccaaccgcttctacttcctggaggcctacaatgccaagagcaagagctttgaagatcctcccaaccacgcccggagccctggcaacaagggcaagggcaagggcaagggcaagggcaagcccaagagccaggcctgtgagcccagcgagcctgagattgagatcaagctgcccaagctgcggaccctggatgtgttcagcggctgcggcggcctgtctgagggcttccaccaggccggcatcagtgacaccctgtgggccatcgagatgtgggaccctgctgcccaggccttccggctgaacaaccctggcagcacagtgttcacagaggactgcaacatcctgctgaagctggtgatggccggggagaccaccaacagccggggccagaggctgccccagaagggagatgtggagatgctgtgtggcggccccccctgccagggcttcagcggcatgaaccgcttcaacagcaggacctacagcaagttcaagaacagcctggtggtgtccttcctgagctactgtgactactaccggccccgcttcttcctgctggagaatgtgaggaactttgtgtccttcaagaggtccatggtgctgaagctgaccctgcgctgcctggtgaggatgggctaccagtgcaccttcggcgtgctgcaggccggccagtatggagtggcccagaccaggagaagagccatcatcctggccgccgcccctggagagaagctgcccctcttccctgagcccctgcacgtgtttgccccccgggcctgccagctgtctgtggtggtggatgacaagaagtttgtgagcaacatcacccggctgagcagcggccccttccgcaccatcaccgtgcgggacaccatgtctgacctgcctgaggtgagaaatggagccagcgccctggagatctcctacaatggagagccccagagctggttccagaggcagctgcggggggcccagtaccagcccatcctgcgggaccacatctgcaaggacatgtctgccctggtggccgccaggatgaggcacatccccctggcccctggcagtgactggagggacctgcccaacatcgaggtgcggctgagtgatggcaccatggccaggaagctgcgctacacccaccacgacaggaagaatggccgcagcagcagcggggccctgcggggcgtgtgcagctgtgtggaggccggcaaggcctgtgaccctgctgcccggcagttcaacaccctcatcccctggtgcctgccccacactggaaacagacacaaccactgggccggcctgtatggccgcctggagtgggatggcttcttcagcaccaccgtgaccaaccctgagcccatgggcaagcagggccgggtgctgcaccctgagcagcaccgggtggtgtctgtgcgggagtgtgcccggagccagggcttcccagacacctaccgcctgtttggaaacatcctggacaagcaccggcaggtgggcaatgctgtgcccccacccctggccaaggccatcggcctggagatcaagctgtgcatgctggccaaggcccgggagagcgccagcgccaagatcaaggaggaggaggccgccaaggactag

SEQ ID NO: 150250 - DNA, 2739 bp, synthetic construct
  misc_feature 1..2739: note = Description of Artificial Sequence: Synthetic coding sequence
  source 1..2739: mol_type = other DNA
atgcctgccatgcccagcagcggccctggggacaccagcagcagcgctgctgagcgggaggaggacaggaaggatggagaggagcaggaggagccccggggcaaggaggagcggcaggagcccagcaccacagccaggaaggtgggccggcccggcaggaagaggaagcacccccctgtggagagcggggacacccccaaggaccctgctgtgatcagcaagagccccagcatggcccaggacagcggggccagcgagctgctgcccaacggggacctggagaagaggtctgagccccagcctgaggagggcagccctgctgggggccagaagggcggggccccagctgagggggagggcgctgctgagaccctgcctgaggccagcagagctgtggagaatggctgctgcacccccaaggagggccgcggggccccagctgaggccggcaaggagcagaaggagaccaacatcgagagcatgaagatggagggcagccggggccgcctgcggggcggcctgggctgggagagcagcctgcggcagaggcccatgccccggctgaccttccaggccggggacccctactacatcagcaagaggaagagagatgagtggctggcccgctggaagcgggaggccgagaagaaggccaaggtgattgctggcatgaatgctgtggaggagaaccagggccctggagagagccagaaggtggaggaggccagccccccagctgtgcagcagcccacagatcctgccagccccaccgtggccaccaccccagagcctgtgggcagtgatgctggggacaagaatgccaccaaggctggagatgatgagccagaatatgaagatggccggggcttcggcatcggggagctggtgtggggcaagctgcggggcttctcctggtggccaggccgcatcgtgtcctggtggatgacaggccgcagcagagctgctgagggcacccgctgggtgatgtggtttggagatggcaagttctctgtggtgtgtgtggagaagctgatgcccctgagcagcttctgcagcgccttccaccaggccacctacaacaagcagcccatgtacaggaaggccatctatgaggtgctgcaggtggccagcagccgggccggcaagctgtttcctgtgtgccacgacagtgatgaaagtgacacagccaaggctgtggaggtgcagaacaagcccatgattgagtgggccctgggcggcttccagcccagcggccccaagggcctggagcccccagaggaggagaagaacccctacaaggaggtgtacacagacatgtgggtggagcctgaggccgccgcctatgcccctcctcctccagccaagaagcccaggaagagcacagctgagaagcccaaggtgaaggagatcattgatgagaggacccgggagcggctggtgtatgaggtgcggcagaagtgcaggaacatcgaggacatctgcatcagctgtggcagcctgaatgtgaccctggagcaccccctgtttgtgggcggcatgtgccagaactgcaagaactgcttcctggagtgtgcctaccagtatgatgatgatggctaccagagctactgcaccatctgctgcggcggccgggaggtgctgatgtgtggcaacaacaactgctgccgctgcttctgtgtggagtgtgtggacctgctggtgggccctggagctgcccaggccgccatcaaggaggacccctggaactgctacatgtgtggccacaagggcacctacggcctgctgcggcggcgggaggactggcccagccggctgcagatgttctttgccaacaaccacgaccaggagtttgatcctcccaaggtgtacccacctgtgcctgctgagaagaggaagcccatccgggtgctgagcctgtttgatggcatcgccaccggcctgctggtgctgaaggacctgggcatccaggtggaccgctacatcgccagcgaggtgtgtgaagattccatcaccgtgggcatggtgcgccaccagggcaagatcatgtatgtgggagatgtgcgctctgtgacccagaagcacatccaggagtggggcccctttgacctggtgattggaggcagcccctgcaatgacctgagcatcgtgaacccagccaggaagggcctgtatgagggcaccggccgcctcttctttgagttctaccgcctgctgcatgatgcccggcccaaggagggagatgaccggcccttcttctggctgtttgaaaatgtggtggccatgggcgtgtctgacaagagggacatcagccgcttcctggagagcaaccctgtgatgattgatgccaaggaggtgtctgctgcccaccgggcccgctacttctggggcaacctgcccggcatgaaccggcccctggccagcacagtgaatgacaagctggagctgcaggagtgcctggagcacggccgcatcgccaagttcagcaaggtgaggaccatcaccaccaggagcaacagcatcaagcagggcaaggaccagcacttccctgtgttcatgaatgagaaggaggacatcctgtggtgcacagagatggagcgggtgtttggcttccctgtgcactacacagatgtgagcaacatgagccggctggcccggcagaggctgctgggccgctcctggagcgtgcctgtgatccgccacctgtttgcccccctgaaggagtactttgcctgtgtgtag

SEQ ID NO: 150251 - DNA, 2739 bp, synthetic construct; identical to SEQ ID NO: 150250
  misc_feature 1..2739: note = Description of Artificial Sequence: Synthetic coding sequence
  source 1..2739: mol_type = other DNA

SEQ ID NO: 150252 - DNA, 2172 bp, synthetic construct
  misc_feature 1..2172: note = Description of Artificial Sequence: Synthetic coding sequence
  source 1..2172: mol_type = other DNA
atgggcatcctggagcgggtggtgagaagaaatggccgggtggacaggagcctgaaggatgaatgtgacacagctgagaagaaggccaaggtgattgctggcatgaatgctgtggaggagaaccagggccctggagagagccagaaggtggaggaggccagccccccagctgtgcagcagcccacagatcctgccagccccaccgtggccaccaccccagagcctgtgggcagtgatgctggggacaagaatgccaccaaggctggagatgatgagccagaatatgaagatggccggggctttggaattggagagctggtgtggggcaagctgcggggcttctcctggtggccaggaagaattgtgtcctggtggatgacaggccgcagcagagctgctgagggcacccgctgggtgatgtggtttggagatggcaagttctctgtggtgtgtgtggagaagctgatgcccctgagcagcttctgcagcgccttccaccaggccacctacaacaagcagcccatgtacaggaaggccatctatgaggtgctgcaggtggccagcagcagagctgggaagctgtttcctgtgtgccacgacagtgatgaaagtgacacagccaaggctgtggaggtgcagaacaagcccatgattgagtgggccctgggcggcttccagcccagcggccccaagggcctggagcccccagaggaggagaagaacccctacaaggaggtgtacacagacatgtgggtggagcctgaggccgccgcctatgcccctcctcctccagccaagaagcccaggaagagcacagctgagaagcccaaggtgaaggagatcattgatgagaggacccgggagcggctggtgtatgaggtgcggcagaagtgcagaaatattgaggacatctgcatcagctgtggcagcctgaatgtgaccctggagcaccccctgtttgtgggcggcatgtgccagaactgcaagaactgcttcctggagtgtgcctaccagtatgatgatgatggctaccagagctactgcaccatctgctgcggcggccgggaggtgctgatgtgtggcaacaacaactgctgccgctgcttctgtgtggagtgtgtggacctgctggtgggccctggggccgcccaggccgccatcaaggaggacccctggaactgctacatgtgtggccacaagggcacctacggcctgctgcggcggcgggaggactggcccagccggctgcagatgttctttgccaacaaccacgaccaggagtttgacccccccaaggtgtacccacctgtgcctgctgagaagaggaagcccatccgggtgctgagcctgtttgatggcatcgccaccggcctgctggtgctgaaggacctgggcatccaggtggaccgctacatcgccagcgaggtgtgtgaggacagcatcaccgtgggcatggtgcgccaccagggcaagatcatgtatgtgggagatgtgcgctctgtgacccagaagcacatccaggagtggggcccctttgacctggtgattggaggcagcccctgcaatgacctgagcatcgtgaacccagccaggaagggcctgtatgagggcaccggccgcctcttctttgagttctaccgcctgctgcatgatgcccggcccaaggagggagatgaccggcccttcttctggctgtttgaaaatgtggtggccatgggcgtgtctgacaagagggacatcagccgcttcctggagagcaaccctgtgatgattgatgccaaggaggtgtctgctgcccaccgggcccgctacttctggggcaacctgcccggcatgaaccggcccctggccagcacagtgaatgacaagctggagctgcaggagtgcctggagcacggcagaattgccaagttcagcaaggtgaggaccatcaccaccaggagcaacagcatcaagcagggcaaggaccagcacttccctgtgttcatgaatgagaaggaggacatcctgtggtgcacagagatggagcgggtgtttggcttccctgtgcactacacagatgtgagcaacatgagccggctggcccggcagaggctgctgggccgctcctggagcgtgcctgtgatccgccacctgtttgcccccctgaaggagtactttgcctgtgtgtag

SEQ ID NO: 150253 - DNA, 2070 bp, synthetic construct
  misc_feature 1..2070: note = Description of Artificial Sequence: Synthetic coding sequence
  source 1..2070: mol_type = other DNA
atgaatgctgtggaggagaaccagggccctggagagagccagaaggtggaggaggccagccccccagctgtgcagcagcccacagatcctgccagccccaccgtggccaccaccccagagcctgtgggcagtgatgctggggacaagaatgccaccaaggctggagatgatgagccagaatatgaagatggccggggctttggaattggagagctggtgtggggcaagctgcggggcttctcctggtggccaggaagaattgtgtcctggtggatgacaggccgcagcagagctgctgagggcacccgctgggtgatgtggtttggagatggcaagttctctgtggtgtgtgtggagaagctgatgcccctgagcagcttctgcagcgccttccaccaggccacctacaacaagcagcccatgtacaggaaggccatctatgaggtgctgcaggtggccagcagcagagctgggaagctgtttcctgtgtgccacgacagtgatgaaagtgacacagccaaggctgtggaggtgcagaacaagcccatgattgagtgggccctgggcggcttccagcccagcggccccaagggcctggagcccccagaggaggagaagaacccctacaaggaggtgtacacagacatgtgggtggagcctgaggccgccgcctatgcccctcctcctccagccaagaagcccaggaagagcacagctgagaagcccaaggtgaaggagatcattgatgagaggacccgggagcggctggtgtatgaggtgcggcagaagtgcagaaatattgaggacatctgcatcagctgtggcagcctgaatgtgaccctggagcaccccctgtttgtgggcggcatgtgccagaactgcaagaactgcttcctggagtgtgcctaccagtatgatgatgatggctaccagagctactgcaccatctgctgcggcggccgggaggtgctgatgtgtggcaacaacaactgctgccgctgcttctgtgtggagtgtgtggacctgctggtgggccctggggccgcccaggccgccatcaaggaggacccctggaactgctacatgtgtggccacaagggcacctacggcctgctgcggcggcgggaggactggcccagccggctgcagatgttctttgccaacaaccacgaccaggagtttgacccccccaaggtgtacccacctgtgcctgctgagaagaggaagcccatccgggtgctgagcctgtttgatggcatcgccaccggcctgctggtgctgaaggacctgggcatccaggtggaccgctacatcgccagcgaggtgtgtgaggacagcatcaccgtgggcatggtgcgccaccagggcaagatcatgtatgtgggagatgtgcgctctgtgacccagaagcacatccaggagtggggcccctttgacctggtgattggaggcagcccctgcaatgacctgagcatcgtgaacccagccaggaagggcctgtatgagggcaccggccgcctcttctttgagttctaccgcctgctgcatgatgcccggcccaaggagggagatgaccggcccttcttctggctgtttgaaaatgtggtggccatgggcgtgtctgacaagagggacatcagccgcttcctggagagcaaccctgtgatgattgatgccaaggaggtgtctgctgcccaccgggcccgctacttctggggcaacctgcccggcatgaaccggcccctggccagcacagtgaatgacaagctggagctgcaggagtgcctggagcacggcagaattgccaagttcagcaaggtgaggaccatcaccaccaggagcaacagcatcaagcagggcaaggaccagcacttccctgtgttcatgaatgagaaggaggacatcctgtggtgcacagagatggagcgggtgtttggcttccctgtgcactacacagatgtgagcaacatgagccggctggcccggcagaggctgctgggccgctcctggagcgtgcctgtgatccgccacctgtttgcccccctgaaggagtactttgcctgtgtgtag

SEQ ID NO: 150254 - DNA, 501 bp, synthetic construct
  misc_feature 1..501: note = Description of Artificial Sequence: Synthetic coding sequence
  source 1..501: mol_type = other DNA
atgcctgccatgcccagcagcggccctggggacaccagcagcagcgctgctgagcgggaggaggacaggaaggatggagaggagcaggaggagccccggggcaaggaggagcggcaggagcccagcaccacagccaggaaggtgggccggcccggcaggaagaggaagcacccccctgtggagagcggggacacccccaaggaccctgctgtgatcagcaagagccccagcatggcccaggacagcggggccagcgagctgctgcccaacggggacctggagaagaggtctgagccccagcctgaggagggcagccctgctgggggccagaagggcggggccccagctgagggggagggcgctgctgagaccctgcctgaggccagcagagctgtggagaatggctgctgcacccccaaggagggccgcggggccccagctgaggccggggagagcagcgcccctggagctgccagcagcggccccaccagcatcccctag

SEQ ID NO: 150255 - DNA, 2538 bp, synthetic construct
  misc_feature 1..2538: note = Description of Artificial Sequence: Synthetic coding sequence
  source 1..2538: mol_type = other DNA
atggagcccagccctgagccccccagcctggagagcatgaagggggacaccaggcacctgaatggagaggaggatgctgggggccgggaggacagcatcctggtgaatggagcctgcagcgaccagagcagtgacagcccccccatcctggaggccatccgcaccccagagatccggggcagaagaagcagcagccggctgagcaagcgggaggtgagcagcctgctgagctacacccaggacctgactggagatggagatggagaagatggagatggcagtgacacccctgtgatgcccaagctgttccgggagaccaggaccaggtctgagagccctgctgtgaggaccaggaacaacaacagcgtgagcagccgggagcggcaccggcccagccccaggagcacccggggccggcagggcaggaaccacgtggatgagagccctgtggagttccctgccaccaggagcctgcggcggcgggccacagccagcgctggcaccccctggcccagcccccccagcagctacctgaccatcgacctgacagatgacacagaggacacccacggcaccccccagagcagcagcaccccctatgcccggctggcccaggacagccagcagggcggcatggagagcccccaggtggaggccgacagcggagatggagacagcagcgagtaccaggacggcaaggagtttggaattggagacctggtgtggggcaagatcaagggcttctcctggtggccagccatggtggtgtcctggaaggccaccagcaagaggcaggccatgagcggcatgcgctgggtgcagtggtttggagatggcaagttcagcgaggtgtctgctgacaagctggtggccctgggcctcttcagccagcacttcaacctggccaccttcaacaagctggtgtcctacaggaaggccatgtaccacgccctggagaaggcccgggtgcgggccggcaagaccttccccagcagccctggggacagcctggaggaccagctgaagcccatgctggagtgggcccatggaggcttcaagcccactggaattgagggcctgaagcccaacaacacccagcctgagaacaagaccaggagaagaacagcagatgattctgccaccagtgactactgcccagcccccaagaggctgaagaccaactgctacaacaacgggaaggacagaggagatgaggaccagagccgggagcagatggccagtgatgtggccaacaacaagagcagcctggaggatggctgcctgagctgtggcaggaagaaccctgtgtccttccaccccctgtttgagggcggcctgtgccagacctgccgggaccgcttcctggagctgttctacatgtatgatgatgatggctaccagagctactgcaccgtgtgctgtgagggccgggagctgctgctgtgcagcaacaccagctgctgccgctgcttctgtgtggagtgcctggaggtgctggtgggcaccggcacagctgctgaggccaagctgcaggagccctggagctgctacatgtgcctgccccagcgctgccacggcgtgctgcggcggaggaaggactggaatgtgcggctgcaggccttcttcaccagtgacaccggcctggagtatgaggcccccaagctgtacccagccatcccagctgcccggcggcggcccatccgggtgctgagcctgtttgatggcatcgccaccggctacctggtgctgaaggagctgggcatcaaggtgggcaagtatgtggccagcgaggtgtgtgaggagagcattgctgtgggcaccgtgaagcatgagggcaacatcaagtatgtgaatgatgtgaggaacatcaccaagaagaacatcgaggagtggggcccctttgacctggtgattggaggcagcccctgcaatgacctgagcaatgtgaacccagccaggaagggcctgtatgagggcaccggccgcctcttctttgagttctaccacctgctgaactacagccggcccaaggagggagatgaccggcccttcttctggatgtttgaaaatgtggtggccatgaaggtgggggacaagagggacatcagccgcttcctggagtgcaaccctgtgatgattgatgccatcaaggtgtctgctgcccaccgggcccgctacttctggggcaacctgcccggcatgaacagacctgtgattgccagcaagaatgacaagctggagctgcaggactgcctggagtacaacagaattgccaagctgaagaaggtgcagaccatcaccaccaagagcaacagcatcaagcagggcaagaaccagctgtttcctgtggtgatgaatggcaaggaggatgtgctgtggtgcacagagctggagcgcatcttcggcttccctgtgcactacacagatgtgagcaacatgggccgcggggcccggcagaagctgctgggccgctcctggagcgtgcctgtgatccgccacctgtttgcccccctgaaggactactttgcctgtgagtag

SEQ ID NO: 150256 - DNA, 2562 bp, synthetic construct
  misc_feature 1..2562: note = Description of Artificial Sequence: Synthetic coding sequence
  source 1..2562: mol_type = other DNA
atgaagggggacaccaggcacctgaatggagaggaggatgctgggggccgggaggacagcatcctggtgaatggagcctgcagcgaccagagcagtgacagcccccccatcctggaggccatccgcaccccagagatccggggcagaagaagcagcagccggctgagcaagcgggaggtgagcagcctgctgagctacacccaggacctgactggagatggagatggagaagatggagatggcagtgacacccctgtgatgcccaagctgttccgggagaccaggaccaggtctgagagccctgctgtgaggaccaggaacaacaacagcgtgagcagccgggagcggcaccggcccagccccaggagcacccggggccggcagggcaggaaccacgtggatgagagccctgtggagttccctgccaccaggagcctgcggcggcgggccacagccagcgctggcaccccctggcccagcccccccagcagctacctgaccatcgacctgacagatgacacagaggacacccacggcaccccccagagcagcagcaccccctatgcccggctggcccaggacagccagcagggcggcatggagagcccccaggtggaggccgacagcggagatggagacagcagcgagtaccaggacggcaaggagtttggaattggagacctggtgtggggcaagatcaagggcttctcctggtggccagccatggtggtgtcctggaaggccaccagcaagaggcaggccatgagcggcatgcgctgggtgcagtggtttggagatggcaagttcagcgaggtgtctgctgacaagctggtggccctgggcctcttcagccagcacttcaacctggccaccttcaacaagctggtgtcctacaggaaggccatgtaccacgccctggagaaggcccgggtgcgggccggcaagaccttccccagcagccctggggacagcctggaggaccagctgaagcccatgctggagtgggcccatggaggcttcaagcccactggaattgagggcctgaagcccaacaacacccagcctgtggtgaacaagagcaaggtgagaagagctggcagcaggaagctggagagcaggaaatatgagaacaagaccaggagaagaacagcagatgattctgccaccagtgactactgcccagcccccaagaggctgaagaccaactgctacaacaacgggaaggacagaggagatgaggaccagagccgggagcagatggccagtgatgtggccaacaacaagagcagcctggaggatggctgcctgagctgtggcaggaagaaccctgtgtccttccaccccctgtttgagggcggcctgtgccagacctgccgggaccgcttcctggagctgttctacatgtatgatgatgatggctaccagagctactgcaccgtgtgctgtgagggccgggagctgctgctgtgcagcaacaccagctgctgccgctgcttctgtgtggagtgcctggaggtgctggtgggcaccggcacagctgctgaggccaagctgcaggagccctggagctgctacatgtgcctgccccagcgctgccacggcgtgctgcggcggaggaaggactggaatgtgcggctgcaggccttcttcaccagtgacaccggcctggagtatgaggcccccaagctgtacccagccatcccagctgcccggcggcggcccatccgggtgctgagcctgtttgatggcatcgccaccggctacctggtgctgaaggagctgggcatcaaggtgggcaagtatgtggccagcgaggtgtgtgaggagagcattgctgtgggcaccgtgaagcatgagggcaacatcaagtatgtgaatgatgtgaggaacatcaccaagaagaacatcgaggagtggggcccctttgacctggtgattggaggcagcccctgcaatgacctgagcaatgtgaacccagccaggaagggcctgtatgagggcaccggccgcctcttctttgagttctaccacctgctgaactacagccggcccaaggagggagatgaccggcccttcttctggatgtttgaaaatgtggtggccatgaaggtgggggacaagagggacatcagccgcttcctggagtgcaaccctgtgatgattgatgccatcaaggtgtctgctgcccaccgggcccgctacttctggggcaacctgcccggcatgaacagacctgtgattgccagcaagaatgacaagctggagctgcaggactgcctggagtacaacagaattgccaagctgaagaaggtgcagaccatcaccaccaagagcaacagcatcaagcagggcaagaaccagctgtttcctgtggtgatgaatggcaaggaggatgtgctgtggtgcacagagctggagcgcatcttcggcttccctgtgcactacacagatgtgagcaacatgggccgcggggcccggcagaagctgctgggccgctcctggagcgtgcctgtgatccgccacctgtttgcccccctgaaggactactttgcctgtgagtag

SEQ ID NO: 150257 - DNA, 2379 bp, synthetic construct
  misc_feature 1..2379: note = Description of Artificial Sequence: Synthetic coding sequence
  source 1..2379: mol_type = other DNA
atgaagggggacaccaggcacctgaatggagaggaggatgctgggggccgggaggacagcatcctggtgaatggagcctgcagcgaccagagcagtgacagcccccccatcctggaggccatccgcaccccagagatccggggcagaagaagcagcagccggctgagcaagcgggaggtgagcagcctgctgagctacacccaggacctgactggagatggagatggagaagatggagatggcagtgacacccctgtgatgcccaagctgttccgggagaccaggaccaggtctgagagccctgctgtgaggaccaggaacaacaacagcgtgagcagccgggagcggcaccggcccagccccaggagcacccggggccggcagggcaggaaccacgtggatgagagccctgtggagttccctgccaccaggagcctgcggcggcgggccacagccagcgctggcaccccctggcccagcccccccagcagctacctgaccatcgacctgacagatgacacagaggacacccacggcaccccccagagcagcagcaccccctatgcccggctggcccaggacagccagcagggcggcatggagagcccccaggtggaggccgacagcggagatggagacagcagcgagtaccaggacggcaaggagtttggaattggagacctggtgtggggcaagatcaagggcttctcctggtggccagccatggtggtgtcctggaaggccaccagcaagaggcaggccatgagcggcatgcgctgggtgcagtggtttggagatggcaagttcagcgaggtgtctgctgacaagctggtggccctgggcctcttcagccagcacttcaacctggccaccttcaacaagctggtgtcctacaggaaggccatgtaccacgccctggagaaggcccgggtgcgggccggcaagaccttccccagcagccctggggacagcctggaggaccagctgaagcccatgctggagtgggcccatggaggcttcaagcccactggaattgagggcctgaagcccaacaacacccagcctgagaacaagaccaggagaagaacagcagatgattctgccaccagtgactactgcccagcccccaagaggctgaagaccaactgctacaacaacgggaaggacagaggagatgaggaccagagccgggagcagatggccagtgatgtggccaacaacaagagcagcctggaggatggctgcctgagctgtggcaggaagaaccctgtgtccttccaccccctgtttgagggcggcctgtgccagacctgccgggaccgcttcctggagctgttctacatgtatgatgatgatggctaccagagctactgcaccgtgtgctgtgagggccgggagctgctgctgtgcagcaacaccagctgctgccgctgcttctgtgtggagtgcctggaggtgctggtgggcaccggcacagctgctgaggccaagctgcaggagccctggagctgctacatgtgcctgccccagcgctgccacggcgtgctgcggcggaggaaggactggaatgtgcggctgcaggccttcttcaccagtgacaccggcctggagtatgaggcccccaagctgtacccagccatcccagctgcccggcggcggcccatccgggtgctgagcctgtttgatggcatcgccaccggctacctggtgctgaaggagctgggcatcaaggtgggcaagtatgtggccagcgaggtgtgtgaggagagcattgctgtgggcaccgtgaagcatgagggcaacatcaagtatgtgaatgatgtgaggaacatcaccaagaagaacatcgaggagtggggcccctttgacctggtgattggaggcagcccctgcaatgacctgagcaatgtgaacccagccaggaagggcctgtatgagggcaccggccgcctcttctttgagttctaccacctgctgaactacagccggcccaaggagggagatgaccggcccttcttctggatgtttgaaaatgtggtggccatgaaggtgggggacaagagggacatcagccgcttcctggagtgcaaccctgtgatgattgatgccatcaaggtgtctgctgcccaccgggcccgctacttctggggcaacctgcccggcatgaacagacctgtgattgccagcaagaatgacaagctggagctgcaggactgcctggagtacaacagaattgccaaggacctgtggctgagctgtgccctgcacagaagagtgcagcacggcccctggtgccccccagaggccgccggcaaggtgctggagcgggcctgccaccccacccccctgcggcccagcgagggcctgctgtgcatgtag

SEQ ID NO: 150258 - DNA, 2313 bp, synthetic construct
  misc_feature 1..2313: note = Description of Artificial Sequence: Synthetic coding sequence
  source 1..2313: mol_type = other DNA
atgaagggggacaccaggcacctgaatggagaggaggatgctgggggccgggaggacagcatcctggtgaatggagcctgcagcgaccagagcagtgacagcccccccatcctggaggccatccgcaccccagagatccggggcagaagaagcagcagccggctgagcaagcgggaggtgagcagcctgctgagctacacccaggacctgactggagatggagatggagaagatggagatggcagtgacacccctgtgatgcccaagctgttccgggagaccaggaccaggtctgagagccctgctgtgaggaccaggaacaacaacagcgtgagcagccgggagcggcaccggcccagccccaggagcacccggggccggcagggcaggaaccacgtggatgagagccctgtggagttccctgccaccaggagcctgcggcggcgggccacagccagcgctggcaccccctggcccagcccccccagcagctacctgaccatcgacctgacagatgacacagaggacacccacggcaccccccagagcagcagcaccccctatgcccggctggcccaggacagccagcagggcggcatggagagcccccaggtggaggccgacagcggagatggagacagcagcgagtaccaggacggcaaggagtttggaattggagacctggtgtggggcaagatcaagggcttctcctggtggccagccatggtggtgtcctggaaggccaccagcaagaggcaggccatgagcggcatgcgctgggtgcagtggtttggagatggcaagttcagcgaggtgtctgctgacaagctggtggccctgggcctcttcagccagcacttcaacctggccaccttcaacaagctggtgtcctacaggaaggccatgtaccacgccctggagaaggcccgggtgcgggccggcaagaccttccccagcagccctggggacagcctggaggaccagctgaagcccatgctggagtgggcccatggaggcttcaagcccactggaattgagggcctgaagcccaacaacacccagcctgagaacaagaccaggagaagaacagcagatgattctgccaccagtgactactgcccagcccccaagaggctgaagaccaactgctacaacaacgggaaggacagaggagatgaggaccagagccgggagcagatggccagtgatgtggccaacaacaagagcagcctggaggatggctgcctgagctgtggcaggaagaaccctgtgtccttccaccccctgtttgagggcggcctgtgccagacctgccgggaccgcttcctggagctgttctacatgtatgatgatgatggctaccagagctactgcaccgtgtgctgtgagggccgggagctgctgctgtgcagcaacaccagctgctgccgctgcttctgtgtggagtgcctggaggtgctggtgggcaccggcacagctgctgaggccaagctgcaggagccctggagctgctacatgtgcctgccccagcgctgccacggcgtgctgcggcggaggaaggactggaatgtgcggctgcaggccttcttcaccagtgacaccggcctggagtatgaggcccccaagctgtacccagccatcccagctgcccggcggcggcccatccgggtgctgagcctgtttgatggcatcgccaccggctacctggtgctgaaggagctgggcatcaaggtgggcaagtatgtggccagcgaggtgtgtgaggagagcattgctgtgggcaccgtgaagcatgagggcaacatcaagtatgtgaatgatgtgaggaacatcaccaagaagaacatcgaggagtggggcccctttgacctggtgattggaggcagcccctgcaatgacctgagcaatgtgaacccagccaggaagggcctgtatgagggcaccggccgcctcttctttgagttctaccacctgctgaactacagccggcccaaggagggagatgaccggcccttcttctggatgtttgaaaatgtggtggccatgaaggtgggggacaagagggacatcagccgcttcctggagtgcaaccctgtgatgattgatgccatcaaggtgtctgctgcccaccgggcccgctacttctggggcaacctgcccggcatgaaccgcatcttcggcttccctgtgcactacacagatgtgagcaacatgggccgcggggcccggcagaagctgctgggccgctcctggagcgtgcctgtgatccgccacctgtttgcccccctgaaggactactttgcctgtgagtag

SEQ ID NO: 150259 - DNA, 2502 bp, synthetic construct
  misc_feature 1..2502: note = Description of Artificial Sequence: Synthetic coding sequence
  source 1..2502: mol_type = other DNA
atgaagggggacaccaggcacctgaatggagaggaggatgctgggggccgggaggacagcatcctggtgaatggagcctgcagcgaccagagcagtgacagcccccccatcctggaggccatccgcaccccagagatccggggcagaagaagcagcagccggctgagcaagcgggaggtgagcagcctgctgagctacacccaggacctgactggagatggagatggagaagatggagatggcagtgacacccctgtgatgcccaagctgttccgggagaccaggaccaggtctgagagccctgctgtgaggaccaggaacaacaacagcgtgagcagccgggagcggcaccggcccagccccaggagcacccggggccggcagggcaggaaccacgtggatgagagccctgtggagttccctgccaccaggagcctgcggcggcgggccacagccagcgctggcaccccctggcccagcccccccagcagctacctgaccatcgacctgacagatgacacagaggacacccacggcaccccccagagcagcagcaccccctatgcccggctggcccaggacagccagcagggcggcatggagagcccccaggtggaggccgacagcggagatggagacagcagcgagtaccaggacggcaaggagtttggaattggagacctggtgtggggcaagatcaagggcttctcctggtggccagccatggtggtgtcctggaaggccaccagcaagaggcaggccatgagcggcatgcgctgggtgcagtggtttggagatggcaagttcagcgaggtgtctgctgacaagctggtggccctgggcctcttcagccagcacttcaacctggccaccttcaacaagctggtgtcctacaggaaggccatgtaccacgccctggagaaggcccgggtgcgggccggcaagaccttccccagcagccctggggacagcctggaggaccagctgaagcccatgctggagtgggcccatggaggcttcaagcccactggaattgagggcctgaagcccaacaacacccagcctgagaacaagaccaggagaagaacagcagatgattctgccaccagtgactactgcccagcccccaagaggctgaagaccaactgctacaacaacgggaaggacagaggagatgaggaccagagccgggagcagatggccagtgatgtggccaacaacaagagcagcctggaggatggctgcctgagctgtggcaggaagaaccctgtgtccttccaccccctgtttgagggcggcctgtgccagacctgccgggaccgcttcctggagctgttctacatgtatgatgatgatggctaccagagctactgcaccgtgtgctgtgagggccgggagctgctgctgtgcagcaacaccagctgctgccgctgcttctgtgtggagtgcctggaggtgctggtgggcaccggcacagctgctgaggccaagctgcaggagccctggagctgctacatgtgcctgccccagcgctgccacggcgtgctgcggcggaggaaggactggaatgtgcggctgcaggccttcttcaccagtgacaccggcctggagtatgaggcccccaagctgtacccagccatcccagctgcccggcggcggcccatccgggtgctgagcctgtttgatggcatcgccaccggctacctggtgctgaaggagctgggcatcaaggtgggcaagtatgtggccagcgaggtgtgtgaggagagcattgctgtgggcaccgtgaagcatgagggcaacatcaagtatgtgaatgatgtgaggaacatcaccaagaagaacatcgaggagtggggcccctttgacctggtgattggaggcagcccctgcaatgacctgagcaatgtgaacccagccaggaagggcctgtatgagggcaccggccgcctcttctttgagttctaccacctgctgaactacagccggcccaaggagggagatgaccggcccttcttctggatgtttgaaaatgtggtggccatgaaggtgggggacaagagggacatcagccgcttcctggagtgcaaccctgtgatgattgatgccatcaaggtgtctgctgcccaccgggcccgctacttctggggcaacctgcccggcatgaacagacctgtgattgccagcaagaatgacaagctggagctgcaggactgcctggagtacaacagaattgccaagctgaagaaggtgcagaccatcaccaccaagagcaacagcatcaagcagggcaagaaccagctgtttcctgtggtgatgaatggcaaggaggatgtgctgtggtgcacagagctggagcgcatcttcggcttccctgtgcactacacagatgtgagcaacatgggccgcggggcccggcagaagctgctgggccgctcctggagcgtgcctgtgatccgccacctgtttgcccccctgaaggactactttgcctgtgagtag

SEQ ID NO: 150260 - DNA, 999 bp, synthetic construct
  misc_feature 1..999: note = Description of Artificial Sequence: Synthetic coding sequence
  source 1..999: mol_type = other DNA
atgaagggggacaccaggcacctgaatggagaggaggatgctgggggccgggaggacagcatcctggtgaatggagcctgcagcgaccagagcagtgacagcccccccatcctggaggccatccgcaccccagagatccggggcagaagaagcagcagccggctgagcaagcgggaggtgagcagcctgctgagctacacccaggacctgactggagatggagatggagaagatggagatggcagtgacacccctgtgatgcccaagctgttccgggagaccaggaccaggtctgagagccctgccagcctgcggcggcgggccacagccagcgctggcaccccctggcccagcccccccagcagctacctgaccatcgacctgacagatgacacagaggacacccacggcaccccccagagcagcagcaccccctatgcccggctggcccaggacagccagcagggcggcatggagagcccccaggtggaggccgacagcggagatggagacagcagcgagtaccaggacggcaaggagtttggaattggagacctggtgtggggcaagatcaagggcttctcctggtggccagccatggtggtgtcctggaaggccaccagcaagaggcaggccatgagcggcatgcgctgggtgcagtggtttggagatggcaagttcagcgaggtgtctgctgacaagctggtggccctgggcctcttcagccagcacttcaacctggccaccttcaacaagctggtgtcctacaggaaggccatgtaccacgccctggagaggacccggctggaggatgcccagctgaccacccagccccccctgaccacagccccccaccccagcgccagccggcagatcgccatcaccacagccaagacagagggcatgaagatccgggcagagaacaagtggctgcagatgctgcccaccaccagggctgcctggaaggagaagccccgggtgctgccccccagcctgtag

SEQ ID NO: 150261 - DNA, 2187 bp, synthetic construct
  misc_feature 1..2187: note = Description of Artificial Sequence: Synthetic coding sequence
  source 1..2187: mol_type = other DNA
atgaagggggacaccaggcacctgaatggagaggaggatgctgggggccgggaggacagcatcctggtgaatggagcctgcagcgaccagagcagtgacagcccccccatcctggaggccatccgcaccccagagatccggggcagaagaagcagcagccggctgagcaagcgggaggtgagcagcctgctgagctacacccaggacctgactggagatggagatggagaagatggagatggcagtgacacccctgtgatgcccaagctgttccgggagaccaggaccaggtctgagagccctgccagcctgcggcggcgggccacagccagcgctggcaccccctggcccagcccccccagcagctacctgaccatcgacctgacagatgacacagaggacacccacggcaccccccagagcagcagcaccccctatgcccggctggcccaggacagccagcagggcggcatggagagcccccaggtggaggccgacagcggagatggagacagcagcgagtaccaggacggcaaggagtttggaattggagacctggtgtggggcaagatcaagggcttctcctggtggccagccatggtggtgtcctggaaggccaccagcaagaggcaggccatgagcggcatgcgctgggtgcagtggtttggagatggcaagttcagcgaggtgtctgctgacaagctggtggccctgggcctcttcagccagcacttcaacctggccaccttcaacaagctggtgtcctacaggaaggccatgtaccacgccctggagaaggcccgggtgcgggccggcaagaccttccccagcagccctggggacagcctggaggaccagctgaagcccatgctggagtgggcccatggaggcttcaagcccactggaattgagggcctgaagcccaacaacacccagcctgagaacaagaccaggagaagaacagcagatgattctgccaccagtgactactgcccagcccccaagaggctgaagaccaactgctacaacaacgggaaggacagaggagatgaggaccagagccgggagcagatggccagtgatgtggccaacaacaagagcagcctggaggatggctgcctgagctgtggcaggaagaaccctgtgtccttccaccccctgtttgagggcggcctgtgccagacctgccgggaccgcttcctggagctgttctacatgtatgatgatgatggctaccagagctactgcaccgtgtgctgtgagggccgggagctgctgctgtgcagcaacaccagctgctgccgctgcttctgtgtggagtgcctggaggtgctggtgggcaccggcacagctgctgaggccaagctgcaggagccctggagctgctacatgtgcctgccccagcgctgccacggcgtgctgcggcggaggaaggactggaatgtgcggctgcaggccttcttcaccagtgacaccggcctggagtatgaggcccccaagctgtacccagccatcccagctgcccggcggcggcccatccgggtgctgagcctgtttgatggcatcgccaccggctacctggtgctgaaggagctgggcatcaaggtgggcaagtatgtggccagcgaggtgtgtgaggagagcattgctgtgggcaccgtgaagcatgagggcaacatcaagtatgtgaatgatgtgaggaacatcaccaagaagaacatcgaggagtggggcccctttgacctggtgattggaggcagcccctgcaatgacctgagcaatgtgaacccagccaggaagggcctgtatgagggcaccggccgcctcttctttgagttctaccacctgctgaactacagccggcccaaggagggagatgaccggcccttcttctggatgtttgaaaatgtggtggccatgaaggtgggggacaagagggacatcagccgcttcctggagtgcaaccctgtgatgattgatgccatcaaggtgtctgctgcccaccgggcccgctacttctggggcaacctgcccggcatgaaccgcatcttcggcttccctgtgcactacacagatgtgagcaacatgggccgcggggcccggcagaagctgctgggccgctcctggagcgtgcctgtgatccgccacctgtttgcccccctgaaggactactttgcctgtgagtag

SEQ ID NO: 150262 - DNA, 2085 bp, synthetic construct
  misc_feature 1..2085: note = Description of Artificial Sequence: Synthetic coding sequence
  source 1..2085: mol_type = other DNA
atgaagggggacaccaggcacctgaatggagaggaggatgctgggggccgggaggacagcatcctggtgaatggagcctgcagcgaccagagcagtgacagcccccccatcctggaggccatccgcaccccagagatccggggcagaagaagcagcagccggctgagcaagcgggaggtgagcagcctgctgagctacacccagagcctgcggcggcgggccacagccagcgctggcaccccctggcccagcccccccagcagctacctgaccatcgacctgacagatgacacagaggacacccacggcaccccccagagcagcagcaccccctatgcccggctggcccaggacagccagcagggcggcatggagagcccccaggtggaggccgacagcggagatggagacagcagcgagtaccaggacggcaaggagtttggaattggagacctggtgtggggcaagatcaagggcttctcctggtggccagccatggtggtgtcctggaaggccaccagcaagaggcaggccatgagcggcatgcgctgggtgcagtggtttggagatggcaagttcagcgaggtgtctgctgacaagctggtggccctgggcctcttcagccagcacttcaacctggccaccttcaacaagctggtgtcctacaggaaggccatgtaccacgccctggagaaggcccgggtgcgggccggcaagaccttccccagcagccctggggacagcctggaggaccagctgaagcccatgctggagtgggcccatggaggcttcaagcccactggaattgagggcctgaagcccaacaacacccagcctgagaacaagaccaggagaagaacagcagatgattctgccaccagtgactactgcccagcccccaagaggctgaagaccaactgctacaacaacgggaaggacagaggagatgaggaccagagccgggagcagatggccagtgatgtggccaacaacaagagcagcctggaggatggctgcctgagctgtggcaggaagaaccctgtgtccttccaccccctgtttgagggcggcctgtgccagacctgccgggaccgcttcctggagctgttctacatgtatgatgatgatggctaccagagctactgcaccgtgtgctgtgagggccgggagctgctgctgtgcagcaacaccagctgctgccgctgcttctgtgtggagtgcctggaggtgctggtgggcaccggcacagctgctgaggccaagctgcaggagccctggagctgctacatgtgcctgccccagcgctgccacggcgtgctgcggcggaggaaggactggaatgtgcggctgcaggccttcttcaccagtgacaccggcctggagtatgaggcccccaagctgtacccagccatcccagctgcccggcggcggcccatccgggtgctgagcctgtttgatggcatcgccaccggctacctggtgctgaaggagctgggcatcaaggtgggcaagtatgtggccagcgaggtgtgtgaggagagcattgctgtgggcaccgtgaagcatgagggcaacatcaagtatgtgaatgatgtgaggaacatcaccaagaagaacatcgaggagtggggcccctttgacctggtgattggaggcagcccctgcaatgacctgagcaatgtgaacccagccaggaagggcctgtatgagggcaccggccgcctcttctttgagttctaccacctgctgaactacagccggcccaaggagggagatgaccggcccttcttctggatgtttgaaaatgtggtggccatgaaggtgggggacaagagggacatcagccgcttcctggagtgcaaccctgtgatgattgatgccatcaaggtgtctgctgcccaccgggcccgctacttctggggcaacctgcccggcatgaaccgcatcttcggcttccctgtgcactacacagatgtgagcaacatgggccgcggggcccggcagaagctgctgggccgctcctggagcgtgcctgtgatccgccacctgtttgcccccctgaaggactactttgcctgtgagtag

SEQ ID NO: 150263 - DNA, 1701 bp, synthetic construct
  misc_feature 1..1701: note = Description of Artificial Sequence: Synthetic coding sequence
  source 1..1701: mol_type = other DNA
ggccgcagcccccggggccgctctgagaggcctcccacagatggcaccggcagcctggccgtgggccgggccggcggcaatgctgcccggcctgctgccctgggcctgagcggccccagcaagcccagcagcgccatcggggccggggacagccgggcccagaggcctgcccggcccccagctggcctgcccccagccagcccagacccccggctgcggcggcctgctgccccccagcctgccctgcggcaggagagcatgaagggggacaccaggcacctgaatggagaggaggatgctgggggccgggaggacagcatcctggtgaatggagcctgcagcgaccagagcagtgacagcccccccatcctggaggccatccgcaccccagagatccggggcagaagaagcagcagccggctgagcaagcgggaggtgagcagcctgctgagctacacccaggacctgactggagatggagatggagaagatggagatggcagtgacacccctgtgatgcccaagctgttccgggagaccaggaccaggtctgagagccctgctgtgaggaccaggaacaacaacagcgtgagcagccgggagcggcaccggcccagccccaggagcacccggggccggcagggcaggaaccacgtggatgagagccctgtggagttccctgccaccaggagcctgcggcggcgggccacagccagcgctggcaccccctggcccagcccccccagcagctacctgaccatcgacctgacagatgacacagaggacacccacggcaccccccagagcagcagcaccccctatgcccggctggcccaggacagccagcagggcggcatggagagcccccaggtggaggccgacagcggagatggagacagcagcgagtaccaggacggcaaggagtttggaattggagacctggtgtggggcaagatcaagggcttctcctggtggccagccatggtggtgtcctggaaggccaccagcaagaggcaggccatgagcggcatgcgctgggtgcagtggtttggagatggcaagttcagcgaggtgtctgctgacaagctggtggccctgggcctcttcagccagcacttcaacctggccaccttcaacaagctggtgtcctacaggaaggccatgtaccacgccctggagaaggcccgggtgcgggccggcaagaccttccccagcagccctggggacagcctggaggaccagctgaagcccatgctggagtgggcccatggaggcttcaagcccactggaattgagggcctgaagcccaacaacacccagcctgagaacaagaccaggagaagaacagcagatgattctgccaccagtgactactgcccagcccccaagaggctgaagaccaactgctacaacaacgggaaggacagaggagatgaggaccagagccgggagcagatggccagtgatgtggccaacaacaagagcagcctggaggatggctgcctgagctgtggcaggaagaaccctgtgtccttccaccccctgtttgagggcggcctgtgccagacctgccgccacctgtgtggggacagcgtgaagcccacccaccccagctgcctggccctgtgcctgtggggccgcatgggagacagctgccaccggggccagtggcatgctggccacagccagctgtccttctag

SEQ ID NO: 150264 - DNA, 1164 bp, synthetic construct
  misc_feature 1..1164: note = Description of Artificial Sequence: Synthetic coding sequence
  source 1..1164: mol_type = other DNA
atggccgccatcccagccctggaccctgaggccgagcccagcatggatgtgatcctggtgggcagcagcgagctgagcagctctgtgtccccaggcaccggccgggacctgattgcctatgaggtgaaggccaaccagagaaatattgaggacatctgcatctgctgcggcagcctgcaggtgcacacccagcaccccctgtttgagggcggcatctgtgccccctgcaaggacaagttcctggatgccctcttcctgtatgatgatgatggctaccagagctactgcagcatctgctgcagcggggagaccctgctgatctgtggcaacccagactgcacccgctgctactgctttgaatgtgtggacagcctggtgggccctggcaccagcggcaaggtgcacgccatgagcaactgggtgtgctacctgtgcctgcccagcagccgcagcggcctgctgcagaggaggaggaagtggaggagccagctgaaggccttctatgaccgggagagcgagaaccccctggagatgtttgaaacagtgcctgtgtggaggcggcagcctgtgcgggtgctgagcctgtttgaggacatcaagaaggagctgaccagcctgggcttcctggagagcggcagtgaccccggccagctgaagcacgtggtggatgtgacagacacagtgaggaaggatgtggaggagtggggcccctttgacctggtgtatggagccaccccacccctgggccacacctgtgacaggcctccttcctggtacctgttccagttccaccggctgctgcagtatgcccggcccaagccaggcagcccccggcccttcttctggatgtttgtggacaacctggtgctgaacaaggaggacctggatgtggccagccgcttcctggagatggagcctgtgaccatcccagatgtgcatggaggcagcctgcagaatgctgtgcgggtgtggagcaacatcccagccatccgcagcagccgccactgggccctggtgtctgaggaggagctgagcctgctggcccagaacaagcagagcagcaagctggccgccaagtggcccaccaagctggtgaagaactgcttcctgcccctgcgggagtacttcaagtacttcagcacagagctgaccagcagcctgtag

SEQ ID NO: 150265 - DNA, 1161 bp, synthetic construct
  misc_feature 1..1161: note = Description of Artificial Sequence: Synthetic coding sequence
  source 1..1161: mol_type = other DNA
atggccgccatcccagccctggaccctgaggccgagcccagcatggatgtgatcctggtgggcagcagcgagctgagcagctctgtgtccccaggcaccggccgggacctgattgcctatgaggtgaaggccaaccagagaaatattgaggacatctgcatctgctgcggcagcctgcaggtgcacacccagcaccccctgtttgagggcggcatctgtgccccctgcaaggacaagttcctggatgccctcttcctgtatgatgatgatggctaccagagctactgcagcatctgctgcagcggggagaccctgctgatctgtggcaacccagactgcacccgctgctactgctttgaatgtgtggacagcctggtgggccctggcaccagcggcaaggtgcacgccatgagcaactgggtgtgctacctgtgcctgcccagcagccgcagcggcctgctgcagaggaggaggaagtggaggagccagctgaaggccttctatgaccgggagagcgagaaccccctggagatgtttgaaacagtgcctgtgtggaggcggcagcctgtgcgggtgctgagcctgtttgaggacatcaagaaggagctgaccagcctgggcttcctggagagcggcagtgaccccggccagctgaagcacgtggtggatgtgacagacacagtgaggaaggatgtggaggagtggggcccctttgacctggtgtatggagccaccccacccctgggccacacctgtgacaggcctccttcctggtacctgttccagttccaccggctgctgcagtatgcccggcccaagccaggcagcccccggcccttcttctggatgtttgtggacaacctggtgctgaacaaggaggacctggatgtggccagccgcttcctggagatggagcctgtgaccatcccagatgtgcatggaggcagcctgcagaatgctgtgcgggtgtggagcaacatcccagccatccgcagccgccactgggccctggtgtctgaggaggagctgagcctgctggcccagaacaagcagagcagcaagctggccgccaagtggcccaccaagctggtgaagaactgcttcctgcccctgcgggagtacttcaagtacttcagcacagagctgaccagcagcctgtag

SEQ ID NO: 150266 - DNA, 3123 bp, synthetic construct
  misc_feature 1..3123: note = Description of Artificial Sequence: Synthetic coding sequence
  source 1..3123: mol_type = other DNA
atgctggaggacatcagcgaggaggacatctgggagtacaagagcaagaggaagcccaagagggtggaccccaacaacggcagcaagaacatcctgaagtctgtggagaaggccacagatggcaagtaccagagcaagaggagcaggaacaggaagagagctgctgaggccaaggaggtgaaggaccacgaggtgcccctgggcaatgccggctgccagacctctgtggccagcagccagaacagcagctgtggagatggcatccagcagacccaggacaaggagaccacccctgggaagctgtgcaggacccagaagagccagcacgtgagccccaagatccggcctgtgtatgatggctactgccccaactgccagatgcccttcagcagcctgattggccagaccccccgctggcacgtgtttgaatgtctggacagcccccccaggagtgaaacagagtgcccagatggcctgctgtgcaccagcaccatccccttccactacaagcgctacacccacttcctgctggcccagagccgggccggggaccaccccttcagcagccccagccctgccagcggcggcagcttcagcgagaccaagtctggagtgctgtgcagcctggaggagcgctggagcagctaccagaaccagacagacaacagcgtgtccaatgaccccctgctgatgacccagtacttcaagaagagccccagcctgacagaggccagcgagaagatcagcacccacatccagaccagccagcaggccctgcagttcacagactttgtggagaatgacaagctggtgggcgtggccctgcggctggccaacaacagcgagcacatcaacctgcccctgcctgaaaatgacttcagtgactgtgagatctcctacagccccctgcagagtgatgaggacacccatgacattgatgagaagccagatgacagccaggagcagctgttcttcacagagagcagcaaggatggcagcctggaggaggatgatgacagctgtggcttcttcaagaagagacatggccccctgctgaaggaccaggatgagagctgccccaaggtgaacagcttcctgacccgggacaagtatgatgagggcctgtaccgcttcaacagcctgaatgacctgagccagcccatcagccagaacaatgaaagcaccctgccctatgacctggcctgcacaggaggagactttgtgctcttccccccagccctggccggcaagctggccgcctctgtgcaccaggccaccaaggccaagccagatgagcctgagttccacagcgcccagagcaacaagcagaagcaggtgattgaggagagctctgtgtacaaccaggtgtccctgcccctggtgaagagcctgatgctgaagccctttgagagccaggtggagggctacctgagcagccagcccacccagaacaccatcaggaagctgagcagcgagaacctgaatgccaagaacaacaccaacagcgcctgcttctgcaggaaggccctggagggcgtgcctgtgggcaaggccaccatcctgaacacagagaacctgagcagcaccccagcccccaagtacctgaagatcctgcccagcggcctgaagtacaatgcccggcaccccagcaccaaggtgatgaagcagatggacattggagtgtacttcggcctgccccccaagaggaaggaggagaagctgctgggggagagcgccctggagggcatcaacctgaaccctgtgcccagccccaaccagaagaggagcagccagtgcaagaggaaggccgagaagagcctgagtgacctggagtttgatgccagcaccctgcacgagagccagctgtctgtggagctgagcagcgagaggagccagaggcagaagaagcgctgcaggaagagcaacagcctgcaggagggcgcctgccagaagagaagtgaccacctgatcaacacagaaagtgaagctgtgaacctgagcaaggtgaaggtgttcaccaagagcgcccatggaggcctgcagaggggcaacaagaagatccctgagagcagcaatgtgggcggcagcaggaagaagacctgccccttctacaagaagatccctggcaccggcttcaccgtggatgccttccagtatggagtggtggagggctgcacagcctacttcctgacccacttccacagcgaccactacgccggcctgagcaagcacttcaccttccctgtgtactgcagcgagatcactggaaacctgctgaagaacaagctgcacgtgcaggagcagtacatccaccccctgcccctggacacagagtgcatcgtgaatggagtgaaggtggtgctgctggatgccaaccactgccctggagctgtgatgatcctcttctacctgcccaacggcaccgtcatcctgcacactggagacttccgggctgaccccagcatggagaggagcctgctggccgaccagaaggtgcacatgctgtacctggacaccacctactgcagccctgagtacaccttccccagccagcaggaggtgatccgctttgccatcaacacagcctttgaagctgtgaccctgaacccccacgccctggtggtgtgtggcacctacagcatcggcaaggagaaggtgttcctggccatcgcagatgtgctgggcagcaaggtgggcatgagccaggagaagtacaagaccctgcagtgcctgaacatccctgagatcaacagcctcatcaccacagacatgtgcagcagcctggtgcacctgctgcccatgatgcagatcaacttcaagggcctgcagagccacctgaagaagtgtggcggcaagtacaaccagatcctggccttccggcccaccggctggacccacagcaacaagttcaccagaattgctgatgtgatcccccagaccaagggcaacatcagcatctacggcatcccctacagcgagcacagcagctacctggagatgaagagatttgtgcagtggctgaagccccagaagatcatccccaccgtgaatgtgggcacctggaagagccgcagcaccatggagaagtacttccgggagtggaagctggaggccggctactag

SEQ ID NO: 150267 - DNA, 3123 bp, synthetic construct; identical to SEQ ID NO: 150266
  misc_feature 1..3123: note = Description of Artificial Sequence: Synthetic coding sequence
  source 1..3123: mol_type = other DNA

SEQ ID NO: 150268 - DNA, 813 bp, synthetic construct
  misc_feature 1..813: note = Description of Artificial Sequence: Synthetic coding sequence
  source 1..813: mol_type = other DNA
atgctgcagaagcccaagtctgtgaagctgcgggccctgcggagccccaggaagtttggagtggccggccgcagctgccaggaggtgctgaggaagggctgcctgcgcttccagctgcctgagcggggcagccggctgtgcctgtatgaagatggaacagagctgacagaggactacttccccagcgtgcctgacaatgctgagctggtgctgctgaccctgggccaggcctggcagggctacgtgtctgacatccgccgcttcctgagcgccttccacgagccccaggtgggcctcatccaggccgcccagcagctgctgtgtgatgagcaggccccccagaggcagaggctgctggccgacctgctgcacaacgtgtcccagaacattgctgctgagaccagggcagaagatcctccctggtttgagggcctggagagccgcttccagagcaagagcggctacctgcgctacagctgtgagagccgcatccgcagctacctgcgggaggtgtcctcctaccccagcacagtgggcgctgaggcccaggaggagttcctgcgggtgctgggctccatgtgccagaggctgcgctccatgcagtacaacggcagctactttgacagaggagccaagggcggcagccggctgtgcaccccagagggctggttcagctgccagggcccctttgacatggacagctgcctgagccgccacagcatcaacccctacagcaaccgggagagccgcatcctcttcagcacctggaacctggaccacattgatggagtgctgctgtgtggccctggatag

SEQ ID NO: 150269 - DNA, 825 bp, synthetic construct
  misc_feature 1..825: note = Description of Artificial Sequence: Synthetic coding sequence
  source 1..825: mol_type = other DNA
atgtgcctgctgctggacagacacctgctgtttgtgcccctggtggctgatgtgtctgacatccgccgcttcctgagcgccttccacgagccccaggtgggcctcatccaggccgcccagcagctgctgtgtgatgagcaggccccccagaggcagaggctgctggccgacctgctgcacaacgtgtcccagaacattgctgctgagaccagggcagaagatcctccctggtttgagggcctggagagccgcttccagagcaagagcggctacctgcgctacagctgtgagagccgcatccgcagctacctgcgggaggtgtcctcctaccccagcacagtgggcgctgaggcccaggaggagttcctgcgggtgctgggctccatgtgccagaggctgcgctccatgcagtacaacggcagctactttgacagaggagccaagggcggcagccggctgtgcaccccagagggctggttcagctgccagggcccctttgacatggacagctgcctgagccgccacagcatcaacccctacagcaaccgggagagccgcatcctcttcagcacctggaacctggaccacatcatcgagaagaagaggaccatcatccccaccctggtggaggccatcaaggagcaggacggccgggaggtggactgggagtacttctacggcctgctcttcaccagcgagaacctgaagctggtgcacatcgtgtgccacaagaagaccacccacaagctgaactgtgaccccagccgcatctacaagccccagacccggctgaagaggaagcagcctgtgaggaagaggcagtag

SEQ ID NO: 150270 - DNA, 312 bp, synthetic construct
  misc_feature 1..312: note = Description of Artificial Sequence: Synthetic coding sequence
  source 1..312: mol_type = other DNA
atgctgcagaagcccaagtctgtgaagctgcgggccctgcggagccccaggaagtttggagtggccggccgcagctgccaggaggtgctgaggaagggctgcctgcgcttccagctgcctgagcggggcagccggctgtgcctgtatgaagatggaacagagctgacagaggactacttccccagcgtgcctgacaatgctgagctggtgctgctgaccctgggccaggcctggcagggctggttccgccacgtgtcccaggacagcctgaccctgctgggcagcagctgccccccagccctggtgtcctag

SEQ ID NO: 150271 - DNA, 825 bp, synthetic construct; identical to SEQ ID NO: 150269
  misc_feature 1..825: note = Description of Artificial Sequence: Synthetic coding sequence
  source 1..825: mol_type = other DNA

SEQ ID NO: 150272 - DNA, 1017 bp, synthetic construct
  misc_feature 1..1017: note = Description of Artificial Sequence: Synthetic coding sequence
  source 1..1017: mol_type = other DNA
atgctgcagaagcccaagtctgtgaagctgcgggccctgcggagccccaggaagtttggagtggccggccgcagctgccaggaggtgctgaggaagggctgcctgcgcttccagctgcctgagcggggcagccggctgtgcctgtatgaagatggaacagagctgacagaggactacttccccagcgtgcctgacaatgctgagctggtgctgctgaccctgggccaggcctggcagggctacgtgtctgacatccgccgcttcctgagcgccttccacgagccccaggtgggcctcatccaggccgcccagcagctgctgtgtgatgagcaggccccccagaggcagaggctgctggccgacctgctgcacaacgtgtcccagaacattgctgctgagaccagggcagaagatcctccctggtttgagggcctggagagccgcttccagagcaagagcggctacctgcgctacagctgtgagagccgcatccgcagctacctgcgggaggtgtcctcctaccccagcacagtgggcgctgaggcccaggaggagttcctgcgggtgctgggctccatgtgccagaggctgcgctccatgcagtacaacggcagctactttgacagaggagccaagggcggcagccggctgtgcaccccagagggctggttcagctgccagggcccctttgacatggacagctgcctgagccgccacagcatcaacccctacagcaaccgggagagccgcatcctcttcagcacctggaacctggaccacatcatcgagaagaagaggaccatcatccccaccctggtggaggccatcaaggagcaggacggccgggaggtggactgggagtacttctacggcctgctcttcaccagcgagaacctgaagctggtgcacatcgtgtgccacaagaagaccacccacaagctgaactgtgaccccagccgcatctacaagccccagacccggctgaagaggaagcagcctgtgaggaagaggcagtag

SEQ ID NO: 150273 - DNA, 351 bp, synthetic construct
  misc_feature 1..351: note = Description of Artificial Sequence: Synthetic coding sequence
  source 1..351: mol_type = other DNA
atgctgcagaagcccaagtctgtgaagctgcgggccctgcggagccccaggaagtttggagtggccggccgcagctgccaggaggtgctgaggaagggctgcctgcgcttccagctgcctgagcggggcagccggctgtgcctgtatgaagatggaacagagctgacagaggactacttccccagcgtgcctgacaatgctgagctggtgctgctgaccctgggccaggcctggcagggctctgtgggcgtgcgggcccggaccaagacccgggacaccagcagcctgagccctggggactgccaggccctgggcaatggaggccgctgtggccagaggctcttcctgtag

SEQ ID NO: 150274 - DNA, 261 bp, synthetic construct
  misc_feature 1..261: note = Description of Artificial Sequence: Synthetic coding sequence
  source 1..261: mol_type = other DNA
atgctgcagaagcccaagtctgtgaagctgcgggccctgcggagccccaggaagtttggagtggccggccgcagctgccaggaggtgctgaggaagggctgcctgcgcttccagctgcctgagcggggcagccggctgtgcctgtatgaagatggaacagagctgacagaggactacttccccagcgtgcctgacaatgctgagctggtgctgctgaccctgggccaggcctggcagggctgctggagcgctgtggcctag

SEQ ID NO: 150275 - DNA, 249 bp, synthetic construct
  misc_feature 1..249: note = Description of Artificial Sequence: Synthetic coding sequence
  source 1..249: mol_type = other DNA
atgctgcagaagcccaagtctgtgaagctgcgggccctgcggagccccaggaagtttggagtggccggccgcagctgccaggaggtgctgaggaagggctgcctgcgcttccagctgcctgagcggggcagccggctgtgcctgtatgaagatggaacagagctgacagaggactacttccccagcgtgcctgacaatgctgagctggtgctgctgaccctgggccaggcctggcagggctgtgagtag

SEQ ID NO: 150276 - DNA, 813 bp, synthetic construct; identical to SEQ ID NO: 150268
  misc_feature 1..813: note = Description of Artificial Sequence: Synthetic coding sequence
  source 1..813: mol_type = other DNA

SEQ ID NO: 150277 - DNA, 3183 bp, synthetic construct
  misc_feature 1..3183: note = Description of Artificial Sequence: Synthetic coding sequence
  source 1..3183: mol_type = other DNA
atggagcagctgaatgagctggagctgctgatggagaagagcttctgggaggaggccgagctgcctgctgagctgttccagaagaaggtggtggccagcttccccaggacagtgctgagcacaggcatggacaaccgctacctggtgctggccgtgaacacagtgcagaacaaggagggcaactgtgagaagaggctggtgatcacagccagccagagcctggagaacaaggagctgtgcatcctgagaaatgactggtgcagcgtgcctgtggagcccggggacatcatccacctggagggggactgcaccagtgacacctggatcatcgacaaggactttggctacctgatcctgtacccagacatgctgatcagcggcaccagcatcgccagcagcatccgctgcatgagaagagctgtgctgtctgagaccttccgcagcagtgaccctgccacccggcagatgctgattggcaccgtgctgcacgaggtgttccagaaggccatcaacaacagctttgcccctgagaagctgcaggagctggccttccagaccatccaggagatccgccacctgaaggagatgtaccgcctgaacctgagccaggatgagatcaagcaggaggtggaggactacctgcccagcttctgcaagtgggccggggacttcatgcacaagaacaccagcacagacttcccccagatgcagctgagcctgcccagcgacaacagcaaggacaacagcacctgcaacatcgaggtggtgaagcccatggacatcgaggagagcatctggagcccccgcttcggcctgaagggcaagattgatgtgacagtgggcgtgaagatccaccggggctacaagaccaagtacaagatcatgcccctggagctgaagacaggcaaggagagcaacagcattgagcacaggagccaggtggtgctgtacaccctgctgagccaggagcggcgggctgaccctgaggccggcctgctgctgtacctgaagacaggccagatgtaccctgtgcctgccaaccacctggacaagcgggagctgctgaagctgaggaaccagatggccttcagcctcttccaccgcatcagcaagagcgccacccggcagaagacccagctggccagcctgccccagatcatcgaggaggagaagacctgcaagtactgcagccagatcggcaactgtgccctgtacagcagagctgtggagcagcagatggactgcagctctgtgcccatcgtgatgctgcccaagattgaggaggagacccagcacctgaagcagacccacctggagtacttcagcctgtggtgcctgatgctgaccctggagagccagagcaaggacaacaagaagaaccaccagaacatctggctgatgcctgccagcgagatggagaagagcggcagctgcatcggcaacctgatccgcatggagcacgtgaagatcgtgtgtgatggccagtacctgcacaacttccagtgcaagcacggggccatccctgtgaccaacctgatggccggggacagagtgattgtgtctggagaggagaggagcctgtttgccctgagccggggctacgtgaaggagatcaacatgaccaccgtgacctgcctgctggacaggaacctgtctgtgctgcctgagagcaccctcttccggctggaccaggaggagaagaactgtgacatcgacacccccctgggcaacctgagcaagctgatggagaacacctttgtgtccaagaagctgcgggacctgatcatcgacttccgggagccccagttcatctcctacctgagctctgtgctgccccatgatgccaaggacacagtggcctgcatcctgaagggcctgaacaagccccagaggcaggccatgaagaaggtgctgctgagcaaggactacaccctcatcgtgggcatgcctggcaccgggaagaccaccaccatctgcaccctggtgcgcatcctgtatgcctgtggcttctctgtgctgctgaccagctacacccacagcgctgtggacaacatcctgctgaagctggccaagttcaagattggcttcctgcggctgggccagatccagaaggtgcacccagccatccagcagttcacagagcaggagatctgccgcagcaagagcatcaagagcctggccctgctggaggagctgtacaacagccagctgattgtggccaccacctgcatgggcatcaaccaccccatcttcagcaggaagatctttgacttctgcatcgtggatgaggccagccagatcagccagcccatctgcctgggccccctcttcttcagccgccgctttgtgctggtgggggaccaccagcagctgccccccctggtgctgaaccgggaggcccgggccctgggcatgtctgagagcctcttcaagaggctggagcagaacaagtctgctgtggtgcagctgactgtgcagtacaggatgaacagcaagatcatgagcctgagcaacaagctgacctatgagggcaagctggagtgtggcagtgacaaggtggccaatgctgtgatcaacctgcggcacttcaaggatgtgaagctggagctggagttctacgccgactacagcgacaacccctggctgatgggcgtgtttgagcccaacaaccctgtgtgcttcctgaacacagacaaggtgcctgcccctgagcaggtggagaagggcggcgtgtccaatgtgacagaggccaagctgattgtgttcctgaccagcatctttgtgaaggccggctgcagccccagcgacatcggcatcatcgccccctaccggcagcagctgaagatcatcaatgacctgctggcccggagcatcggcatggtggaggtgaacacagtggacaagtaccagggccgggacaagagcatcgtgctggtgtcctttgtgcgcagcaacaaggatggcaccgtgggggagctgctgaaggactggaggcggctgaatgtggccatcacccgggccaagcacaagctgatcctgctgggctgtgtgcccagcctgaactgctacccacccctggagaagctgctgaaccacctgaacagcgagaagctgatcatcgacctgcccagccgggagcacgagagcctgtgccacatcctgggggacttccagcgggagtag

SEQ ID NO: 150278 - DNA, 2469 bp, synthetic construct
  misc_feature 1..2469: note = Description of Artificial Sequence: Synthetic coding sequence
  source 1..2469: mol_type = other DNA
atggagcagctgaatgagctggagctgctgatggagaagagcttctgggaggaggccgagctgcctgctgagctgttccagaagaaggtggtggccagcttccccaggacagtgctgagcacaggcatggacaaccgctacctggtgctggccgtgaacacagtgcagaacaaggagggcaactgtgagaagaggctggtgatcacagccagccagagcctggagaacaaggagctgtgcatcctgagaaatgactggtgcagcgtgcctgtggagcccggggacatcatccacctggagggggactgcaccagtgacacctggatcatcgacaaggactttggctacctgatcctgtacccagacatgctgatcagcggcaccagcatcgccagcagcatccgctgcatgagaagagctgtgctgtctgagaccttccgcagcagtgaccctgccacccggcagatgctgattggcaccgtgctgcacgaggtgttccagaaggccatcaacaacagctttgcccctgagaagctgcaggagctggccttccagaccatccaggagatccgccacctgaaggagatgtaccgcctgaacctgagccaggatgagatcaagcaggaggtggaggactacctgcccagcttctgcaagtgggccggggacttcatgcacaagaacaccagcacagacttcccccagatgcagctgagcctgcccagcgacaacagcaaggacaacagcacctgcaacatcgaggtggtgaagcccatggacatcgaggagagcatctggagcccccgcttcggcctgaagggcaagattgatgtgacagtgggcgtgaagatccaccggggctacaagaccaagtacaagatcatgcccctggagctgaagacaggcaaggagagcaacagcattgagcacaggagccaggtggtgctgtacaccctgctgagccaggagcggcgggctgaccctgaggccggcctgctgctgtacctgaagacaggccagatgtaccctgtgcctgccaaccacctggacaagcgggagctgctgaagctgaggaaccagatggccttcagcctcttccaccgcatcagcaagagcgccacccggcagaagacccagctggccagcctgccccagatcatcgaggaggagaagacctgcaagtactgcagccagatcggcaactgtgccctgtacagcagagctgtggagcagcagatggactgcagctctgtgcccatcgtgatgctgcccaagattgaggaggagacccagcacctgaagcagacccacctggagtacttcagcctgtggtgcctgatgctgaccctggagagccagagcaaggacaacaagaagaaccaccagaacatctggctgatgcctgccagcgagatggagaagagcggcagctgcatcggcaacctgatccgcatggagcacgtgaagatcgtgtgtgatggccagtacctgcacaacttccagtgcaagcacggggccatccctgtgaccaacctgatggccggggacagagtgattgtgtctggagaggagaggagcctgtttgccctgagccggggctacgtgaaggagatcaacatgaccaccgtgacctgcctgctggacaggaacctgtctgtgctgcctgagagcaccctcttccggctggaccaggaggagaagaactgtgacatcgacacccccctgggcaacctgagcaagctgatggagaacacctttgtgtccaagaagctgcgggacctgatcatcgacttccgggagccccagttcatctcctacctgagctctgtgctgccccatgatgccaaggacacagtggcctgcatcctgaagggcctgaacaagccccagaggcaggccatgaagaaggtgctgctgagcaaggactacaccctcatcgtgggcatgcctggcaccgggaagaccaccaccatctgcaccctggtgcctgcccctgagcaggtggagaagggcggcgtgtccaatgtgacagaggccaagctgattgtgttcctgaccagcatctttgtgaaggccggctgcagccccagcgacatcggcatcatcgccccctaccggcagcagctgaagatcatcaatgacctgctggcccggagcatcggcatggtggaggtgaacacagtggacaagtaccagggccgggacaagagcatcgtgctggtgtcctttgtgcgcagcaacaaggatggcaccgtgggggagctgctgaaggactggaggcggctgaatgtggccatcacccgggccaagcacaagctgatcctgctgggctgtgtgcccagcctgaactgctacccacccctggagaagctgctgaaccacctgaacagcgagaagctgatcatcgacctgcccagccgggagcacgagagcctgtgccacatcctgggggacttccagcgggagtag

SEQ ID NO: 150279 - DNA, 3441 bp, synthetic construct
  misc_feature 1..3441: note = Description of Artificial Sequence: Synthetic coding sequence
  source 1..3441: mol_type = other DNA
atgaagaccccctgcatccccagccccaagcagggcagcaagggccggggccagagccctgctgcccaggtgcggggccccacctggaatgccccagcccgggagggccggcctggggccggccacctgggccacctgcgggtgggcgcctgtgcccggggggcccaggcccgggccttcttccccttcctgtccttcctgtgctacccccgcttccgctgcctcttctgcctgcagtttgccatcccagccagcaggatggagcagctgaatgagctggagctgctgatggagaagagcttctgggaggaggccgagctgcctgctgagctgttccagaagaaggtggtggccagcttccccaggacagtgctgagcacaggcatggacaaccgctacctggtgctggccgtgaacacagtgcagaacaaggagggcaactgtgagaagaggctggtgatcacagccagccagagcctggagaacaaggagctgtgcatcctgagaaatgactggtgcagcgtgcctgtggagcccggggacatcatccacctggagggggactgcaccagtgacacctggatcatcgacaaggactttggctacctgatcctgtacccagacatgctgatcagcggcaccagcatcgccagcagcatccgctgcatgagaagagctgtgctgtctgagaccttccgcagcagtgaccctgccacccggcagatgctgattggcaccgtgctgcacgaggtgttccagaaggccatcaacaacagctttgcccctgagaagctgcaggagctggccttccagaccatccaggagatccgccacctgaaggagatgtaccgcctgaacctgagccaggatgagatcaagcaggaggtggaggactacctgcccagcttctgcaagtgggccggggacttcatgcacaagaacaccagcacagacttcccccagatgcagctgagcctgcccagcgacaacagcaaggacaacagcacctgcaacatcgaggtggtgaagcccatggacatcgaggagagcatctggagcccccgcttcggcctgaagggcaagattgatgtgacagtgggcgtgaagatccaccggggctacaagaccaagtacaagatcatgcccctggagctgaagacaggcaaggagagcaacagcattgagcacaggagccaggtggtgctgtacaccctgctgagccaggagcggcgggctgaccctgaggccggcctgctgctgtacctgaagacaggccagatgtaccctgtgcctgccaaccacctggacaagcgggagctgctgaagctgaggaaccagatggccttcagcctcttccaccgcatcagcaagagcgccacccggcagaagacccagctggccagcctgccccagatcatcgaggaggagaagacctgcaagtactgcagccagatcggcaactgtgccctgtacagcagagctgtggagcagcagatggactgcagctctgtgcccatcgtgatgctgcccaagattgaggaggagacccagcacctgaagcagacccacctggagtacttcagcctgtggtgcctgatgctgaccctggagagccagagcaaggacaacaagaagaaccaccagaacatctggctgatgcctgccagcgagatggagaagagcggcagctgcatcggcaacctgatccgcatggagcacgtgaagatcgtgtgtgatggccagtacctgcacaacttccagtgcaagcacggggccatccctgtgaccaacctgatggccggggacagagtgattgtgtctggagaggagaggagcctgtttgccctgagccggggctacgtgaaggagatcaacatgaccaccgtgacctgcctgctggacaggaacctgtctgtgctgcctgagagcaccctcttccggctggaccaggaggagaagaactgtgacatcgacacccccctgggcaacctgagcaagctgatggagaacacctttgtgtccaagaagctgcgggacctgatcatcgacttccgggagccccagttcatctcctacctgagctctgtgctgccccatgatgccaaggacacagtggcctgcatcctgaagggcctgaacaagccccagaggcaggccatgaagaaggtgctgctgagcaaggactacaccctcatcgtgggcatgcctggcaccgggaagaccaccaccatctgcaccctggtgcgcatcctgtatgcctgtggcttctctgtgctgctgaccagctacacccacagcgctgtggacaacatcctgctgaagctggccaagttcaagattggcttcctgcggctgggccagatccagaaggtgcacccagccatccagcagttcacagagcaggagatctgccgcagcaagagcatcaagagcctggccctgctggaggagctgtacaacagccagctgattgtggccaccacctgcatgggcatcaaccaccccatcttcagcaggaagatctttgacttctgcatcgtggatgaggccagccagatcagccagcccatctgcctgggccccctcttcttcagccgccgctttgtgctggtgggggaccaccagcagctgccccccctggtgctgaaccgggaggcccgggccctgggcatgtctgagagcctcttcaagaggctggagcagaacaagtctgctgtggtgcagctgactgtgcagtacaggatgaacagcaagatcatgagcctgagcaacaagctgacctatgagggcaagctggagtgtggcagtgacaaggtggccaatgctgtgatcaacctgcggcacttcaaggatgtgaagctggagctggagttctacgccgactacagcgacaacccctggctgatgggcgtgtttgagcccaacaaccctgtgtgcttcctgaacacagacaaggtgcctgcccctgagcaggtggagaagggcggcgtgtccaatgtgacagaggccaagctgattgtgttcctgaccagcatctttgtgaaggccggctgcagccccagcgacatcggcatcatcgccccctaccggcagcagctgaagatcatcaatgacctgctggcccggagcatcggcatggtggaggtgaacacagtggacaagtaccagggccgggacaagagcatcgtgctggtgtcctttgtgcgcagcaacaaggatggcaccgtgggggagctgctgaaggactggaggcggctgaatgtggccatcacccgggccaagcacaagctgatcctgctgggctgtgtgcccagcctgaactgctacccacccctggagaagctgctgaaccacctgaacagcgagaagctgatcatcgacctgcccagccgggagcacgagagcctgtgccacatcctgggggacttccagcgggagtag

SEQ ID NO: 150280 - DNA, 717 bp, synthetic construct
  misc_feature 1..717: note = Description of Artificial Sequence: Synthetic coding sequence
  source 1..717: mol_type = other DNA
atgctgtgcttcctgcggggcatggcctttgtgcccttcctgctggtgacctggagcagcgctgccttcatcatctcctatgtggtggccgtgctgagcggccacgtgaaccccttcctgccctacatcagtgacaccggcaccaccccacctgagagcggcatcttcggcttcatgatcaacttcagcgccttcctgggcgccgccaccatgtacacccgctacaagatcgtgcagaagcagaaccagacctgctacttcagcacccctgtgttcaacctggtgtccctggtgctgggcctggtgggctgcttcggcatgggcatcgtggccaacttccaggagctggccgtgcctgtggtgcatgatggaggagccctgctggcctttgtgtgtggggtggtgtacaccctgctgcagagcatcatctcctacaagagctgcccccagtggaacagcctgagcacctgccacatccgcatggtgatctctgctgtgtcctgtgccgccgtcatccccatgattgtgtgtgccagcctcatcagcatcaccaagctggagtggaacccccgggagaaggactatgtgtaccacgtggtgtctgccatctgtgagtggacagtggccttcggcttcatcttctacttcctgaccttcatccaggacttccagagcgtgaccctgcgcatcagcacagagatcaatggagacatctag

SEQ ID NO: 150281 - DNA, 801 bp, synthetic construct
  misc_feature 1..801: note = Description of Artificial Sequence: Synthetic coding sequence
  source 1..801: mol_type = other DNA
atgtggtggttccagcagggcctgtccttcctgcccagcgccctggtgatctggaccagcgctgccttcatcttctcctacatcacagctgtgaccctgcaccacatcgaccctgccctgccctacatcagtgacaccggcaccgtggcccctgagaagtgcctgtttggagccatgctgaacattgctgctgtgctgtgcatcgccaccatctacgtgcgctacaagcaggtgcacgccctgagcccagaagaaaatgtcatcatcaagctgaacaaggccggcctggtgctgggcatcctgagctgcctgggcctgagcatcgtggccaacttccagaagaccaccctgtttgctgcccacgtgtctggagctgtgctgaccttcggcatgggcagcctgtacatgtttgtgcagaccatcctgagctaccagatgcagcccaagatccacggcaagcaggtgttctggatccggctgctgctggtgatctggtgtggggtgtctgccctgtccatgctgacctgcagctctgtgctgcacagcggcaactttggaacagacctggagcagaagctgcactggaaccctgaggacaagggctacgtgctgcacatgatcaccacagctgctgagtggagcatgtccttctccttcttcggcttcttcctgacctacatccgggacttccagaagatcagcctgcgggtggaggccaacctgcacggcctgaccctgtatgacacagccccctgccccatcaacaatgaaagaacccggctgctgagccgggacatctag

SEQ ID NO: 150282 - DNA, 801 bp, synthetic construct; identical to SEQ ID NO: 150281
  misc_feature 1..801: note = Description of Artificial Sequence: Synthetic coding sequence
  source 1..801: mol_type = other DNA

SEQ ID NO: 150283 - DNA, 699 bp, synthetic construct
  misc_feature 1..699: note = Description of Artificial Sequence: Synthetic coding sequence
  source 1..699: mol_type = other DNA
atgcccagcctgtgggaccgcttcagcagcagcagcaccagcagcagccccagcagcctgcccaggacccccaccccagacaggcctcccaggtctgcctggggcagcgccacccgggaggagggctttgacaggagcaccagcctggagagcagtgactgtgagagcctggacagcagcaacagcggcttcggccctgaggaggacacagcctacctggatggagtgtccctgcctgactttgagctgctgagtgaccctgaagatgagcacctgtgtgccaacctgatgcagctgctgcaggagagcctggcccaggcccggctgggcagccggcggcctgcccggctgctgatgcccagccagctggtgtcccaggtgggcaaggagctgctgcggctggcctacagcgagccctgtggcctgcggggggccctgctggatgtgtgtgtggagcagggcaagagctgccacagcgtgggccagctggccctggaccccagcctggtgcccaccttccagctgaccctggtgctgcggctggacagccggctgtggcccaagatccagggcctcttcagcagcgccaacagccccttcctgcccggcttcagccagagcctgaccctgagcacaggcttccgggtcatcaagaagaagctgtacagcagcgagcagctgctgattgaagaatgttag

SEQ ID NO: 150284 - DNA, 582 bp, synthetic construct
  misc_feature 1..582: note = Description of Artificial Sequence: Synthetic coding sequence
  source 1..582: mol_type = other DNA
atggtggccaccggcagcctgagcagcaagaacccagccagcatcagcgagctgctggactgtggctaccaccctgagagcctgctgagtgactttgactactgggactatgtggtgcctgagcccaacctgaatgaagtcatctttgaggagagcacctgccagaacctggtgaagatgctggagaactgcctgagcaagagcaagcagaccaagctgggctgcagcaaggtgctggtgcctgagaagctgacccagagaattgcccaggatgtgctgcggctgagcagcacagagccctgtggcctgcggggctgtgtgatgcacgtgaacctggagattgaaaatgtgtgcaagaagctggaccgcatcgtgtgtgacagctctgtggtgcccacctttgagctgaccctggtgttcaagcaggagaactgctcctggaccagcttccgggacttcttcttcagccggggccgcttcagcagcggcttccggaggaccctcatcctgagcagcggcttccggctggtgaagaagaagctgtacagcctgattggcaccaccgtcatcgagggcagctag

SEQ ID NO: 150285 - DNA, 534 bp, synthetic construct
  misc_feature 1..534: note = Description of Artificial Sequence: Synthetic coding sequence
  source 1..534: mol_type = other DNA
atggtggccaccggcagcctgagcagcaagaacccagccagcatcagcgagctgctggactgtggctaccaccctgagagcctgctgagtgactttgactactgggactatgtggtgcctgagcccaacctgaatgaagtcatctttgaggagagcacctgccagaacctggtgaagatgctggagaactgcctgagcaagagcaagcagaccaagctgggctgcagcaaggtgctggtgcctgagaagctgacccagagaattgcccaggatgtgctgcggctgagcagcacagagccctgtggcctgcggggctgtgtgatgcacgtgaacctggagattgaaaatgtgtgcaagaagctggaccgcatcgtgtgtgacagctctgtggtgcccacctttgagctgaccctggtgttcaagcaggagaactgctcctggaccagcttccgggacttcttcttcagccggggccgcttcagcagcggcttccggaggaccctcatcctgagcagcggcttccggctggtgtag

SEQ ID NO: 150286 - DNA, 387 bp, synthetic construct
  misc_feature 1..387: note = Description of Artificial Sequence: Synthetic coding sequence
  source 1..387: mol_type = other DNA
atggtggccaccggcagcctgagcagcaagaacccagccagcatcagcgagctgctggactgtggctaccaccctgagagcctgctgagtgactttgactactgggactatgtggtgcctgagcccaacctgaatgaagtcatctttgaggagagcacctgccagaacctggtgaagatgctggagaactgcctgagcaagagcaagcagaccaagctgggctgcagcaaggtgctggtgcctgagaagctgacccagagaattgcccaggatgtgctgcggctgagcagcacagagccctgtggcctgcggggctgtgtgatgcacgtgaacctggagattgaaaatgtgtgcaagaagctggaccgcatcgtgtgtgacagctag

SEQ ID NO: 150287 - DNA, 1239 bp, synthetic construct
  misc_feature 1..1239: note = Description of Artificial Sequence: Synthetic coding sequence
  source 1..1239: mol_type = other DNA
atggccaacgtggccgacaccaagctgtatgacatcctgggcgtgcccccaggggcctctgaaaatgagctgaagaaggcctacaggaagctggccaaggagtaccacccagacaagaaccccaatgctggggacaagttcaaggagatcagctttgcctatgaggtgctgagcaaccctgagaagcgggagctgtatgacagatatggagagcagggcctgcgggagggcagcggcggcggcggcggcatggatgacatcttcagccacatctttggaggcggcctgtttggcttcatgggcaaccagagccgcagcagaaatggaagaagaagaggagaggacatgatgcaccccctgaaggtgtccctggaggacctgtacaacgggaagaccaccaagctgcagctgagcaagaatgtgctgtgcagcgcctgcagcggccagggcggcaagtctggagctgtgcagaagtgcagcgcctgccggggccggggcgtgcgcatcatgatccggcagctggcccctggcatggtgcagcagatgcagagcgtgtgcagcgactgcaatggagagggggaggtgatcaatgagaaggaccgctgcaagaagtgtgagggcaagaaggtgatcaaggaggtgaagatcctggaggtgcacgtggacaagggcatgaagcacggccagaggatcaccttcaccggggaggccgaccaggcccctggggtggagcccggggacatcgtgctgctgctgcaggagaaggagcacgaggtgttccagagagatggaaatgacctgcacatgacctacaagattggcctggtggaggccctgtgtggcttccagttcaccttcaagcacctggatggccggcagatcgtggtgaagtacccacctgggaaggtgattgagcccggctgtgtgcgggtggtgcggggggagggcatgccccagtacagaaacccctttgagaagggggacctgtacatcaagtttgatgtgcagtttcctgagaacaactggatcaacccagacaagctgtctgagctggaggacctgctgcccagcaggcctgaggtgcccaacatcattggagaaacagaggaggtggagctgcaggagtttgacagcacccggggcagcggcggcggccagaggcgggaggcctacaatgacagcagtgatgaggagagcagcagccaccacggccctggggtgcagtgtgcccaccagtag

SEQ ID NO: 150288 - DNA, 1443 bp, synthetic construct
  misc_feature 1..1443: note = Description of Artificial Sequence: Synthetic coding sequence
  source 1..1443: mol_type = other DNA
atggccgcccgctgcagcacccgctggctgctggtggtggtgggcaccccccggctgcctgccatcagcggccgcggggcccggcccccccgggagggcgtggtgggcgcctggctgagcaggaagctgtctgtgcctgcctttgccagcagcctgaccagctgtggcccccgggccctgctgaccctgcggcctggggtgtccctgaccggcaccaagcacaaccccttcatctgcacagccagcttccacaccagcgcccccctggccaaggaggactactaccagatcctgggcgtgcccagaaatgccagccagaaggagatcaagaaggcctactaccagctggccaagaagtaccacccagacaccaacaaggatgaccccaaggccaaggagaagttcagccagctggccgaggcctatgaggtgctgagtgatgaggtgaagaggaagcagtatgatgcctacggcagcgctggctttgaccccggggccagcggcagccagcacagctactggaagggcggccccaccgtggaccctgaggagctgttcaggaagatctttggagagttcagcagcagcagctttggagacttccagacagtgtttgaccagccccaggagtacttcatggagctgaccttcaaccaggccgccaagggcgtgaacaaggagttcaccgtgaacatcatggacacctgtgagcgctgcaatggaaaaggaaatgagcccggcaccaaggtgcagcactgccactactgcggcggcagcggcatggagaccatcaacacaggcccctttgtgatgaggagcacctgccgccgctgtggcggccggggcagcatcatcatcagcccctgtgtggtgtgcagaggagctggccaggccaagcagaagaagagggtgatgatccctgtgcctgctggggtggaggatggccagacagtgaggatgcctgtgggcaagcgggagatcttcatcaccttccgggtgcagaagagccctgtgttcagaagagatggagctgacatccacagcgacctcttcatcagcatcgcccaggccctgctgggcggcacagcccgggcccagggcctgtatgagaccatcaacgtgaccatccccccaggcacccagacagaccagaagatccgcatgggcggcaagggcatcccccgcatcaacagctatggctatggagaccactacatccacatcaagatccgggtgcccaagaggctgaccagccggcagcagagcctcatcctgtcctatgcagaagatgaaacagatgtggagggcaccgtgaatggagtgaccctgaccagcagcggcggcagcaccatggacagcagcgctggcagcaaggcccggcgggaggccggagaagatgaggagggcttcctgagcaagctgaagaagatgttcaccagctag

SEQ ID NO: 150289 - DNA, 1362 bp, synthetic construct
  misc_feature 1..1362: note = Description of Artificial Sequence: Synthetic coding sequence
  source 1..1362: mol_type = other DNA
atggccgcccgctgcagcacccgctggctgctggtggtggtgggcaccccccggctgcctgccatcagcggccgcggggcccggcccccccgggagggcgtggtgggcgcctggctgagcaggaagctgtctgtgcctgcctttgccagcagcctgaccagctgtggcccccgggccctgctgaccctgcggcctggggtgtccctgaccggcaccaagcacaaccccttcatctgcacagccagcttccacaccagcgcccccctggccaaggaggactactaccagatcctgggcgtgcccagaaatgccagccagaaggagatcaagaaggcctactaccagctggccaagaagtaccacccagacaccaacaaggatgaccccaaggccaaggagaagttcagccagctggccgaggcctatgaggtgctgagtgatgaggtgaagaggaagcagtatgatgcctacggcagcgctggctttgaccccggggccagcggcagccagcacagctactggaagggcggccccaccgtggaccctgaggagctgttcaggaagatctttggagagttcagcagcagcagctttggagacttccagacagtgtttgaccagccccaggagtacttcatggagctgaccttcaaccaggccgccaagggcgtgaacaaggagttcaccgtgaacatcatggacacctgtgagcgctgcaatggaaaaggaaatgagcccggcaccaaggtgcagcactgccactactgcggcggcagcggcatggagaccatcaacacaggcccctttgtgatgaggagcacctgccgccgctgtggcggccggggcagcatcatcatcagcccctgtgtggtgtgcagaggagctggccaggccaagcagaagaagagggtgatgatccctgtgcctgctggggtggaggatggccagacagtgaggatgcctgtgggcaagcgggagatcttcatcaccttccgggtgcagaagagccctgtgttcagaagagatggagctgacatccacagcgacctcttcatcagcatcgcccaggccctgctgggcggcacagcccgggcccagggcctgtatgagaccatcaacgtgaccatccccccaggcacccagacagaccagaagatccgcatgggcggcaagggcatcccccgcatcaacagctatggctatggagaccactacatccacatcaagatccgggtgcccaagaggctgaccagccggcagcagagcctcatcctgtcctatgcagaagatgaaacagatgtggagggcaccgtgaatggagtgaccctgaccagcagcggcaagaggagcactggaaattag

SEQ ID NO: 150290 - DNA, 903 bp, synthetic construct
  misc_feature 1..903: note = Description of Artificial Sequence: Synthetic coding sequence
  source 1..903: mol_type = other DNA
atggccgagccccaggccgagcggccccggctgtgtgtgtttcctgacctgctgcggccccccagcgctgctgacatcgagacctggtgccagccctacaggaagatctttggagagttcagcagcagcagctttggagacttccagacagtgtttgaccagccccaggagtacttcatggagctgaccttcaaccaggccgccaagggcgtgaacaaggagttcaccgtgaacatcatggacacctgtgagcgctgcaatggaaaaggaaatgaacctggcaccaaggtgcagcactgccactactgcggcggcagcggcatggagaccatcaacacaggcccctttgtgatgaggagcacctgcagaagatgtggcggccggggcagcatcatcatcagcccctgtgtggtgtgccgcggggccggccaggccaagcagaagaagagggtgatgatccctgtgcctgctggggtggaggatggccagacagtgaggatgcctgtgggcaagcgggagatcttcatcaccttccgggtgcagaagagccctgtgttcagaagagatggagctgacatccacagcgacctcttcatcagcatcgcccaggccctgctgggcggcacagcccgggcccagggcctgtatgagaccatcaacgtgaccatccccccaggcacccagacagaccagaagatccgcatgggcggcaagggcatcccccgcatcaacagctatggctacggggaccactacatccacatcaagatccgggtgcccaagaggctgaccagccggcagcagagcctcatcctgtcctatgcagaagatgaaacagatgtggagggcaccgtgaatggagtgaccctgaccagcagcggcaagaggagcacaggcaactag

SEQ ID NO: 150291 - DNA, 1023 bp, synthetic construct
  misc_feature 1..1023: note = Description of Artificial Sequence: Synthetic coding sequence
  source 1..1023: mol_type = other DNA
atgggcaaggactactaccagaccctgggcctggcccggggggccagtgatgaggagatcaagagggcctaccgccggcaggccctgcgctaccacccagacaagaacaaggagcctggagctgaggagaagttcaaggagattgctgaggcctatgatgtgctgagtgaccccaggaagcgggagatctttgacagatatggagaggagggcctgaagggcagcggccccagcggcggcagcggcggcggggccaacggcaccagcttctcctacaccttccatggagacccccacgccatgtttgctgagttcttcggcggcaggaacccctttgacaccttcttcggccagagaaatggagaggagggcatggacattgatgaccccttcagcggcttccccatgggcatgggcggcttcaccaacgtgaactttggccgcagccgcagcgcccaggagcccgccaggaagaagcaggacccccctgtgacccatgacctgcgggtgtccctggaggagatctacagcggctgcaccaagaagatgaagatcagccacaagaggctgaacccagatggcaagagcatcagaaatgaagacaagatcctgaccatcgaggtgaagaagggctggaaggagggcaccaagatcaccttccccaaggagggggaccagaccagcaacaacatcccagctgacatcgtgtttgtgctgaaggacaagccccacaacatcttcaagagagatggcagtgatgtgatctacccagcccgcatcagcctgcgggaggccctgtgtggctgcaccgtgaatgtgcccaccctggatggccgcaccatccctgtggtgttcaaggatgtgatccggcccggcatgaggaggaaggtgcctggagagggcctgcccctgcccaagaccccagagaagagaggagacctgatcatcgagtttgaggtgatcttccctgagcgcatcccccagaccagcaggacagtgctggagcaggtgctgcccatctag

SEQ ID NO: 150292 - DNA, 723 bp, synthetic construct
  misc_feature 1..723: note = Description of Artificial Sequence: Synthetic coding sequence
  source 1..723: mol_type = other DNA
atgtttgctgagttcttcggcggcaggaacccctttgacaccttcttcggccagagaaatggagaggagggcatggacattgatgaccccttcagcggcttccccatgggcatgggcggcttcaccaacgtgaactttggccgcagccgcagcgcccaggagcccgccaggaagaagcaggacccccctgtgacccatgacctgcgggtgtccctggaggagatctacagcggctgcaccaagaagatgaagatcagccacaagaggctgaacccagatggcaagagcatcagaaatgaagacaagatcctgaccatcgaggtgaagaagggctggaaggagggcaccaagatcaccttccccaaggagggggaccagaccagcaacaacatcccagctgacatcgtgtttgtgctgaaggacaagccccacaacatcttcaagagagatggcagtgatgtgatctacccagcccgcatcagcctgcgggaggccctgtgtggctgcaccgtgaatgtgcccaccctggatggccgcaccatccctgtggtgttcaaggatgtgatccggcccggcatgaggaggaaggtgcctggagagggcctgcccctgcccaagaccccagagaagagaggagacctgatcatcgagtttgaggtgatcttccctgagcgcatcccccagaccagcaggacagtgctggagcaggtgctgcccatctag

SEQ ID NO: 150293 - DNA, 1230 bp, synthetic construct
  misc_feature 1..1230: note = Description of Artificial Sequence: Synthetic coding sequence
  source 1..1230: mol_type = other DNA
atgagcagcctgcgggcccggctgcctgccaccaggagaagagtggcccagccctttgcccggcctgccagccccagcctggtgcccaggagcggcagcgccatggagagcaacaaggatgaggccgagcgctgcatcagcatcgccctgaaggccatccagagcaaccagcctgaccgggccctgcgcttcctggagaaggcccagaggctgtaccccaccccccgggtgcgggccctgattgagagcctgaaccagaagccccagacagctggggaccagcccccacccacagacaccacccacgccacccacaggaaggccggcggcacagatgcccccagcgccaatggagaggccggcggggagagcaccaagggctacacagctgagcaggtggccgctgtgaagagggtgaagcagtgcaaggactactatgagatcctgggcgtgtccagaggagccagtgatgaggacctgaagaaggcctacagaaggctggccctgaagttccacccagacaagaaccacgcccctggggccacagaggccttcaaggccatcggcacagcctatgctgtgctgagcaaccctgagaagaggaagcagtatgaccagtttggagatgacaagagccaggccgcccggcacggccacggccatggagacttccaccggggctttgaggccgacatcagcccagaagatctcttcaacatgttcttcggcggcggcttccccagcagcaatgtgcacgtgtacagcaatggccgcatgagatacacctaccagcagaggcaggacagaagagacaaccagggagatggcggcctgggcgtgtttgtgcagctgatgcccatcctgatcctgatcctggtgtctgccctgagccagctgatggtgagcagccccccctacagcctgagcccccggcccagcgtgggccacatccacagaagagtgacagaccacctgggcgtggtgtactacgtgggggacaccttcagcgaggagtacacaggcagcagcctgaagacagtggagagaaatgtggaggatgactacatcgccaacctgaggaacaactgctggaaggagaagcagcagaaggagggcctgctgtaccgggcccgctactttggagacacagacatgtaccaccgggcccagaagatgggcacccccagctgcagccggctgtctgaggtgcaggccagcctgcacggctag

SEQ ID NO: 150294 - DNA, 1230 bp, synthetic construct; identical to SEQ ID NO: 150293
  misc_feature 1..1230: note = Description of Artificial Sequence: Synthetic coding sequence
  source 1..1230: mol_type = other DNA

SEQ ID NO: 150295 - DNA, 1128 bp, synthetic construct
  misc_feature 1..1128: note = Description of Artificial Sequence: Synthetic coding sequence
  source 1..1128: mol_type = other DNA
atggagagcaacaaggatgaggccgagcgctgcatcagcatcgccctgaaggccatccagagcaaccagcctgaccgggccctgcgcttcctggagaaggcccagaggctgtaccccaccccccgggtgcgggccctgattgagagcctgaaccagaagccccagacagctggggaccagcccccacccacagacaccacccacgccacccacaggaaggccggcggcacagatgcccccagcgccaatggagaggccggcggggagagcaccaagggctacacagctgagcaggtggccgctgtgaagagggtgaagcagtgcaaggactactatgagatcctgggcgtgtccagaggagccagtgatgaggacctgaagaaggcctacagaaggctggccctgaagttccacccagacaagaaccacgcccctggggccacagaggccttcaaggccatcggcacagcctatgctgtgctgagcaaccctgagaagaggaagcagtatgaccagtttggagatgacaagagccaggccgcccggcacggccacggccatggagacttccaccggggctttgaggccgacatcagcccagaagatctcttcaacatgttcttcggcggcggcttccccagcagcaatgtgcacgtgtacagcaatggccgcatgagatacacctaccagcagaggcaggacagaagagacaaccagggagatggcggcctgggcgtgtttgtgcagctgatgcccatcctgatcctgatcctggtgtctgccctgagccagctgatggtgagcagccccccctacagcctgagcccccggcccagcgtgggccacatccacagaagagtgacagaccacctgggcgtggtgtactacgtgggggacaccttcagcgaggagtacacaggcagcagcctgaagacagtggagagaaatgtggaggatgactacatcgccaacctgaggaacaactgctggaaggagaagcagcagaaggagggcctgctgtaccgggcccgctactttggagacacagacatgtaccaccgggcccagaagatgggcacccccagctgcagccggctgtctgaggtgcaggccagcctgcacggctag

SEQ ID NO: 150296 - DNA, 975 bp, synthetic construct
  misc_feature 1..975: note = Description of Artificial Sequence: Synthetic coding sequence
  source 1..975: mol_type = other DNA
atggccagctactatgagatcctggatgtgcccaggtctgccagcgcagatgacatcaagaaggcctacagaaggaaggccctgcagtggcacccagacaagaacccagacaacaaggagtttgctgagaagaagttcaaggaggtggccgaggcctatgaggtgctgagtgacaagcacaagcgggagatctatgacagatatggccgggagggcctgaccggcaccggcaccggccccagcagagctgaggccggcagcggcggccctggcttcaccttcaccttccgcagccctgaggaggtgttccgggagttctttggaagtggggacccctttgctgagctgtttgatgacctgggccccttcagcgagctgcagaacagaggcagccgccacagcggccccttcttcaccttcagcagcagcttccctggccacagcgacttcagcagcagcagcttctccttcagccctggagctggggccttccgctctgtgtccaccagcaccacctttgtgcagggccgccgcatcaccacccggcgcatcatggagaatggccaggagcgggtggaggtggaggaggatggccagctgaagtctgtgaccatcaacggggtgcctgatgacctggccctgggcctggagctgagccggcgggagcagcagcccagcgtgaccagccgcagcggcggcacccaggtgcagcagaccccagccagctgccccctggacagcgacctgtctgaagatgaggacctgcagctggccatggcctacagcctgtctgagatggaggccgccggcaagaagccagctgggggccgggaggcccagcaccggcggcagggccggcccaaggcccagcaccaggaccccggcctgggcggcacccaggagggcgcccggggggaggccaccaagaggagccccagccctgaggagaaggccagccgctgcctgatcctgtag

SEQ ID NO: 150297 - DNA, 834 bp, synthetic construct
  misc_feature 1..834: note = Description of Artificial Sequence: Synthetic coding sequence
  source 1..834: mol_type = other DNA
atggccagctactatgagatcctggatgtgcccaggtctgccagcgcagatgacatcaagaaggcctacagaaggaaggccctgcagtggcacccagacaagaacccagacaacaaggagtttgctgagaagaagttcaaggaggtggccgaggcctatgaggtgctgagtgacaagcacaagcgggagatctatgacagatatggccgggagggcctgaccggcaccggcaccggccccagcagagctgaggccggcagcggcggccctggcttcaccttcaccttccgcagccctgaggaggtgttccgggagttctttggaagtggggacccctttgctgagctgtttgatgacctgggccccttcagcgagctgcagaacagaggcagccgccacagcggccccttcttcaccttcagcagcagcttccctggccacagcgacttcagcagcagcagcttctccttcagccctggagctggggccttccgctctgtgtccaccagcaccacctttgtgcagggccgccgcatcaccacccggcgcatcatggagaatggccaggagcgggtggaggtggaggaggatggccagctgaagtctgtgaccatcaacggggtgcctgatgacctggccctgggcctggagctgagccggcgggagcagcagcccagcgtgaccagccgcagcggcggcacccaggtgcagcagaccccagccagctgccccctggacagcgacctgtctgaagatgaggacctgcagctggccatggcctacagcctgtctgagatggaggccgccggcaagaagccagcagatgtgttctag

SEQ ID NO: 150298 - DNA, 687 bp, synthetic construct
  misc_feature 1..687: note = Description of Artificial Sequence: Synthetic coding sequence
  source 1..687: mol_type = other DNA
atggccagctactatgagatcctggatgtgcccaggtctgccagcgcagatgacatcaagaaggcctacagaaggaaggccctgcagtggcacccagacaagaacccagacaacaaggagtttgctgagaagaagttcaaggaggtggccgaggcctatgaggtgctgagtgacaagcacaagcgggagatctatgacagatatggccgggagggcctgaccggcaccggcaccggccccagcagagctgaggccggcagcggcggccctggcttcaccttcaccttccgcagccctgaggaggtgttccgggagttctttggaagtggggacccctttgctgagctgtttgatgacctgggccccttcagcgagctgcagaacagaggcagccgccacagcggccccttcttcaccttcagcagcagcttccctggccacagcgacttcagcagcagcagcttctccttcagccctggagctggggccttccgctctgtgtccaccagcaccacctttgtgcagggccgccgcatcaccacccggcgcatcatggagaatggccaggagcgggtggaggtggaggaggatggccagctgaagtctgtgaccatcaacggggtgcctgatgacctggccctgggcctggagctgagccggcgggagcagcagcccagcgtgacctag

SEQ ID NO: 150299 - DNA, 447 bp, synthetic construct
  misc_feature 1..447: note = Description of Artificial Sequence: Synthetic coding sequence
  source 1..447: mol_type = other DNA
atggccagctactatgagatcctggatgtgcccaggtctgccagcgcagatgacatcaagaaggcctacagaaggaaggccctgcagtggcacccagacaagaacccagacaacaaggagtttgctgagaagaagttcaaggaggtggccgaggcctatgaggtgctgagtgacaagcacaagcgggagatctatgacagatatggccgggagggcctgaccggcaccggcaccggccccagcagagctgaggccggcagcggcggccctggcttcaccttcaccttccgcagccctgaggaggtgttccgggagttctttggaagtggggacccctttgctgagctgtttgatgacctgggccccttcagcgagctgcagaacagaggcagccgccacagcggccccttcttcaccttcagcagcagcttccctggccacagctag

SEQ ID NO: 150300 - DNA, 369 bp, synthetic construct
  misc_feature 1..369: note = Description of Artificial Sequence: Synthetic coding sequence
  source 1..369: mol_type = other DNA
atggccagctactatgagatcctggatgtgcccaggtctgccagcgcagatgacatcaagaaggcctacagaaggaaggccctgcagtggcacccagacaagaacccagacaacaaggagtttgctgagaagaagttcaaggaggtggccgaggcctatgaggtgctgagtgacaagcacaagcgggagatctatgacagatatggccgggagggcctgaccggcaccggcaccggccccagcagagctgaggccggcagcggcggccctggcttcaccttcaccttccgcagccctgaggaggtgttccgggagttctttggaagtggggacccctttgctgagctgtttgatgacctgggcccctag

SEQ ID NO: 150301 - DNA, 981 bp, synthetic construct
  misc_feature 1..981: note = Description of Artificial Sequence: Synthetic coding sequence
  source 1..981: mol_type = other DNA
atggtggactactatgaggtgctgggcgtgcagagacatgccagccctgaggacatcaagaaggcctacaggaagctggccctgaagtggcacccagacaagaaccctgagaacaaggaggaggccgagaggaagttcaagcaggtggccgaggcctatgaggtgctgagtgatgccaagaagagggacatctatgacaagtatggcaaggagggcctgaatggaggcggcggcggcggcagccactttgacagcccctttgaatttggcttcaccttcaggaacccagatgatgtgttccgggagttcttcggcggccgggaccccttctcctttgacttctttgaggacccctttgaggacttctttggaaacagaagaggcccccggggcagccgcagccggggcaccggcagcttcttcagcgccttcagcggcttccccagctttggcagcggcttcagcagctttgacaccggcttcaccagctttggcagcctgggccatggaggcctgaccagcttcagcagcaccagctttggaggcagcggcatgggcaacttcaagagcatcagcaccagcaccaagatggtgaatggaaggaagatcaccaccaagagaattgtggagaatggccaggagcgggtggaggtggaggaggatggccagctgaagagcctgaccatcaacggggtggctgatgatgatgccctggccgaggagaggatgaggcggggccagaatgccctgcctgcccagcctgctggcctgcggccccccaagccacccaggcctgccagcctgctgcggcatgccccccactgcctgtctgaggaggagggggagcaggaccggccccgggcccctggcccctgggaccccctggccagcgctgctggcctgaaggagggcggcaagaggaagaagcagaagcagcgggaggagagcaagaagaagaagagcaccaagggcaaccactag

SEQ ID NO: 150302 - DNA, 378 bp, synthetic construct
  misc_feature 1..378: note = Description of Artificial Sequence: Synthetic coding sequence
  source 1..378: mol_type = other DNA
atggtggactactatgaggtgctgggcgtgcagagacatgccagccctgaggacatcaagaaggcctacaggaagctggccctgaagtggcacccagacaagaaccctgagaacaaggaggaggccgagaggaagttcaagcaggtggccgaggcctatgaggtgctgagtgatgccaagaagagggacatctatgacaagtatggcaaggagggcctgaatggaggcggcggcggcggcagccactttgacagcccctttgaatttggcttcaccttcaggaacccagatgatgtgttccgggagttcttcggcggccgggaccccttctcctttgacttctttgaggacccctttgaggacttctttggaaattag

SEQ ID NO: 150303 - DNA, 687 bp, synthetic construct
  misc_feature 1..687: note = Description of Artificial Sequence: Synthetic coding sequence
  source 1..687: mol_type = other DNA
atggtggactactatgaggtgctgggcgtgcagagacatgccagccctgaggacatcaagaaggcctacaggaagctggccctgaagtggcacccagacaagaaccctgagaacaaggaggaggccgagaggaagttcaagcaggtggccgaggcctatgaggtgctgagtgatgccaagaagagggacatctatgacaagtatggcaaggagggcctgaatggaggcggcggcggcggcagccactttgacagcccctttgaatttggcttcaccttcaggaacccagatgatgtgttccgggagttcttcggcggccgggaccccttctcctttgacttctttgaggacccctttgaggacttctttggaaacagaagaggcccccggggcagccgcagccggggcaccggcagcttcttcagcgccttcagcggcttccccagctttggcagcggcttcagcagctttgacaccggcttcaccagctttggcagcctgggccatggaggcctgaccagcttcagcagcaccagctttggaggcagcggcatgggcaacttcaagagcatcagcaccagcaccaagatggtgaatggaaggaagatcaccaccaagagaattgtggagaatggccaggagcgggtggaggtggaggaggatggccagctgaagagcctgacctag

SEQ ID NO: 150304 - DNA, 648 bp, synthetic construct
  misc_feature 1..648: note = Description of Artificial Sequence: Synthetic coding sequence
  source 1..648: mol_type = other DNA
atggtggactactatgaggtgctgggcgtgcagagacatgccagccctgaggacatcaagaaggcctacaggaagctggccctgaagtggcacccagacaagaaccctgagaacaaggaggaggccgagaggaagttcaagcaggtggccgaggcctatgaggtgctgagtgatgccaagaagagggacatctatgacaagtatggcaaggagggcctgaatggaggcggcggcggcggcagccactttgacagcccctttgaatttggcttcaccttcaggaacccagatgatgtgttccgggagttcttcggcggccgggaccccttctcctttgacttctttgaggacccctttgaggacttctttggaaacagaagaggcccccggggcagccgcagccggggcaccggcagcttcttcagcgccttcagcggcttccccagctttggcagcggcttcagcagctttgacaccggcttcaccagctttggcagcctgggccatggaggcctgaccagcttcagcagcaccagctttggaggcagcggcatgggcaacttcaagagcatcagcaccagcaccaagtggctgatggccgagaagagcctgcagcgggagctgagcaggacagtgaagaaggagtag

SEQ ID NO: 150305 - DNA, 726 bp, synthetic construct
  misc_feature 1..726: note = Description of Artificial Sequence: Synthetic coding sequence
  source 1..726: mol_type = other DNA
atggtggactactatgaggtgctgggcgtgcagagacatgccagccctgaggacatcaagaaggcctacaggaagctggccctgaagtggcacccagacaagaaccctgagaacaaggaggaggccgagaggaagttcaagcaggtggccgaggcctatgaggtgctgagtgatgccaagaagagggacatctatgacaagtatggcaaggagggcctgaatggaggcggcggcggcggcagccactttgacagcccctttgaatttggcttcaccttcaggaacccagatgatgtgttccgggagttcttcggcggccgggaccccttctcctttgacttctttgaggacccctttgaggacttctttggaaacagaagaggcccccggggcagccgcagccggggcaccggcagcttcttcagcgccttcagcggcttccccagctttggcagcggcttcagcagctttgacaccggcttcaccagctttggcagcctgggccatggaggcctgaccagcttcagcagcaccagctttggaggcagcggcatgggcaacttcaagagcatcagcaccagcaccaagatggtgaatggaaggaagatcaccaccaagagaattgtggagaatggccaggagcgggtggaggtggaggaggatggccagctgaagagcctgaccatcaacgggaaggagcagctgctgcggctggacaacaagtag

SEQ ID NO: 150306 - DNA, 201 bp, synthetic construct
  misc_feature 1..201: note = Description of Artificial Sequence: Synthetic coding sequence
  source 1..201: mol_type = other DNA
atggtggactactatgaggtgctgggcgtgcagagacatgccagccctgaggacatcaagaaggcctacaggaagctggccctgaagtggcacccagacaagaaccctgagaacaaggaggaggccgagaggaagttcaagcaggtggccgaggcctatgaggtgctgagtgatgccaagaagagggacatctatgactag

SEQ ID NO: 150307 - DNA, 138 bp, synthetic construct
  misc_feature 1..138: note = Description of Artificial Sequence: Synthetic coding sequence
  source 1..138: mol_type = other DNA
atggtggactactatgaggtgctgggcgtgcagagacatgccagccctgaggacatcaagaaggcctacaggaagctggccctgaagtggcacccagacaagaaccctgagaacaaggaggaggccgagaggaagtag

SEQ ID NO: 150308 - DNA, 441 bp, synthetic construct
  misc_feature 1..441: note = Description of Artificial Sequence: Synthetic coding sequence
  source 1..441: mol_type = other DNA
atggtggactactatgaggtgctgggcgtgcagagacatgccagccctgaggacatcaagaaggcctacaggaagctggccctgaagtggcacccagacaagaaccctgagaacaaggaggaggccgagaggaagttcaagcaggtggccgaggcctatgaggtgctgagtgatgccaagaagagggacatctatgacaagtatggcaaggagggcctgaatggaggcggcggcggcggcagccactttgacagcccctttgaatttggcttcaccttcaggaacccagatgatgtgttccgggagttcttcggcggccgggaccccttctcctttgacttctttgaggacccctttgaggacttctttggaaacagaagaggcccccggggcagccgcagccggggcaccggcagcttcttcagcgccttctctggatag

SEQ ID NO: 150309 - DNA, 636 bp, synthetic construct
  misc_feature 1..636: note = Description of Artificial Sequence: Synthetic coding sequence
  source 1..636: mol_type = other DNA
atggtggactactatgaggtgctgggcgtgcagagacatgccagccctgaggacatcaagaaggcctacaggaagctggccctgaagtggcacccagacaagaaccctgagaacaaggaggaggccgagaggaagttcaagcaggtggccgaggcctatgaggtgctgagtgatgccaagaagagggacatctatgacaagtatggcaaggagggcctgaatggaggcggcggcggcggcagccactttgacagcccctttgaatttggcttcaccttcaggaacccagatgatgtgttccgggagttcttcggcggccgggaccccttctcctttgacttctttggagtggctgatgatgatgccctggccgaggagaggatgagaagaggccagaatgccctgcctgcccagcctgctggcctgcggccccccaagccacccaggcctgccagcctgctgcggcatgccccccactgcctgtctgaggaggagggggagcaggaccggccccgggcccctggcccctgggaccccctggccagcgctgctggcctgaaggagggcggcaagaggaagaagcagaagcagcgggaggagagcaagaagaagaagagcaccaagggcaaccactag

SEQ ID NO: 150310 - DNA, 834 bp, synthetic construct
  misc_feature 1..834: note = Description of Artificial Sequence: Synthetic coding sequence
  source 1..834: mol_type = other DNA
atgccccacccccgcatcctgaagaggcccaagaagagggacatctatgacaagtatggcaaggagggcctgaatggaggcggcggcggcggcagccactttgacagcccctttgaatttggcttcaccttcagaaatccagatgatgtgttccgggagttctttggaggccgggaccccttctcctttgacttctttgaggacccctttgaggacttcttcggcaacagaagaggcccccggggcagccgcagccggggcaccggcagcttcttcagcgccttcagcggcttccccagctttggaagtggcttcagcagctttgacaccggcttcaccagctttggcagcctgggccacggcggcctgaccagcttcagcagcaccagctttggaggcagcggcatgggcaacttcaagagcatcagcaccagcaccaagatggtgaatggaaggaagatcaccaccaagagaattgtggagaatggccaggagcgggtggaggtggaggaggatggccagctgaagagcctgaccatcaatggagtggctgatgatgatgccctggccgaggagaggatgagaagaggccagaatgccctgcctgcccagcctgctggcctgcggccccccaagccacccaggcctgccagcctgctgcggcatgccccccactgcctgtctgaggaggagggggagcaggaccggccccgggcccctggcccctgggaccccctggccagcgctgctggcctgaaggagggcggcaagaggaagaagcagaagcagcgggaggagagcaagaagaagaagagcaccaagggcaaccactag

SEQ ID NO: 150311 - DNA, 297 bp, synthetic construct
  misc_feature 1..297: note = Description of Artificial Sequence: Synthetic coding sequence
  source 1..297: mol_type = other DNA
atggtggactactatgaggtgctgggcgtgcagagacatgccagccctgaggacatcaagaaggcctacaggaagctggccctgaagtggcacccagacaagaaccctgagaacaaggaggaggccgagaggaagttcaagcaggtggccgaggcctatgaggtgctgagtgatgccaagaagagggacatctatgacaagtatggcaaggagggcctgaatggaggcggcggcggcggcagccactttgacagcccctttgaatttggcttcaccttcaggaacccagatgactag

SEQ ID NO: 150312 - DNA, 672 bp, synthetic construct
  misc_feature 1..672: note = Description of Artificial Sequence: Synthetic coding sequence
  source 1..672: mol_type = other DNA
atggccaccccccagagcatcttcatctttgccatctgcatcctgatgatcacagagctgatcctggccagcaagagctactatgacatcctgggcgtgcccaagagcgccagcgagcggcagatcaagaaggccttccacaagctggccatgaagtaccacccagacaagaacaagagcccagatgctgaggccaagttccgggagattgctgaggcctatgagaccctgagtgatgccaacagaaggaaggagtatgacaccctgggccacagcgccttcaccagcggcaagggccagaggggcagcggcagcagctttgagcagagcttcaacttcaactttgatgacctcttcaaggactttggcttcttcggccagaaccagaacacaggcagcaagaagagatttgagaaccacttccagacccggcaggacggcggcagcagccggcagaggcaccacttccaggagttctcctttggaggcggcctgtttgatgacatgtttgaggacatggagaagatgttctccttcagcggctttgacagcaccaaccagcacacagtgcagacagaaaatcgcttccacggcagcagcaagcactgcaggacagtgacccagaggcggggcaacatggtgaccacctacacagactgcagcggccagtag

SEQ ID NO: 150313 - DNA, 2382 bp, synthetic construct
  misc_feature 1..2382: note = Description of Artificial Sequence: Synthetic coding sequence
  source 1..2382: mol_type = other DNA
atgggcgtgtggctgaacaaggatgactacatccgggacctgaagaggatcatcctgtgcttcctgattgtgtacatggccatcctggtgggcacagaccaggacttctacagcctgctgggcgtgtccaagacagccagcagccgggagatccggcaggccttcaagaagctggccctgaagctgcacccagacaagaaccccaacaaccccaatgcccacggggacttcctgaagatcaacagagcctatgaggtgctgaaggatgaggacctgaggaagaagtatgacaagtatggagagaagggcctggaggacaaccagggcggccagtatgagagctggaactactaccgctatgactttggcatctatgatgatgatcctgagatcatcaccctggagcggcgggagtttgatgctgctgtgaacagcggggagctgtggtttgtgaacttctacagccctggctgcagccactgccacgacctggcccccacctggagggactttgccaaggaggtggatggcctgctgagaattggagctgtgaactgtggagatgacaggatgctgtgcaggatgaagggcgtgaacagctaccccagcctcttcatcttccgcagcggcatggcccctgtgaagtaccatggagacaggagcaaggagagcctggtgtcctttgccatgcagcacgtgcgcagcacagtgacagagctgtggacaggcaactttgtgaacagcatccagacagcctttgctgctggcatcggctggctgatcaccttctgcagcaagggcggggactgcctgaccagccagacccggctgcggctgagcggcatgctggatggcctggtgaatgtgggctggatggactgtgccacccaggacaacctgtgcaagagcctggacatcaccaccagcaccacagcctacttccccccaggggccaccctgaacaacaaggagaagaacagcatcctcttcctgaacagcctggatgccaaggagatctacctggaggtgatccacaacctgcctgactttgagctgctgagcgccaacaccctggaggaccggctggcccaccaccgctggctgctcttcttccactttgggaagaatgaaaacagcaatgaccctgagctgaagaagctgaagaccctgctgaagaatgaccacatccaggtgggccgctttgactgcagcagcgccccagacatctgcagcaacctgtatgtgttccagcccagcctggccgtgttcaagggccagggcaccaaggagtatgagatccaccacggcaagaagatcctgtatgacatcctggcctttgccaaggagagcgtgaacagccacgtgaccaccctgggcccccagaacttccctgccaatgacaaggagccctggctggtggacttctttgccccctggtgccccccctgccgggccctgctgcctgagctgcggcgggccagcaacctgctgtatggccagctgaagtttggcaccctggactgcaccgtgcatgagggcctgtgcaacatgtacaacatccaggcctaccccaccaccgtggtgttcaaccagagcaacatccatgaatatgagggccaccacagcgctgagcagatcctggagttcatcgaggacctgatgaaccccagcgtggtgtccctgacccccaccaccttcaatgagctggtgacccagaggaagcacaatgaggtgtggatggtggacttctacagcccctggtgccacccctgccaggtgctgatgcctgagtggaagaggatggcccggaccctgaccggcctcatcaacgtgggcagcattgactgccagcagtaccacagcttctgtgcccaggagaatgtgcagcgctacccagagatccgcttcttcccccccaagagcaacaaggcctaccactaccacagctacaacggctggaacagagatgcctacagcctgcgcatctggggcctgggcttcctgccccaggtgtccacagacctgaccccccagaccttcagcgagaaggtgctgcagggcaagaaccactgggtgattgacttctacgccccctggtgtggcccctgccagaactttgcccctgagtttgagctgctggccaggatgatcaagggcaaggtgaaggccggcaaggtggactgccaggcctatgcccagacctgccagaaggccggcatccgggcctaccccaccgtgaagttctacttctatgagcgggccaagaggaacttccaggaggagcagatcaacaccagagatgccaaggccatcgccgccctgatcagcgagaagctggagaccctgaggaaccagggcaagaggaacaaggatgagctgtag

SEQ ID NO: 150314 - DNA, 2244 bp, synthetic construct
  misc_feature 1..2244: note = Description of Artificial Sequence: Synthetic coding sequence
  source 1..2244: mol_type = other DNA
atgggcgtgtggctgaacaaggatgactacatccgggacctgaagaggatcatcctgtgcttcctgattgtgtacatggccatcctggtgggcacagaccaggacttctacagcctgctgggcgtgtccaagacagccagcagccgggagatccggcaggccttcaagaagctggccctgaagctgcacccagacaagaaccccaacaaccccaatgcccacggggacttcctgaagatcaacagagcctatgaggtgctgaaggatgaggacctgaggaagaagtatgacaagtatggagagaagggcctggaggacaaccagggcggccagtatgagagctggaactactaccgctatgactttggcatctatgatgatgatcctgagatcatcaccctggagcggcgggagtttgatgctgctgtgaacagcggggagctgtggtttgtgaacttctacagccctggctgcagccactgccacgacctggcccccacctggagggactttgccaaggaggtggatggcctgctgagaattggagctgtgaactgtggagatgacaggatgctgtgcaggatgaagggcgtgaacagctaccccagcctcttcatcttccgcagcggcatggcccctgtgaagtaccatggagacaggagcaaggagagcctggtgtcctttgccatgcagcacgtgcgcagcacagtgacagagctgtggacaggcaactttgtgaacagcatccagacagcctttgctgctggcatcggctggctgatcaccttctgcagcaagggcggggactgcctgaccagccagacccggctgcggctgagcggcatgctgttcctgaacagcctggatgccaaggagatctacctggaggtgatccacaacctgcctgactttgagctgctgagcgccaacaccctggaggaccggctggcccaccaccgctggctgctcttcttccactttgggaagaatgaaaacagcaatgaccctgagctgaagaagctgaagaccctgctgaagaatgaccacatccaggtgggccgctttgactgcagcagcgccccagacatctgcagcaacctgtatgtgttccagcccagcctggccgtgttcaagggccagggcaccaaggagtatgagatccaccacggcaagaagatcctgtatgacatcctggcctttgccaaggagagcgtgaacagccacgtgaccaccctgggcccccagaacttccctgccaatgacaaggagccctggctggtggacttctttgccccctggtgccccccctgccgggccctgctgcctgagctgcggcgggccagcaacctgctgtatggccagctgaagtttggcaccctggactgcaccgtgcatgagggcctgtgcaacatgtacaacatccaggcctaccccaccaccgtggtgttcaaccagagcaacatccatgaatatgagggccaccacagcgctgagcagatcctggagttcatcgaggacctgatgaaccccagcgtggtgtccctgacccccaccaccttcaatgagctggtgacccagaggaagcacaatgaggtgtggatggtggacttctacagcccctggtgccacccctgccaggtgctgatgcctgagtggaagaggatggcccggaccctgaccggcctcatcaacgtgggcagcattgactgccagcagtaccacagcttctgtgcccaggagaatgtgcagcgctacccagagatccgcttcttcccccccaagagcaacaaggcctaccactaccacagctacaacggctggaacagagatgcctacagcctgcgcatctggggcctgggcttcctgccccaggtgtccacagacctgaccccccagaccttcagcgagaaggtgctgcagggcaagaaccactgggtgattgacttctacgccccctggtgtggcccctgccagaactttgcccctgagtttgagctgctggccaggatgatcaagggcaaggtgaaggccggcaaggtggactgccaggcctatgcccagacctgccagaaggccggcatccgggcctaccccaccgtgaagttctacttctatgagcgggccaagaggaacttccaggaggagcagatcaacaccagagatgccaaggccatcgccgccctgatcagcgagaagctggagaccctgaggaaccagggcaagaggaacaaggaccacctgtag

SEQ ID NO: 150315 - DNA, 534 bp, synthetic construct
  misc_feature 1..534: note = Description of Artificial Sequence: Synthetic coding sequence
  source 1..534: mol_type = other DNA
atgggcgtgtggctgaacaaggatgactacatccgggacctgaagaggatcatcctgtgcttcctgattgtgtacatggccatcctggtgggcacagaccaggacttctacagcctgctgggcgtgtccaagacagccagcagccgggagatccggcaggccttcaagaagctggccctgaagctgcacccagacaagaaccccaacaaccccaatgcccacggggacttcctgaagatcaacagagcctatgaggtgctgaaggatgaggacctgaggaagaagtatgacaagtatggagagaagggcctggaggacaaccagggcggccagtatgagagctggaactactaccgctatgactttggcatctatgatgatgatcctgagatcatcaccctggagcggcgggagtttgatgctgctgtgaacagcggggagctgtggtttgtgaacttctacagccctggctgcagccactgccacgacctggcccccacctggagggactttgccaaggagagcctgaggtag

SEQ ID NO: 150316 - DNA, 999 bp, synthetic construct
  misc_feature 1..999: note = Description of Artificial Sequence: Synthetic coding sequence
  source 1..999: mol_type = other DNA
atgggcgtgtggctgaacaaggatgactacatccgggacctgaagaggatcatcctgtgcttcctgattgtgtacatggccatcctggtgggcacagaccaggacttctacagcctgctgggcgtgtccaagacagccagcagccgggagatccggcaggccttcaagaagctggccctgaagctgcacccagacaagaaccccaacaaccccaatgcccacggggacttcctgaagatcaacagagcctatgaggtgctgaaggatgaggacctgaggaagaagtatgacaagtatggagagaagggcctggaggacaaccagggcggccagtatgagagctggaactactaccgctatgactttggcatctatgatgatgatcctgagatcatcaccctggagcggcgggagtttgatgctgctgtgaacagcggggagctgtggtttgtgaacttctacagccctggctgcagccactgccacgacctggcccccacctggagggactttgccaaggaggtggatggcctgctgagaattggagctgtgaactgtggagatgacaggatgctgtgcaggatgaagggcgtgaacagctaccccagcctcttcatcttccgcagcggcatggcccctgtgaagtaccatggagacaggagcaaggagagcctggtgtcctttgccatgcagcacgtgcgcagcacagtgacagagctgtggacaggcaactttgtgaacagcatccagacagcctttgctgctggcatcggctggctgatcaccttctgcagcaagggcggggactgcctgaccagccagacccggctgcggctgagcggcatgctggatggcctggtgaatgtgggctggatggactgtgccacccaggacaacctgtgcaagagcctggacatcaccaccagcaccacagcctacttccccccaggggccaccctgaacaacaaggagaagaacagcatcctgctgctgcactag

SEQ ID NO: 150317 - DNA, 6732 bp, synthetic construct
  misc_feature 1..6732: note = Description of Artificial Sequence: Synthetic coding sequence
  source 1..6732: mol_type = other DNA
atgaacatcatccgggagaacaaggacctggcctgcttctacaccaccaagcacagctggaggggcaagtacaagagggtcttctctgtgggcacccacgccatcaccacctacaaccccaacaccctggaggtgaccaaccagtggccctatggagacatctgcagcatcagccctgtgggcaagggccagggcacagagttcaacctgaccttcaggaagggcagcggcaagaagtctgagaccctgaagttcagcacagagcacaggacagagctgctgacagaggccctgcgcttcagaacagacttcagcgagggcaagatcaccggccgccgctacaactgctacaagcaccactggagcgacagcaggaagcctgtgatcctggaggtgacccctgggggctttgaccagatcaacccagccaccaacagagtgctgtgcagctatgactacagaaacatcgagggctttgtggacctgagtgactaccagggcggcttctgcatcctgtatggaggcttcagccggctgcacctgtttgccagcgagcagcgggaggagatcatcaagagcgccatcgaccacgccggcaactacatcggcatcagcctgcgcatcaggaaggagcccctggagtttgagcagtacctgaacctgcgctttgggaagtacagcacagatgagagcatcaccagcctggccgagtttgtggtgcagaagatcagccccaggcacagcgagcctgtgaagagggtgctggccctgacagagacctgcctggtggagcgggaccctgccacctacaacatcgccaccctgaagcccctgggggaggtgtttgccctggtgtgtgacagcgagaacccccagctgttcaccatcgagttcatcaagggccaggtgaggaagtacagcagcacagagcgggacagcctgctggccagcctgctggatggagtgcgggccagcggcaacagagatgtgtgtgtgaagatgacccccacccacaagggccagcgctggggcctgctgtccatgcctgtggatgaggaggtggagagcctgcacctgcgcttcctggccaccccaccaaatggaaactttgctgatgctgtgttccgcttcaatgccaacatctcctacagcggcgtgctgcatgctgtgacccaggacggcctcttcagcgagaacaaggagaagctgatcaacaatgccatcacagccctgctgagccaggagggagatgtggtggccagcaatgctgagctggagagccagttccaggccgtgcggcggctggtggccagcaaggccggcttcctggccttcacccagctgcccaagttccgggagcggctgggcgtgaaggtggtgaaggccctgaagaggagcaacaacggcatcatccatgctgctgtggacatgctgtgtgccctgatgtgccccatgcatgatgattatgacctgcggcaggagcagctgaacaaggccagcctgctgagcagcaagaagttcctggagaacctgctggagaagttcaacagccacgtggaccatggaactggagccctggtgatcagcagcctgctggacttcctgacctttgccctgtgtgccccctacagcgagaccacagagggccagcagtttgacatgctgctggagatggtggccagcaatggccgcaccctcttcaagctgttccagcaccccagcatggccatcatcaagggagctggcctggtgatgaaggccatcatcgaggagggggacaaggagatcgccaccaagatgcaggagctggccctgtctgagggcgccctgcccaggcacctgcacacagccatgttcaccatcagcagtgaccagaggatgctgaccaaccggcagctgagccgccacctggtgggcctgtggacagctgacaatgccacagccaccaacctgctgaagaggatcctgcccccaggcctgctggcctacctggagagcagtgacctggtgcctgagaaggatgctgacaggatgcacgtgcgggacaacgtgaagatcgccatggaccagtatggcaagttcaacaaggtgcctgagtggcagaggctggccggcaaggccgccaaggaggtggagaagtttgccaaggagaaggtggacctggtgctgatgcactggagggacaggatgggcatcgcccagaaggagaacatcaaccagaagcctgtggtgctgaggaagaggcggcagaggatcaagattgaggccaactgggacctcttctactacagatttggccaggaccacgcccggagcaacctgatctggaacttcaagacccgggaggagctgaaggacaccctggagagcgagatgagggccttcaacatcgaccgggagctgggcagcgccaacgtcatctcctggaaccaccacgagtttgaggtgaagtatgaatgtctggccgaggagatcaagattggagactactacctgcggctgctgctggaggaggatgaaaatgaggagagcggcagcatcaagaggagctatgagttcttcaatgagctgtaccaccgcttcctgctgacccccaaggtgaacatgaagtgcctgtgcctgcaggccctggccatcgtgtatggccgctgccacgaggagatcggccccttcacagacacccgctacatcatcggcatgctggagcgctgcacagacaagctggagcgggacaggctcatcctcttcctgaacaagctgatcctgaacaagaagaatgtgaaggacctgatggacagcaatggcatccgcatcctggtggacctgctgaccctggcccacctgcacgtgtcccgggccaccgtgcccctgcagagcaatgtcatcgaggccgccccagacatgaagcgggagagcgagaaggagtggtactttggaaatgctgacaaggagaggagcggcccctacggcttccacgagatgcaggagctgtggaccaagggcatgctgaatgccaagacccgctgctgggcccagggcatggatggctggaggcccctgcagagcatcccccagctgaagtggtgcctgctggccagcggccaggccgtgctgaatgaaacagacctggccaccctcatcctgaacatgctgatcaccatgtgtggctacttccccagccgggaccaggacaatgccatcatccggcccctgcccaaggtgaagaggctgctgagtgacagcacctgcctgccccacatcatccagctgctgctgacctttgaccccatcctggtggagaaggtggccatcctgctgtaccacatcatgcaggacaacccccagctgccccggctgtacctgagcggggtcttcttcttcatcatgatgtacacaggcagcaatgtgctgcctgtggcccgcttcctgaagtacacccacaccaagcaggccttcaagtctgaggagaccaagggccaggacatcttccagaggagcatcctgggccacatcctgcctgaggccatggtgtgctacctggagaactatgagcctgagaagttcagcgagatcttcctgggggagtttgacaccccagaggccatctggagcagcgagatgaggcggctgatgattgagaagattgctgcccacctggccgacttcaccccccggctgcagagcaacacccgggccctgtaccagtactgccccatccccatcatcaactacccccagctggagaatgaactcttctgcaacatctactacctgaagcagctgtgtgacaccctgcgcttcccagactggcccatcaaggaccctgtgaagctgctgaaggacaccctggatgcctggaagaaggaggtggagaagaagccacccatgatgagcattgatgatgcctatgaggtgctgaacctgccccagggccagggcccccatgatgagagcaagatcaggaaggcctacttccggctggcccagaagtaccacccagacaagaaccctgagggccgggacatgtttgagaaggtgaacaaggcctatgagttcctgtgcaccaagagcgccaagatcgtggatggccctgaccctgagaacatcatcctgatcctgaagacccagagcatcctcttcaacagacacaaggaggacctgcagccctacaagtatgccggctaccccatgctgatccgcaccatcaccatggagaccagtgatgacctgctcttcagcaaggagagccccctgctgcctgctgccacagagctggccttccacacagtgaactgcagcgccctgaatgctgaggagctgcggagagaaaatggcctggaggtgctgcaggaggccttcagccgctgtgtggccgtgctgacccgggccagcaagcccagcgacatgtctgtgcaggtgtgtggctacatcagcaagtgctacagcgtggccgcccagtttgaagaatgtcgggagaagatcacagagatgcccagcatcatcaaggacctgtgccgggtgctgtactttgggaagagcatcccccgggtggccgccctgggcgtggagtgtgtgtcctcctttgctgtggacttctggctgcagacccacctgttccaggccggcatcctgtggtacctgctgggcttcctgttcaactatgactacaccctggaggagagcggcatccagaagtctgaggagaccaaccagcaggaggtggccaacagcctggccaagctgtctgtgcacgccctgagccggctgggcggctacctggccgaggagcaggccaccccagagaaccccaccatcaggaagagcctggccggcatgctgaccccctacgtggccaggaagctggccgtggcctctgtgacagagatcctgaagatgctgaacagcaacacagagagcccctacctgatctggaacaacagcaccagggctgagctgctggagttcctggagagccagcaggagaacatgatcaagaagggggactgtgacaagacctacggcagcgagtttgtgtacagcgaccacgccaaggagctgattgtgggggagatctttgtgcgggtgtacaatgaggtgcccaccttccagctggaggtgcccaaggcctttgctgccagcctgctggactacatcggcagccaggcccagtacctgcacaccttcatggccatcacccacgccgccaaggtggagagcgagcagcacggggaccggctgccccgggtggagatggccctggaggccctgagaaatgtcatcaagtacaaccctggcagcgagagtgaatgtattggccacttcaagctgatcttcagcctgctgcgggtgcacggggccggccaggtgcagcagctggccctggaggtggtgaacatcgtgaccagcaaccaggactgtgtgaacaacattgctgagagcatggtgctgagcagcctgctggccctgctgcacagcctgcccagcagccggcagctggtgctggagaccctgtatgccctgaccagcagcaccaagatcatcaaggaggccatggccaagggggccctgatctacctgctggacatgttctgcaacagcacccacccccaggtgcgggcccagacagctgagctgtttgccaagatgacagctgacaagctgattggccccaaggtgcgcatcaccctgatgaagttcctgcccagcgtcttcatggatgccatgagggacaaccctgaggccgctgtgcacatctttgagggcacccatgagaaccctgagctgatctggaatgacaacagccgggacaaggtgtccaccaccgtgcgggagatgatgctggagcacttcaagaaccagcaggacaaccctgaggccaactggaagctgcctgaagattttgctgtggtgtttggagaggccgagggggagctggccgtgggcggcgtcttcctgcgcatcttcatcgcccagcctgcctgggtgctgaggaagccccgggagttcctgattgccctgctggagaagctgacagagctgctggagaagaacaacccccacggggagaccctggagaccctgaccatggccaccgtgtgcctcttcagcgcccagccccagctggccgaccaggtgccccccctgggccacctgcccaaggtgatccaggccatgaaccacagaaataatgccatccccaagagcgccatccgggtcatccacgccctgtctgaaaatgagctgtgtgtgcgggccatggccagcctggagaccatcggccccctgatgaatggcatgaagaagagagctgacacagtgggcctggcctgtgaggccatcaacaggatgttccagaaggagcagagcgagctggtggcccaggccctgaaggctgacctggtgccctacctgctgaagctgctggagggcatcggcctggagaacctggacagccctgctgccaccaaggcccagatcgtgaaggccctgaaggccatgaccaggagcctgcagtacggggagcaggtgaatgagatcctgtgccgcagctctgtgtggagcgccttcaaggaccagaagcatgacctcttcatcagcgagagccagacagctggctacctgaccggccctggggtggccggctacctgacagctggcaccagcacctctgtgatgagcaacctgcccccacctgtggaccacgaggccggggacctgggctaccagacctag

SEQ ID NO: 150318 - DNA, 2673 bp, synthetic construct
  misc_feature 1..2673: note = Description of Artificial Sequence: Synthetic coding sequence
  source 1..2673: mol_type = other DNA
atgtaccagatcagcaagaacagcggctgggcccggagccgggagtacaacttcaacctgaagacccagagcatcctcttcaacagacacaaggaggacctgcagccctacaagtatgccggctaccccatgctgatccgcaccatcaccatggagaccagtgatgacctgctcttcagcaaggagagccccctgctgcctgctgccacagagctggccttccacacagtgaactgcagcgccctgaatgctgaggagctgcggcgggagaatggcctggaggtgctgcaggaggccttcagccgctgtgtggccgtgctgacccgggccagcaagcccagcgacatgtctgtgcaggtgtgtggctacatcagcaagtgctacagcgtggccgcccagtttgaggagtgccgggagaagatcacagagatgcccagcatcatcaaggacctgtgccgggtgctgtactttgggaagagcatcccccgggtggccgccctgggcgtggagtgtgtgagcagctttgctgtggacttctggctgcagacccacctgttccaggccggcatcctgtggtacctgctgggcttcctgttcaactatgactacaccctggaggagagcggcatccagaagtctgaggagaccaaccagcaggaggtggccaacagcctggccaagctgtctgtgcacgccctgagccggctgggcggctacctggccgaggagcaggccaccccagagaaccccaccatcaggaagagcctggccggcatgctgaccccctacgtggccaggaagctggccgtggcctctgtgacagagatcctgaagatgctgaacagcaacacagagagcccctacctgatctggaacaacagcaccagggctgagctgctggagttcctggagagccagcaggagaacatgatcaagaagggggactgtgacaagacctacggcagcgagtttgtgtacagcgaccacgccaaggagctgattgtgggggagatctttgtgcgggtgtacaatgaggtgcccaccttccagctggaggtgcccaaggcctttgctgccagcctgctggactacatcggcagccaggcccagtacctgcacaccttcatggccatcacccatgctgccaaggtggagagcgagcagcacggggaccggctgccccgggtggagatggccctggaggccctgagaaatgtcatcaagtacaaccctggcagcgagagcgagtgcatcggccacttcaagctgatcttcagcctgctgcgggtgcatggagctggccaggtgcagcagctggccctggaggtggtgaacatcgtgaccagcaaccaggactgtgtgaacaacattgctgagagcatggtgctgagcagcctgctggccctgctgcacagcctgcccagcagccggcagctggtgctggagaccctgtatgccctgaccagcagcaccaagatcatcaaggaggccatggccaagggggccctgatctacctgctggacatgttctgcaacagcacccacccccaggtgcgggcccagacagctgagctgtttgccaagatgacagctgacaagctgattggccccaaggtgcgcatcaccctgatgaagttcctgcccagcgtcttcatggatgccatgagggacaaccctgaggccgctgtgcacatctttgagggcacccatgaaaatcctgagctgatctggaatgacaacagccgggacaaggtgtccaccaccgtgcgggagatgatgctggagcacttcaagaaccagcaggacaaccctgaggccaactggaagctgcctgaggactttgctgtggtgtttggagaggccgagggggagctggccgtgggcggcgtcttcctgcgcatcttcatcgcccagcctgcctgggtgctgaggaagccccgggagttcctgattgccctgctggagaagctgacagagctgctggagaagaacaacccccatggagagaccctggagaccctgaccatggccaccgtgtgcctcttcagcgcccagccccagctggccgaccaggtgccccccctgggccacctgcccaaggtgatccaggccatgaaccacaggaacaatgccatccccaagagcgccatccgggtcatccacgccctgtctgaaaatgagctgtgtgtgcgggccatggccagcctggagaccatcggccccctgatgaatggcatgaagaagagagctgacacagtgggcctggcctgtgaggccatcaacaggatgttccagaaggagcagagcgagctggtggcccaggccctgaaggctgacctggtgccctacctgctgaagctgctggagggcatcggcctggagaacctggacagccctgctgccaccaaggcccagatcgtgaaggccctgaaggccatgaccaggagcctgcagtatggagagcaggtgaatgagatcctgtgccgcagctctgtgtggagcgccttcaaggaccagaagcatgacctcttcatcagcgagagccagacagctggctacctgactggacctggggtggccggctacctgacagctggcaccagcacctctgtgatgagcaacctgcccccacctgtggaccatgaagctggggacctgggctaccagacctag

SEQ ID NO: 150319 - DNA, 351 bp, synthetic construct
  misc_feature 1..351: note = Description of Artificial Sequence: Synthetic coding sequence
  source 1..351: mol_type = other DNA
atggccagcacagtggtggccgtgggcctgaccatcgctgctgctggctttgctggccgctacgtgctgcaggccatgaagcacatggagccccaggtgaagcaggtgttccagagcctgcccaagagcgccttcagcggcggctactaccggggcggctttgagcccaagatgaccaagcgggaggccgccctgatcctgggcgtgagccccacagccaacaagggcaagatcagagatgcccaccggcgcatcatgctgctgaaccacccagacaagggcggcagcccctacatcgccgccaagatcaatgaggccaaggacctgctggagggccaggccaagaagtag

SEQ ID NO: 150320 - DNA, 1707 bp, synthetic construct
  misc_feature 1..1707: note = Description of Artificial Sequence: Synthetic coding sequence
  source 1..1707: mol_type = other DNA
atgctgctgctgcccagcgctgctgatggccggggcacagccatcacccacgccctgaccagcgccagcaccctgtgccaggtggagcctgtgggccgctggtttgaggcctttgtgaagagaagaaacagaaatgccagcgccagcttccaggagctggaggacaagaaggagctgtctgaggagagtgaagatgaggagctgcagctggaggagttccccatgctgaagaccctggaccccaaggactggaagaaccaggaccactatgctgtgctgggcctgggccacgtgcgctacaaggccacccagaggcagatcaaggccgcccacaaggccatggtgctgaagcaccacccagacaagaggaaggccgccggggagcccatcaaggagggggacaatgactacttcacctgcatcaccaaggcctatgagatgctgagtgaccctgtgaagaggcgggccttcaacagcgtggaccccacctttgacaacagcgtgcccagcaagtctgaggccaaggacaacttctttgaggtgttcacccctgtgtttgagaggaacagccgctggagcaacaagaagaatgtgcccaagctgggggacatgaacagcagctttgaagatgtggacatcttctacagcttctggtacaactttgacagctggagggagttctcctacctggatgaggaggagaaggagaaggcagaatgtagagatgagcggcgctggattgagaagcagaacagagccacccgggcccagaggaagaaggaggagatgaaccgcatccgcaccctggtggacaatgcctacagctgtgacccccgcatcaagaagttcaaggaggaggagaaggccaagaaggaggccgagaagaaggccaaggccgaggccaagaggaaggagcaggaggccaaggagaagcagaggcaggccgagctggaggccgcccggctggccaaggagaaggaggaggaggaggtgcggcagcaggccctgctggccaagaaggagaaggacatccagaagaaggccatcaagaaggagcggcagaagctgaggaacagctgcaagattgaggagatcaatgagcagatcaggaaggagaaggaggaggccgaggccaggatgaggcaggccagcaagaacacagagaagagcactggaggcggcggcaatggcagcaagaactggagcgaagatgacctgcagctgctgatcaaggctgtgaacctcttccctgctggcaccaacagccgctgggaggtgattgccaactacatgaacatccacagcagcagtggagtgaagaggacagccaaggatgtgattggcaaggccaagagcctgcagaagctggacccccaccagaaggatgacatcaacaagaaggcctttgacaagttcaagaaggagcacggcgtggtgccccaggccgacaatgccacccccagcgagagatttgagggcccctacacagacttcaccccctggaccacagaggagcagaagctgctggagcaggccctgaagacctaccctgtgaacaccccagagcgctgggagaagattgctgaggccgtgcccggccgcaccaagaaggactgcatgaagcgctacaaggagctggtggagatggtgaaggccaagaaggccgcccaggagcaggtgctgaatgccagccgggccaagaagtag

SEQ ID NO: 150321 - DNA, 1866 bp, synthetic construct
  misc_feature 1..1866: note = Description of Artificial Sequence: Synthetic coding sequence
  source 1..1866: mol_type = other DNA
atgctgctgctgcccagcgctgctgatggccggggcacagccatcacccacgccctgaccagcgccagcaccctgtgccaggtggagcctgtgggccgctggtttgaggcctttgtgaagagaagaaacagaaatgccagcgccagcttccaggagctggaggacaagaaggagctgtctgaggagagtgaagatgaggagctgcagctggaggagttccccatgctgaagaccctggaccccaaggactggaagaaccaggaccactatgctgtgctgggcctgggccacgtgcgctacaaggccacccagaggcagatcaaggccgcccacaaggccatggtgctgaagcaccacccagacaagaggaaggccgccggggagcccatcaaggagggggacaatgactacttcacctgcatcaccaaggcctatgagatgctgagtgaccctgtgaagaggcgggccttcaacagcgtggaccccacctttgacaacagcgtgcccagcaagtctgaggccaaggacaacttctttgaggtgttcacccctgtgtttgagaggaacagccgctggagcaacaagaagaatgtgcccaagctgggggacatgaacagcagctttgaagatgtggacatcttctacagcttctggtacaactttgacagctggagggagttctcctacctggatgaggaggagaaggagaaggcagaatgtagagatgagcggcgctggattgagaagcagaacagagccacccgggcccagaggaagaaggaggagatgaaccgcatccgcaccctggtggacaatgcctacagctgtgacccccgcatcaagaagttcaaggaggaggagaaggccaagaaggaggccgagaagaaggccaaggccgaggccaagaggaaggagcaggaggccaaggagaagcagaggcaggccgagctggaggccgcccggctggccaaggagaaggaggaggaggaggtgcggcagcaggccctgctggccaagaaggagaaggacatccagaagaaggccatcaagaaggagcggcagaagctgaggaacagctgcaagacctggaaccacttcagtgacaatgaagctgagcgggtgaagatgatggaggaggtggagaagctgtgtgaccggctggagctggccagcctgcagtgcctgaatgagaccctgaccagctgcaccaaggaggtgggcaaggccgccctggagaagcagatcgaggagatcaatgagcagatcaggaaggagaaggaggaggccgaggccaggatgaggcaggccagcaagaacacagagaagagcactggaggcggcggcaatggcagcaagaactggagcgaagatgacctgcagctgctgatcaaggctgtgaacctcttccctgctggcaccaacagccgctgggaggtgattgccaactacatgaacatccacagcagcagcggcgtgaagaggacagccaaggatgtgattggcaaggccaagagcctgcagaagctggacccccaccagaaggatgacatcaacaagaaggcctttgacaagttcaagaaggagcacggcgtggtgccccaggccgacaatgccaccccatctgaaagatttgagggcccctacacagacttcaccccctggaccacagaggagcagaagctgctggagcaggccctgaagacctaccctgtgaacaccccagagcgctgggagaagattgctgaggccgtgcccggccgcaccaagaaggactgcatgaagcgctacaaggagctggtggagatggtgaaggccaagaaggccgcccaggagcaggtgctgaatgccagccgggccaagaagtag

SEQ ID NO: 150322 - DNA, 609 bp, synthetic construct
  misc_feature 1..609: note = Description of Artificial Sequence: Synthetic coding sequence
  source 1..609: mol_type = other DNA
atgctgctgctgcccagcgctgctgatggccggggcacagccatcacccacgccctgaccagcgccagcaccctgtgccaggtggagcctgtgggccgctggtttgaggcctttgtgaagagaagaaacagaaatgccagcgccagcttccaggagctggaggacaagaaggagctgtctgaggagagtgaagatgaggagctgcagctggaggagttccccatgctgaagaccctggaccccaaggactggaagaaccaggaccactatgctgtgctgggcctgggccacgtgcgctacaaggccacccagaggcagatcaaggccgcccacaaggccatggtgctgaagcaccacccagacaagaggaaggccgccggggagcccatcaaggagggggacaatgactacttcacctgcatcaccaaggcctatgagatgctgagtgaccctgtgaagaggcgggccttcaacagcgtggaccccacctttgacaacagcgtgcccagcaagtctgaggccaaggacaacttctttgaggtgttcacccctgtgtttgagaggaacagccgggtgtccatcagcaagaagaagaagaagaagaggtag

SEQ ID NO: 150323 - DNA, 822 bp, synthetic construct
  misc_feature 1..822: note = Description of Artificial Sequence: Synthetic coding sequence
  source 1..822: mol_type = other DNA
atggaggccaacatgcccaagaggaaggagcccggccgcagcctgcgcatcaaggtgatctccatgggaaatgctgaggtgggcaagagctgcatcatcaagcgctactgtgagaagagatttgtgtccaagtacctggccaccatcggcattgattatggagtgaccaaggtgcacgtgcgggaccgggagatcaaggtgaacatctttgacatggccggccaccccttcttctatgaggtgagaaatgagttctacaaggacacccagggcgtcatcctggtgtatgatgtgggccagaaggacagctttgatgccctggatgcctggctggccgagatgaagcaggagctgggcccccacggcaacatggagaacatcatctttgtggtgtgtgccaacaagattgactgcaccaagcaccgctgtgtggatgaaagtgagggccgcctgtgggccgagagcaagggcttcctgtactttgagaccagcgcccagacaggagagggcatcaatgagatgttccagaccttctacatcagcatcgtggacctgtgtgaaaatggaggcaagaggcccaccaccaacagcagcgccagcttcaccaaggagcaggctgatgccatccgccgcatccggaacagcaaggacagctgggacatgctgggcgtgaagccaggggccagcagagatgaggtgaacaaggcctacaggaagctggccgtgctgctgcacccagacaagtgtgtggcccctggctctgaagatgccttcaaggctgtggtgaatgccaggacagccctgctgaagaacatcaagtag

SEQ ID NO: 150324 - DNA, 609 bp, synthetic construct
  misc_feature 1..609: note = Description of Artificial Sequence: Synthetic coding sequence
  source 1..609: mol_type = other DNA
atggccggccaccccttcttctatgaggtgagaaatgagttctacaaggacacccagggcgtcatcctggtgtatgatgtgggccagaaggacagctttgatgccctggatgcctggctggccgagatgaagcaggagctgggcccccacggcaacatggagaacatcatctttgtggtgtgtgccaacaagattgactgcaccaagcaccgctgtgtggatgagagcgagggccgcctgtgggccgagagcaagggcttcctgtactttgagaccagcgcccagacaggagagggcatcaatgagatgttccagaccttctacatcagcatcgtggacctgtgtgaaaatggaggcaagaggcccaccaccaacagcagcgccagcttcaccaaggagcaggctgatgccatccgccgcatccggaacagcaaggacagctgggacatgctgggcgtgaagccaggggccagcagagatgaggtgaacaaggcctacaggaagctggccgtgctgctgcacccagacaagtgtgtggcccctggctctgaagatgccttcaaggctgtggtgaatgccaggacagccctgctgaagaacatcaagtag

SEQ ID NO: 150325 - DNA, 1515 bp, synthetic construct
  misc_feature 1..1515: note = Description of Artificial Sequence: Synthetic coding sequence
  source 1..1515: mol_type = other DNA
atggtggcccctggctctgtgaccagccggctgggctctgtgttccccttcctgctggtgctggtggacctgcagtatgagggcgcagaatgtggggtgaatgctgatgtggagaagcacctggagctgggcaagaagctgctggccgccggccagctggctgatgccctgagccagttccacgccgctgtggatggagaccctgacaactacatcgcctactaccgccgggccaccgtcttcctggccatgggcaagagcaaggccgccctgcctgacctgaccaaggtgatccagctgaagatggacttcaccgctgcccggctgcagaggggccacctgctgctgaagcagggcaagctggatgaagcagaagatgacttcaagaaggtgctgaagagcaaccccagtgaaaatgaggagaaggaggcccagagccagctgatcaagagtgatgagatgcagaggctgcggagccaggccctgaatgcctttggaagtggggactacacagctgccatcgccttcctggacaagatcctggaggtgtgtgtgtgggatgctgagctgcgggagctgcgggcagagtgcttcatcaaggagggggagcccaggaaggccatcagtgacctgaaggccgccagcaagctgaagaatgacaacacagaggccttctacaagatcagcaccctgtactaccagctgggggaccacgagctgagcctgtctgaggtgagagaatgtctgaagctggaccaggaccacaagcgctgctttgcccactacaagcaggtgaagaagctgaacaagctgattgagagcgctgaggagctgatcagagatggccgctacacagatgccaccagcaaatatgaatctgtgatgaagacagagcccagcattgctgagtacacagtgcgcagcaaggagcgcatctgccactgcttcagcaaggatgagaagcctgtggaggccatccgggtgtgcagcgaggtgctgcagatggagccagacaacgtgaatgccctgaaggacagagctgaggcctacctgattgaggagatgtatgatgaggccatccaggactatgaaacagcccaggagcacaatgaaaatgaccagcagatccgggagggcctggagaaggcccagaggctgctgaagcagagccagaagagggactactacaagatcctgggcgtgaagagaaatgccaagaagcaggagatcatcaaggcctacaggaagctggccctgcagtggcacccagacaacttccagaatgaggaggagaagaagaaggccgagaagaagttcatcgacattgctgctgccaaggaggtgctgagtgaccctgagatgaggaagaagtttgatgatggagaggaccccctggatgctgagagccagcagggcggcggcggcaaccccttccaccgctcctggaacagctggcagggcttcaaccccttcagcagcggcggccccttccgcttcaagttccacttcaactag

SEQ ID NO: 150326 - DNA, 597 bp, synthetic construct
  misc_feature 1..597: note = Description of Artificial Sequence: Synthetic coding sequence
  source 1..597: mol_type = other DNA
atggctgaccagaggcagaggagcctgagcaccagcggggagagcctgtaccacgtgctgggcctggacaagaatgccaccagtgatgacatcaagaagagctacaggaagctggccctgaagtaccacccagacaagaacccagacaaccctgaggccgctgacaagttcaaggagatcaacaatgcccacgccatcctgacagatgccaccaagaggaacatctatgacaagtatggcagcctgggcctgtatgtggccgagcagtttggagaagaaaatgtgaacacctactttgtgctgagctcctggtgggccaaggccctgtttgtgttctgtggcctgctgacctgctgctactgctgctgctgcctgtgctgctgcttcaactgctgctgcggcaagtgcaagcccaaggcccctgagggggaggagacagagttctacgtgtccccagaggacctggaggcccagctgcagagtgatgagcgggaggccacagacacccccatcgtcatccagcctgccagcgccacagagaccacccagctgacagctgacagccaccccagctaccacacagatggcttcaactag

SEQ ID NO: 150327 - DNA, 504 bp, synthetic construct
  misc_feature 1..504: note = Description of Artificial Sequence: Synthetic coding sequence
  source 1..504: mol_type = other DNA
atggctgaccagaggcagaggagcctgagcaccagcggggagagcctgtaccacgtgctgggcctggacaagaatgccaccagtgatgacatcaagaagagctacaggaagctggccctgaagtaccacccagacaagaacccagacaaccctgaggccgctgacaagttcaaggagatcaacaatgcccacgccatcctgacagatgccaccaagaggaacatctatgacaagtatggcagcctgggcctgtatgtggccgagcagtttggagaagaaaatgtgaacacctactttgtgctgagctcctggtgggccaaggccctgtttgtgttctgtggcctgctgacctgctgctactgctgctgctgcctgtgctgctgcttcaactgctgctgcggcaagtgcaagcccaaggcccctgagggggaggagacagagttctacgtgtccccagaggacctggaggcccagctgcagagtgatgagcggggcggccactag

SEQ ID NO: 150328 - DNA, 600 bp, synthetic construct
  misc_feature 1..600: note = Description of Artificial Sequence: Synthetic coding sequence
  source 1..600: mol_type = other DNA
atggcctgcaacatccccaaccagaggcagaggaccctgagcaccaccggggaggccctgtatgagatcctgggcctgcacaagggggccagcaatgaggagatcaagaagacctacaggaagctggccctgaagcaccacccagacaagaacccagatgatcctgctgccacagagaagttcaaggagatcaacaatgcccacgccatcctgacagacatcagcaagaggagcatctatgacaagtatggcagcctgggcctgtatgtggccgagcagtttggagatgaaaatgtgaacacctacttcatgctgagctcctggtgggccaaggccctcttcgtcatcgtgggcctgctgaccggctgctacttctgctgctgcctgtgctgctgctgcaactgctgctgcggccactgcaggcctgagagctctgtgcctgaggaggacttctacgtgtccccagaggacctggaggagcagatcaagagtgacatggagaaggatgtggacttccctgtgttcctgcagcccaccaatgccaatgagaagacccagctgatcaaggagggcagccgcagctactgcacagacagctag

SEQ ID NO: 150329 - DNA, 570 bp, synthetic construct
  misc_feature 1..570: note = Description of Artificial Sequence: Synthetic coding sequence
  source 1..570: mol_type = other DNA
atgagcacagtgaaggaggccgcccaccggctgagcaagtctgagatgagcctgtatgctgtgctggacctgaagaagggggccagccctgaggacttcaagaagagctacagccacagcgccctgctgccccaccccccatttgagtaccacctgggcaggaagctggccctgcgctaccacccagacaagaaccctggaaatgcccaggccgctgagatcttcaaggagatcaatgctgcccacgccatcctgagtgacagcaagaagaggaagatctatgaccagcacggcagcctgggcatctacctgtatgaccactttggagaggagggcgtgcgctactacttcatcctgaacagctgctggttcaagaccctggtgatcctgtgcaccctgctgacctgctgctgcttctgctgctgctgctgcttctgctgcggggccctgaagcccccacctgagcaggacagcggcaggaagtaccagcagaatgtgcagagccagccccccaggtctggggccaagtgtgacttccgctcagaagaaaattctgaagatgacttctag

SEQ ID NO: 150330 - DNA, 570 bp, synthetic construct; identical to SEQ ID NO: 150329
  misc_feature 1..570: note = Description of Artificial Sequence: Synthetic coding sequence
  source 1..570: mol_type = other DNA

SEQ ID NO: 150331 - DNA, 2703 bp, synthetic construct
  misc_feature 1..2703: note = Description of Artificial Sequence: Synthetic coding sequence
  source 1..2703: mol_type = other DNA
atggagcccagctatggaggcggcctgtttgacatggtgaagggcggggccggccgcctcttcagcaacctgaaggacaacctgaaggacaccctgaaggacaccagcagcagggtcatccagagcgtgaccagctacaccaagggggacctggacttcacctacgtgaccagccgcatcatcgtgatgtccttccccctggacaacgtggacatcggcttcaggaaccaggtggatgacatccgctccttcctggacagccgccacctggaccactacacagtgtacaacctgagccccaagagctacagaacagccaagttccacagccgggtgtctgagtgctcctggcccatccggcaggcccccagcctgcacaacctgtttgctgtgtgcaggaacatgtacaactggctgctgcagaaccccaagaatgtgtgtgtggtgcactgcctggatggccgggccgccagcagcatcctggtgggcgccatgttcatcttctgcaacctgtacagcaccccaggccctgccatccggctgctgtatgccaagaggcctggcatcggcctgagccccagccaccggcgctacctgggctacatgtgtgacctgctggccgacaagccctaccggccccacttcaagcccctgaccatcaagagcatcaccgtgagccccatccccttcttcaacaagcagagaaatggctgccggccctactgtgatgtgctgattggagagaccaagatctacagcacctgcacagactttgagaggatgaaggagtacagagtgcaggacggcaagatcttcatccccctgaacatcaccgtgcagggagatgtggtggtgtccatgtaccacctgcggagcaccatcggcagccggctgcaggccaaggtgaccaacacccagatcttccagctgcagttccacacaggcttcatccccctggacaccaccgtgctgaagttcaccaagccagagctggatgcctgtgatgtgcctgagaagtacccccagctgttccaggtgaccctggatgtggagctgcagccccatgacaaggtgattgacctgaccccaccctgggagcactactgcaccaaggatgtgaaccccagcatcctcttcagcagccaccaggagcaccaggacaccctggccctgggcggccaggcccccatcgacatccccccagacaaccccaggcactacggccagagcggcttctttgccagcctgtgctggcaggaccagaagtctgagaagagcttctgtgaggaggaccatgctgccctggtgaaccaggagagcgagcagagtgatgatgagctgctgaccctgagcagcccccacggcaatgccaacggggacaagccccatggagtgaagaagcccagcaagaagcagcaggagcctgctgcccctcctcctccagaagatgtggacctgctgggcctggagggcagcgccatgagcaacagcttcagccccccagctgccccacccaccaacagcgagctgctgagtgacctgtttggaggcggcggcgctgctggccccacccaggccggccagagcggcgtggaggatgtgttccaccccagcggccctgccagcacccagagcaccccccggcgcagcgccaccagcaccagcgccagccccaccctgcgggtgggggagggcgccacctttgacccctttggagcccccagcaagcccagcggccaggacctgctgggcagcttcctgaacaccagcagcgccagcagtgaccccttcctgcagcccaccaggagccccagccccaccgtgcacgccagcagcaccccagctgtgaacatccagccagatgtgtctgggggctgggactggcacgccaagccaggcggcttcggcatgggcagcaagtctgctgccaccagccccaccggcagcagccacggcacccccacccaccagagcaagccccagaccctggacccctttgctgacctgggcaccctgggcagcagcagctttgccagcaagcccaccacccccaccggcctgggcggcggcttcccccccctgagcagcccccagaaggccagcccccagcccatgggcggcggctggcagcagggcggggcctacaactggcagcagccccagcccaagccccagcccagcatgccccacagcagcccccagaaccggcccaactacaacgtgtccttcagcgccatgcctgggggccagaatgaaagaggcaagggcagcagcaacctggagggcaagcagaaggctgctgactttgaggacctgctgagcggccagggcttcaatgcccacaaggacaagaagggccccaggaccatcgccgagatgaggaaggaggagatggccaaggagatggaccctgagaagctgaagatcctggagtggattgagggcaaggagaggaacatccgggccctgctgagcaccatgcacacagtgctgtgggccggggagaccaagtggaagcctgtgggcatggctgacctggtgaccccagagcaggtgaagaaggtgtacaggaaggctgtgctggtggtgcacccagacaaggccaccggccagccctatgagcagtatgccaagatgatcttcatggagctgaatgatgcctggagcgagtttgagaaccagggccagaagcccctgtactag

SEQ ID NO: 150332 - DNA, 2913 bp, synthetic construct
  misc_feature 1..2913: note = Description of Artificial Sequence: Synthetic coding sequence
  source 1..2913: mol_type = other DNA
atgagcctgctgggcagctacaggaagaagaccagcaatgatggctatgagagcctgcagctggtggacagcaatggagacctgtctgctggcagcggcggcgtgggcggcaagcagagggtgaatgctggggccgccgcccggagccctgcccggcagcccccagaccgggccagcaccatggacagcagcggggccagcagcccagacatggagcccagctatggaggcggcctgtttgacatggtgaagggcggggccggccgcctcttcagcaacctgaaggacaacctgaaggacaccctgaaggacaccagcagcagggtcatccagagcgtgaccagctacaccaagggggacctggacttcacctacgtgaccagccgcatcatcgtgatgtccttccccctggacaacgtggacatcggcttcaggaaccaggtggatgacatccgctccttcctggacagccgccacctggaccactacacagtgtacaacctgagccccaagagctacagaacagccaagttccacagccgggtgtctgagtgctcctggcccatccggcaggcccccagcctgcacaacctgtttgctgtgtgcaggaacatgtacaactggctgctgcagaaccccaagaatgtgtgtgtggtgcactgcctggatggccgggccgccagcagcatcctggtgggcgccatgttcatcttctgcaacctgtacagcaccccaggccctgccatccggctgctgtatgccaagaggcctggcatcggcctgagccccagccaccggcgctacctgggctacatgtgtgacctgctggccgacaagccctaccggccccacttcaagcccctgaccatcaagagcatcaccgtgagccccatccccttcttcaacaagcagagaaatggctgccggccctactgtgatgtgctgattggagagaccaagatctacagcacctgcacagactttgagaggatgaaggagtacagagtgcaggacggcaagatcttcatccccctgaacatcaccgtgcagggagatgtggtggtgtccatgtaccacctgcggagcaccatcggcagccggctgcaggccaaggtgaccaacacccagatcttccagctgcagttccacacaggcttcatccccctggacaccaccgtgctgaagttcaccaagccagagctggatgcctgtgatgtgcctgagaagtacccccagctgttccaggtgaccctggatgtggagctgcagccccatgacaaggtgattgacctgaccccaccctgggagcactactgcaccaaggatgtgaaccccagcatcctcttcagcagccaccaggagcaccaggacaccctggccctgggcggccaggcccccatcgacatccccccagacaaccccaggcactacggccagagcggcttctttgccagcctgtgctggcaggaccagaagtctgagaagagcttctgtgaggaggaccatgctgccctggtgaaccaggagagcgagcagagtgatgatgagctgctgaccctgagcagcccccacggcaatgccaacggggacaagccccatggagtgaagaagcccagcaagaagcagcaggagcctgctgcccctcctcctccagaagatgtggacctgctgggcctggagggcagcgccatgagcaacagcttcagccccccagctgccccacccaccaacagcgagctgctgagtgacctgtttggaggcggcggcgctgctggccccacccaggccggccagagcggcgtggaggatgtgttccaccccagcggccctgccagcacccagagcaccccccggcgcagcgccaccagcaccagcgccagccccaccctgcgggtgggggagggcgccacctttgacccctttggagcccccagcaagcccagcggccaggacctgctgggcagcttcctgaacaccagcagcgccagcagtgaccccttcctgcagcccaccaggagccccagccccaccgtgcacgccagcagcaccccagctgtgaacatccagccagatgtgtctgggggctgggactggcacgccaagccaggcggcttcggcatgggcagcaagtctgctgccaccagccccaccggcagcagccacggcacccccacccaccagagcaagccccagaccctggacccctttgctgacctgggcaccctgggcagcagcagctttgccagcaagcccaccacccccaccggcctgggcggcggcttcccccccctgagcagcccccagaaggccagcccccagcccatgggcggcggctggcagcagggcggggcctacaactggcagcagccccagcccaagccccagcccagcatgccccacagcagcccccagaaccggcccaactacaacgtgtccttcagcgccatgcctgggggccagaatgaaagaggcaagggcagcagcaacctggagggcaagcagaaggctgctgactttgaggacctgctgagcggccagggcttcaatgcccacaaggacaagaagggccccaggaccatcgccgagatgaggaaggaggagatggccaaggagatggaccctgagaagctgaagatcctggagtggattgagggcaaggagaggaacatccgggccctgctgagcaccatgcacacagtgctgtgggccggggagaccaagtggaagcctgtgggcatggctgacctggtgaccccagagcaggtgaagaaggtgtacaggaaggctgtgctggtggtgcacccagacaaggccaccggccagccctatgagcagtatgccaagatgatcttcatggagctgaatgatgcctggagcgagtttgagaaccagggccagaagcccctgtactag

SEQ ID NO: 150333 - DNA, 2742 bp, synthetic construct
  misc_feature 1..2742: note = Description of Artificial Sequence: Synthetic coding sequence
  source 1..2742: mol_type = other DNA
atgaaggacagtgaaaataaaggagccagcagcccagacatggagcccagctatggaggcggcctgtttgacatggtgaagggcggggccggccgcctcttcagcaacctgaaggacaacctgaaggacaccctgaaggacaccagcagcagggtcatccagagcgtgaccagctacaccaagggggacctggacttcacctacgtgaccagccgcatcatcgtgatgtccttccccctggacaacgtggacatcggcttcaggaaccaggtggatgacatccgctccttcctggacagccgccacctggaccactacacagtgtacaacctgagccccaagagctacagaacagccaagttccacagccgggtgtctgaatgttcctggcccatccggcaggcccccagcctgcacaacctgtttgctgtgtgcaggaacatgtacaactggctgctgcagaaccccaagaatgtgtgtgtggtgcactgcctggatggccgggccgccagcagcatcctggtgggcgccatgttcatcttctgcaacctgtacagcaccccaggccctgccatccggctgctgtatgccaagaggcctggcatcggcctgagccccagccaccggcgctacctgggctacatgtgtgacctgctggccgacaagccctaccggccccacttcaagcccctgaccatcaagagcatcaccgtgagccccatccccttcttcaacaagcagagaaatggctgccggccctactgtgatgtgctgattggagagaccaagatctacagcacctgcacagactttgagaggatgaaggagtacagagtgcaggacggcaagatcttcatccccctgaacatcaccgtgcagggagatgtggtggtgtccatgtaccacctgcggagcaccatcggcagccggctgcaggccaaggtgaccaacacccagatcttccagctgcagttccacacaggcttcatccccctggacaccaccgtgctgaagttcaccaagccagagctggatgcctgtgatgtgcctgagaagtacccccagctgttccaggtgaccctggatgtggagctgcagccccatgacaaggtgattgacctgaccccaccctgggagcactactgcaccaaggatgtgaaccccagcatcctcttcagcagccaccaggagcaccaggacaccctggccctgggcggccaggcccccatcgacatccccccagacaaccccaggcactacggccagagcggcttctttgccagcctgtgctggcaggaccagaagtctgagaagagcttctgtgaagaagatcatgctgccctggtgaaccaggagagcgagcagagtgatgatgagctgctgaccctgagcagcccccatggaaatgccaatggagacaagccccacggcgtgaagaagcccagcaagaagcagcaggagcctgctgcccctcctcctccagaagatgtggacctgctgggcctggagggcagcgccatgagcaacagcttcagccccccagctgccccacccaccaacagcgagctgctgagtgacctgtttggaggcggcggggccgccggccccacccaggccggccagagcggcgtggaggatgtgttccaccccagcggccctgccagcacccagagcaccccaagaagaagtgccaccagcaccagcgccagccccaccctgcgggtgggggagggcgccacctttgacccctttggagcccccagcaagcccagcggccaggacctgctgggcagcttcctgaacaccagcagcgccagcagtgaccccttcctgcagcccaccaggagccccagccccaccgtgcacgccagcagcaccccagctgtgaacatccagccagatgtgtctgggggctgggactggcacgccaagccaggcggcttcggcatgggcagcaagtctgctgccaccagccccaccggcagcagccacggcacccccacccaccagagcaagccccagaccctggacccctttgctgacctgggcaccctgggcagcagcagctttgccagcaagcccaccacccccaccggcctgggcggcggcttcccccccctgagcagcccccagaaggccagcccccagcccatgggcggcggctggcagcagggcggggcctacaactggcagcagccccagcccaagccccagcccagcatgccccacagcagcccccagaaccggcccaactacaacgtgtccttcagcgccatgcctgggggccagaatgaaagaggcaagggcagcagcaacctggagggcaagcagaaggctgctgactttgaggacctgctgagcggccagggcttcaatgcccacaaggacaagaagggccccaggaccatcgccgagatgaggaaggaggagatggccaaggagatggaccctgagaagctgaagatcctggagtggattgagggcaaggagaggaacatccgggccctgctgagcaccatgcacacagtgctgtgggccggggagaccaagtggaagcctgtgggcatggctgacctggtgaccccagagcaggtgaagaaggtgtacaggaaggctgtgctggtggtgcacccagacaaggccaccggccagccctatgagcagtatgccaagatgatcttcatggagctgaatgatgcctggagcgagtttgagaaccagggccagaagcccctgtactag

SEQ ID NO: 150334 - DNA, 783 bp, synthetic construct
  misc_feature 1..783: note = Description of Artificial Sequence: Synthetic coding sequence
  source 1..783: mol_type = other DNA
atgggcctgctggacctgtgtgaggaggtgtttggaacagctgacctgtacagagtgctgggcgtgagaagagaggccagtgatggagaggtgcggcggggctaccacaaggtgtccctgcaggtgcacccagacagagtgggggagggggacaaggaggatgccacccggcgcttccagatcctgggcaaggtgtacagcgtgctgagtgaccgggagcagagagctgtgtatgatgagcagggcaccgtggatgaggacagccctgtgctgacccaggaccgggactgggaggcctactggaggctgctcttcaagaagatcagcctggaggacatccaggcctttgagaagacctacaagggcagcgaggaggagctggccgacatcaagcaggcctacctggacttcaagggggacatggaccagatcatggagagcgtgctgtgtgtgcagtacacagaggagccccgcatccggaacatcatccagcaggccattgatgctggggaggtgcccagctacaatgcctttgtgaaggagagcaagcagaagatgaatgccaggaagagaagagcccaggaggaggccaaggaggccgagatgagcaggaaggagctgggcctggatgagggcgtggacagcctgaaggccgccatccagagccggcagaaggaccggcagaaggagatggacaacttcctggcccagatggaggccaagtactgcaagagcagcaaaggaggcggcaagaagagcgccctgaagaaggagaagaagtag

SEQ ID NO: 150335 - DNA, 1029 bp, synthetic construct
  misc_feature 1..1029: note = Description of Artificial Sequence: Synthetic coding sequence
  source 1..1029: mol_type = other DNA
atgctggagaacagcctgtacagccccacctgggagggcagccagttctgggtgacagtgcagaggacagaagctgctgagcgctgtggcctgcacggcagctatgtgctgcgggtggaggccgagcggctgaccctgctgactgtgggcgcccagagccagatcctggagcccctgctgtcctggccctacaccctgctgcggcgctatggccgggacaaggtgatgttctcctttgaagctggaagacgctgccccagcggccctggcaccttcaccttccagacagcccagggcaatgacatcttccaggccgtggagacagccatccaccggcagaaggcccagggcaaggccggccagggccatgatgtgctgcgggctgacagccatgaaggagaggtggccgagggcaagctgcccagccccccaggcccccaggagctgctggacagccccccagccctgtatgcagagcccctggacagcctgcgcatcgccccctgccccagccaggacagcctgtacagcgaccccctggacagcaccagcgcccaggccggggagggcgtgcagaggaagaagcccctgtactgggacctgtatgagcacgcccagcagcagctgctgaaggccaagctgacagaccccaaggaggaccccatctatgatgagcctgagggcctggcccctgtgcccccccagggcctgtatgacctgccccgggagcccaaggatgcctggtggtgccaggcccgggtgaaggaggagggctatgagctgccctacaacccagccacagatgattatgctgtgcccccacccaggagcaccaagcccctgctggcccccaagccccagggccctgccttccctgagcccggcacagccaccggcagcggcatcaagagccacaacagcgccctgtacagccaggtgcagaagagcggggccagcggctcctgggactgtggcctgagccgggtgggcacagacaagacaggagtgaagtctgagggcagcacctag

SEQ ID NO: 150336 - DNA, 855 bp, synthetic construct
  misc_feature 1..855: note = Description of Artificial Sequence: Synthetic coding sequence
  source 1..855: mol_type = other DNA
atggagcccggcatgctgggcccccacaacctgccccaccacgagcccatcagctttggaattgaccagatcctgagcggccctgagaccccaggcggcggcctgggcctgggccggggcggccagggccacggggagaatggagccttcagcggcggctaccatggagccagcggctacggccctgctggcagcctggcccccctgcccggcagcagtggagtgggccctggaggagtcatccgggtgcctgcccaccggcccctgcctgtgcccccacctgctggaggagccccagctgtgcccggccccagcggcctgggcggggccggcggcctggccggcctgaccttcccctggatggattctggaagaagatttgccaaggaccggctgacagctgccctgagccccttcagcggcaccaggagaattggccacccctaccagaacagaacaccacccaagaggaagaagcccaggaccagcttcagccgcagccaggtgctggagctggagcggcgcttcctgcggcagaagtacctggccagcgctgagcgggccgccctggccaaggccctgaggatgacagatgcccaggtgaagacctggttccagaacagaaggaccaagtggaggcggcagacagctgaggagcgggaggccgagcggcacagagctggccgcctgctgctgcacctgcagcaggatgccctgccccggcccctgcggccccccctgcccccagaccccctgtgcctgcacaacagcagcctgtttgccctgcagaacctgcagccctgggccgaggacaacaaggtggcctctgtgtctggcctggcctctgtggtgtag

SEQ ID NO: 150337 - DNA, 1239 bp, synthetic construct
  misc_feature 1..1239: note = Description of Artificial Sequence: Synthetic coding sequence
  source 1..1239: mol_type = other DNA
atgggagatggagctgtgaagcagggcttcctgtacctgcagcagcagcagaccttcggcaagaagtggaggagatttggagccagcctgtatggaggcagtgactgtgccctggcccggctggagctgcaggagggccctgagaagccccggcgctgtgaggccgccaggaaggtgatccggctgagtgactgcctgcgggtggccgaggccggcggggaggccagcagcccccgggacaccagcgccttcttcctggagaccaaggagcggctgtacctgctggccgccccagctgctgagcggggggactgggtgcaggccatctgcctgctggccttccctggccagaggaaggagctgagcggccctgagggcaagcagagccggccctgcatggaggagaatgagctgtacagcagcgctgtgacagtgggcccccacaaggagtttgctgtgaccatgaggcccacagaggccagcgagcgctgccacctgcggggcagctacaccctgcgggccggggagagcgccctggagctgtggggcggccctgagcccggcacccagctgtatgactggccctaccgcttcctgcggcgcttcggccgggacaaggtgaccttctcctttgaagctggaagaagatgtgtgtctggagagggcaactttgaatttgagacccggcagggcaatgagatcttcctggccctggaggaggccatcagcgcccagaagaatgctgccccagccaccccccagccccagcctgccaccatcccagccagcctgcccaggccagacagcccctacagccggccccatgacagcctgcccccacccagccccaccacccctgtgcctgccccccggccccggggccaggagggggagtatgctgtgccctttgatgctgtggcccggagcctgggcaagaacttccggggcatcctggccgtgcccccccagctgctggccgaccccctgtatgacagcattgaggagaccctgccccccaggccagaccacatctatgatgagcctgagggcgtggccgccctgagcctgtatgacagcccccaggagcccagaggagaggcctggaggcggcaggccacagctgaccgggaccctgctggcctgcagcacgtgcagcctgctggccaggacttcagcgccagcggctggcagcccggcacagaatatgacaacgtggtgctgaagaagggccccaagtag

SEQ ID NO: 150338 - DNA, 777 bp, synthetic construct
  misc_feature 1..777: note = Description of Artificial Sequence: Synthetic coding sequence
  source 1..777: mol_type = other DNA
atgaggcccacagaggccagcgagcgctgccacctgcggggcagctacaccctgcgggccggggagagcgccctggagctgtggggcggccctgagcccggcacccagctgtatgactggccctaccgcttcctgcggcgcttcggccgggacaaggtgaccttctcctttgaagctggaagaagatgtgtgtctggagagggcaactttgaatttgagacccggcagggcaatgagatcttcctggccctggaggaggccatcagcgcccagaagaatgctgccccagccaccccccagccccagcctgccaccatcccagccagcctgcccaggccagacagcccctacagccggccccatgacagcctgcccccacccagccccaccacccctgtgcctgccccccggccccggggccaggagggggagtatgctgtgccctttgatgctgtggcccggagcctgggcaagaacttccggggcatcctggccgtgcccccccagctgctggccgaccccctgtatgacagcattgaggagaccctgccccccaggccagaccacatctatgatgagcctgagggcgtggccgccctgagcctgtatgacagcccccaggagcccagaggagaggcctggaggcggcaggccacagctgaccgggaccctgctggcctgcagcacgtgcagcctgctggccaggacttcagcgccagcggctggcagcccggcacagaatatgacaacgtggtgctgaagaagggccccaagtag

SEQ ID NO: 150339 - DNA, 993 bp, synthetic construct
  misc_feature 1..993: note = Description of Artificial Sequence: Synthetic coding sequence
  source 1..993: mol_type = other DNA
atggaccccctggagacccccatcaaggatggcatcctgtaccagcagcacgtgaagtttgggaagaagtgctggaggaaggtgtgggccctgctgtatgctgggggccccagcggcgtggcccggctggagagctgggaggtgagagatggcggcctgggcgccgccggggacagatctgctggccctggaagaagaggagagaggagggtcatccggctggccgactgtgtgtctgtgctgcctgcagatggagagagctgcccccgggacaccggggccttcctgctgaccaccacagagaggagccacctgctggccgcccagcaccggcaggcctggatgggccccatctgccagctggccttccctggcaccggggaggccagcagcggcagcacagatgcccagagccccaagaggggcctggtgcccatggaggagaacagcatctacagctcctggcaggaggtgggggagttccctgtggtggtgcagaggacagaggccgccacccgctgccagctgaagggccctgccctgctggtgctgggcccagatgccatccagctgcgggaggccaagggcacccaggccctgtacagctggccctaccacttcctgaggaagtttggaagtgacaagatcctgctgggcaccccaggagtgtccctgctgatctgcaagggggagaggacagatgatgtgtctggcatcatcctggatgagagcctgctgcgggcctacagcgtgcctggggccggcggccacagccgggtgcaggacagcctgggccctgtgctgcgggagcccaccttccagggcgagaggagcttcctgaagacctccatgctgcggagcctgctgtgcagctgctcctggaggcaccccaggagccagcccaggacccaggccagctgcctgcagggcagtgactgcccagccccccacaggaacagcaccagcgctgcccacaccctgggcaccagctag

SEQ ID NO: 150340 - DNA, 1491 bp, synthetic construct
  misc_feature 1..1491: note = Description of Artificial Sequence: Synthetic coding sequence
  source 1..1491: mol_type = other DNA
atgaccaggggggcccggctgcggagtgatgcccgggcccagctgaaccagctgagcctggatggcggcaccggcagcggccagaagggcaaatgtgaggagttccccagcagcctgagctctgtgtccccaggcctggaggccgccgccctgctgctggccgtgaccatggaccccctggagacccccatcaaggatggcatcctgtaccagcagcacgtgaagtttgggaagaagtgctggaggaaggtgtgggccctgctgtatgctgggggccccagcggcgtggcccggctggagagctgggaggtgagagatggcggcctgggcgccgccggggacagatctgctggccctggaagaagaggagagaggagggtcatccggctggccgactgtgtgtctgtgctgcctgcagatggagagagctgcccccgggacaccggggccttcctgctgaccaccacagagaggagccacctgctggccgcccagcaccggcaggcctggatgggccccatctgccagctggccttccctggcaccggggaggccagcagcggcagcacagatgcccagagccccaagaggggcctggtgcccatggaggagaacagcatctacagctcctggcaggaggtgggggagttccctgtggtggtgcagaggacagaggccgccacccgctgccagctgaagggccctgccctgctggtgctgggcccagatgccatccagctgcgggaggccaagggcacccaggccctgtacagctggccctaccacttcctgaggaagtttggaagtgacaagggcgtcttctcctttgaggccggccgccgctgccacagcggggagggcctgtttgccttcagcaccccctgtgccccagacctgtgcagagctgtggccggggccatcgcccggcagcgggagcggctgcctgagctgacccggccccagccctgccccctgccccgggccaccagcctgcccagcctggacaccccaggagagctgcgggagatgcctcctggccctgagccccccaccagcaggaagatgcacctggccgagcccggcccccagagcctgcccctgctgctgggccctgagcccaatgacctggccagcggcctgtatgcctctgtgtgcaagagggccagcggccccccaggaaatgagcacctgtatgagaacctgtgtgtgctggaggccagccccaccctgcatggaggagagcctgagccccatgagggccctggcagccgcagccccaccaccagccccatctaccacaacggccaggacctgtcctggccaggccctgccaatgacagcaccctggaggcccagtaccgccgcctgctggagctggaccaggtggagggcaccggccgcccagacccccaggccggcttcaaggccaagctggtgaccctgctgagccgggagaggaggaagggccctgccccctgtgaccggccctag

SEQ ID NO: 150341 - DNA, 687 bp, synthetic construct
  misc_feature 1..687: note = Description of Artificial Sequence: Synthetic coding sequence
  source 1..687: mol_type = other DNA
atggaccccctggagacccccatcaaggatggcatcctgtaccagcagcacgtgaagtttgggaagggcaccggggaggccagcagcggcagcacagatgcccagagccccaagaggggcctggtgcccatggaggagaacagcatctacagctcctggcaggaggtgggggagttccctgtggtggtgcagaggacagaggccgccacccgctgccagctgaagggccctgccctgctggtgctgggcccagatgccatccagctgcgggaggccaagggcacccaggccctgtacagctggccctaccacttcctgaggaagtttggaagtgacaagatcctgctgggcaccccaggagtgtccctgctgatctgcaagggggagaggacagatgatgtgtctggcatcatcctggatgagagcctgctgcgggcctacagcgtgcctggggccggcggccacagccgggtgcaggacagcctgggccctgtgctgcgggagcccaccttccagggcgagaggagcttcctgaagacctccatgctgcggagcctgctgtgcagctgctcctggaggcaccccaggagccagcccaggacccaggccagctgcctgcagggcagtgactgcccagccccccacaggaacagcaccagcgctgcccacaccctgggcaccagctag

SEQ ID NO: 150342 - DNA, 435 bp, synthetic construct
  misc_feature 1..435: note = Description of Artificial Sequence: Synthetic coding sequence
  source 1..435: mol_type = other DNA
atggaccccctggagacccccatcaaggatggcatcctgtaccagcagcacgtgaagtttgggaagaagtgctggaggaaggtgtgggccctgctgtatgctgggggccccagcggcgtggcccggctggagagctgggaggtgagagatggcggcctgggcgccgccggggacagatctgctggccctggaagaagaggagagaggagggtcatccggctggccgactgtgtgtctgtgctgcctgcagatggagagagctgcccccgggacaccggggccttcctgctgaccaccacagagaggagccacctgctggccgcccagcaccggcaggcctggatgggccccatctgccagctggccttccctggcaccggggaggccagcagcggcagcacagatgcccagagccccaagaggggcctggtgtag

SEQ ID NO: 150343 - DNA, 471 bp, synthetic construct
  misc_feature 1..471: note = Description of Artificial Sequence: Synthetic coding sequence
  source 1..471: mol_type = other DNA
atggaccccctggagacccccatcaaggatggcatcctgtaccagcagcacgtgaagtttgggaagaagtgctggaggaaggtgtgggccctgctgtatgctgggggccccagcggcgtggcccggctggagagctgggaggtgagagatggcggcctgggcgccgccggggacagatctgctggccctggaagaagaggagagaggagggtcatccggctggccgactgtgtgtctgtgctgcctgcagatggagagagctgcccccgggacaccggggccttcctgctgaccaccacagagaggagccacctgctggccgcccagcaccggcaggcctggatgggccccatctgccagctggccttccctggcaccggggaggccagcagcggcagcacagatgcccagagccccaagaggggcctggtgcccatggaggagaacagcatctacagctcctggcagtag

SEQ ID NO: 150344 - DNA, 132 bp, synthetic construct
  misc_feature 1..132: note = Description of Artificial Sequence: Synthetic coding sequence
  source 1..132: mol_type = other DNA
atggaccccctggagacccccatcaaggatggcatcctgtaccagcagcacgtgaagtttgggaagaagtgctggaggaaggtgtgggccctgctgtatgctgggggccccagcggcgtggcccggctgtag

SEQ ID NO: 150345 - DNA, 642 bp, synthetic construct
  misc_feature 1..642: note = Description of Artificial Sequence: Synthetic coding sequence
  source 1..642: mol_type = other DNA
atggaccccctggagacccccatcaaggatggcatcctgtaccagcagcacgtgaagtttgggaagaagtgctggaggaaggtgtgggccctgctgtatgctgggggccccagcggcgtggcccggctggagagctgggaggtgagagatggcggcctgggcgccgccggggacagatctgctggccctggaagaagaggagagaggagggtcatccggctggccgactgtgtgtctgtgctgcctgcagatggagagagctgcccccgggacaccggggccttcctgctgaccaccacagagaggagccacctgctggccgcccagcaccggcaggcctggatgggccccatctgccagctggccttccctggcaccggggaggccagcagcggcagcacagatgcccagagccccaagaggggcctggtgcccatggaggagaacagcatctacagctcctggcaggaggtgggggagttccctgtggtggtgcagaggacagaggccgccacccgctgccagctgaagggccctgccctgctggtgctgggcccagatgccatccagctgcgggaggccaagggcacccaggccctgtacagctggccctaccacttcctgaggaagtttggcagctag

SEQ ID NO: 150346 - DNA, 42 bp, synthetic construct
  misc_feature 1..42: note = Description of Artificial Sequence: Synthetic coding sequence
  source 1..42: mol_type = other DNA
atggaccccctggagacccccatcaaggatggcatcctgtag

SEQ ID NO: 150347 - DNA, 258 bp, synthetic construct
  misc_feature 1..258: note = Description of Artificial Sequence: Synthetic coding sequence
  source 1..258: mol_type = other DNA
atggaccccctggagacccccatcaaggatggcatcctgtaccagcagcacgtgaagtttgggaagaagtgctggaggaaggtgtgggccctgctgtatgctgggggccccagcggcgtggcccggctggagagctgggaggtgagagatggcggcctgggcgccgccggggacagatctgctggccctggaagaagaggagagaggagggtcatccggctggccgactgtgtgtctgtgctgcctgcagatggatag

SEQ ID NO: 150348 - DNA, 981 bp, synthetic construct
  misc_feature 1..981: note = Description of Artificial Sequence: Synthetic coding sequence
  source 1..981: mol_type = other DNA
atggccaccaacttcagtgacatcgtgaagcagggctacgtgaagatgaagagcaggaagctgggcatctaccgccgctgctggctggtgttcaggaagagcagcagcaagggcccccagaggctggagaagtacccagatgagaagtctgtgtgcctgcggggctgccccaaggtgacagagatcagcaatgtgaagtgtgtgacccggctgcccaaggagaccaagaggcaggccgtggccatcatcttcacagatgacagcgcccggaccttcacctgtgacagcgagctggaggccgaggagtggtacaagaccctgtctgtggagtgcctgggcagccggctgaatgacatcagcctgggggagccagacctgctggcccctggggtgcagtgtgagcagacagaccgcttcaacgtgttcctgctgccctgccccaacctggatgtgtatggagagtgcaagctgcagatcacccatgagaacatctacctgtgggacatccacaacccccgggtgaagctggtgtcctggcccctgtgcagcctgcggcgctatggaagagatgccacccgcttcacctttgaggccggccgcatgtgtgatgctggggagggcctgtacaccttccagacccaggagggggagcagatctaccagagggtgcacagcgccaccctggccatcgccgagcagcacaagagggtgctgctggagatggagaagaatgtgcggctgctgaacaagggcacagagcactacagctacccctgcacccccaccaccatgctgcccaggtctgcctactggcaccacatcaccggcagccagaacattgctgaggccagcagctatgctggggagggctatggagctgcccaggccagcagcgagacagacctgctgaaccgcttcatcctgctgaagcccaagcccagccagggcgacagcagcgaggccaagacccccagccagtag

SEQ ID NO: 150349 - DNA, 921 bp, synthetic construct
  misc_feature 1..921: note = Description of Artificial Sequence: Synthetic coding sequence
  source 1..921: mol_type = other DNA
atggccagcaacttcaatgacatcgtgaagcagggctacgtgcgcatccgcagccggcggctgggcatctaccagcgctgctggctggtgttcaagaaggccagcagcaagggccccaagaggctggagaagttcagtgatgagcgggccgcctacttccgctgctaccacaaggtgacagagctgaacaacgtgaagaatgtggcccggctgcccaagagcaccaagaagcacgccatcggcatctacttcaatgatgacaccagcaagacctttgcctgtgagagtgacctggaggctgatgagtggtgcaaggtgctgcagatggagtgtgtgggcacccgcatcaatgacatcagcctgggggagccagacctgctggccactggagtggagcgggagcagagcgagcgcttcaacgtgtacctgatgcccagccccaacctggatgtgcacggggagtgtgccctgcagatcacctatgagtacatctgcctgtgggatgtgcagaacccccgggtgaagctgatctcctggcccctgagcgccctgcggcgctatggccgggacaccacctggttcacctttgaggccggccgcatgtgtgagaccggggagggcctcttcatcttccagaccagagatggagaggccatctaccagaaggtgcacagcgctgccctggccatcgccgagcagcacgagcggctgctgcagagcgtgaagaacagcatgctgcagatgaagatgtctgagcgggccgccagcctgagcaccatggtgcccctgcccaggtctgcctactggcagcacatcacccggcagcacagcacaggccagctgtaccgcctgcaggatgtgagcagccccctgaagctgcacaggacagagaccttccctgcctacagaagtgagcactag

SEQ ID NO: 150350 - DNA, 1515 bp, synthetic construct
  misc_feature 1..1515: note = Description of Artificial Sequence: Synthetic coding sequence
  source 1..1515: mol_type = other DNA
atgacagaggccgccctggtggagggccaggtgaagctgagagatggcaagaagtggaagagccgctggctggtgctgaggaagcccagccctgtggccgactgcctgctgatgctggtgtacaaggacaagtctgagcgcatcaagggcctgcgggagaggagcagcctgaccctggaggacatctgtggcctggagcccggcctgccctatgagggcctggtgcacaccctggccatcgtgtgcctgagccaggccatcatgctgggctttgacagccatgaggccatgtgtgcctgggatgcccgcatccgctatgccctgggggaggtgcaccgcttccacgtgacagtggcccctggcaccaagctggagagcggccctgccaccctgcacctgtgcaatgatgtgctggtgctggcccgggacatccccccagctgtgacaggccagtggaagctgagtgacctgcggcgctacggggctgtgcccagcggcttcatctttgaaggaggcacccgctgtggctactgggccggggtcttcttcctgagcagcgctgagggggagcagatctccttcctgtttgactgcatcgtgcggggcatcagccccaccaagggccccttcggcctgcggcctgtgctgcctgaccccagccccccaggccccagcacagtggaggagcgggtggcccaggaggccctggagaccctgcagctggagaagaggctgagcctgctgagccatgctggccggcccggcagcggaggagatgacaggagcctgagcagcagcagcagcgaggccagccacctggatgtgtctgccagcagccggctgacagcctggccagagcagagcagcagcagcgccagcaccagccaggagggccccaggcctgctgctgcccaggccgccggggaggccatggtgggcgccagccggcccccacccaagcccctgcggccccggcagctgcaggaggtgggccggcagagcagcagtgacagcggcatcgccaccggcagccacagcagctacagcagcagcctgagcagctatgccggcagcagcctggatgtgtggagggccacagatgagctgggcagcctgctgagcctgcctgctgctggggcccctgagcccagcctgtgcacctgcctgcccggcaccgtggagtaccaggtgcccaccagcctgcgggcccactatgacacccccaggagcctgtgcctggccccccgggaccacagcccccccagccagggcagccctggcaacagcgctgcccgggacagcggcggccagaccagcgctggctgccccagcggctggctgggcaccaggagaagaggcctggtgatggaggccccccagggcagcgaggccaccctgcccggccctgcccctggagagccctgggaggccggcggcccccacgccggccccccaccagccttcttcagcgcctgccctgtgtgtggcggcctgaaggtgaaccccccaccctag

SEQ ID NO: 150351 - DNA, 1827 bp, synthetic construct
  misc_feature 1..1827: note = Description of Artificial Sequence: Synthetic coding sequence
  source 1..1827: mol_type = other DNA
atgacagaggccgccctggtggagggccaggtgaagctgagagatggcaagaagtggaagagccgctggctggtgctgaggaagcccagccctgtggccgactgcctgctgatgctggtgtacaaggacaagtctgagcgcatcaagggcctgcgggagaggagcagcctgaccctggaggacatctgtggcctggagcccggcctgccctatgagggcctggtgcacaccctggccatcgtgtgcctgagccaggccatcatgctgggctttgacagccatgaggccatgtgtgcctgggatgcccgcatccgctatgccctgggggaggtgcaccgcttccacgtgacagtggcccctggcaccaagctggagagcggccctgccaccctgcacctgtgcaatgatgtgctggtgctggcccgggacatccccccagctgtgacaggccagtggaagctgagtgacctgcggcgctacggggctgtgcccagcggcttcatctttgaaggaggcacccgctgtggctactgggccggggtcttcttcctgagcagcgctgagggggagcagatctccttcctgtttgactgcatcgtgcggggcatcagccccaccaagggccccttcggcctgcggcctgtgctgcctgaccccagccccccaggccccagcacagtggaggagcgggtggcccaggaggccctggagaccctgcagctggagaagaggctgagcctgctgagccatgctggccggcccggcagcggaggagatgacaggagcctgagcagcagcagcagcgaggccagccacctggatgtgtctgccagcagccggctgacagcctggccagagcagagcagcagcagcgccagcaccagccaggagggccccaggcctgctgctgcccaggccgccggggaggccatggtgggcgccagccggcccccacccaagcccctgcggccccggcagctgcaggaggtgggccggcagagcagcagtgacagcggcatcgccaccggcagccacagcagctacagcagcagcctgagcagctatgccggcagcagcctggatgtgtggagggccacagatgagctgggcagcctgctgagcctgcctgctgctggggcccctgagcccagcctgtgcacctgcctgcccggcaccgtggagtaccaggtgcccaccagcctgcgggcccactatgacacccccaggagcctgtgcctggccccccgggaccacagcccccccagccagggcagccctggcaacagcgctgcccgggacagcggcggccagaccagcgctggctgccccagcggctggctgggcaccaggagaagaggcctggtgatggaggccccccagggcagcgaggccaccctgcccggccctgcccctggagagccctgggaggccggcggcccccacgccggccccccaccagccttcttcagcgcctgccctgtgtgtggcggcctgaagggagctgctgccagcgcccctggccctgccacagcccacagcggcagccctggccctgtggccgtggacagccctggccctgagcggcccagaggagagagccccacctacgtgaacatccctgtgagccccagcagcaggaagcagctgcactacatgggcctggagctgcaggaggccagcgagggcgtgcggggggccggggccagcctgtatgcccagattgacatcatggccacagaaacagcccaccgggtgggcgtgagacatgcccgggcccgggaggagcagctgtctgagctggagcagaggaaggccgccccccagtag

SEQ ID NO: 150352 - DNA, 768 bp, synthetic construct
  misc_feature 1..768: note = Description of Artificial Sequence: Synthetic coding sequence
  source 1..768: mol_type = other DNA
atgacagaggccgccctggtggagggccaggtgaagctgagagatggcaagaagtggaagagccgctggctggtgctgaggaagcccagccctgtggccgactgcctgctgatgctggtgtacaaggacaagtctgagcgcatcaagggcctgcgggagaggagcagcctgaccctggaggacatctgtggcctggagcccggcctgccctatgagggcctggtgcacaccctggccatcgtgtgcctgagccaggccatcatgctgggctttgacagccatgaggccatgtgtgcctgggatgcccgcatccgctatgccctgggggaggtgcaccgcttccacgtgacagtggcccctggcaccaagctggagagcggccctgccaccctgcacctgtgcaatgatgtgctggtgctggcccgggacatccccccagctgtgacaggccagtggaagctgagtgacctgcggcgctacggggctgtgcccagcggcttcatctttgaaggaggcacccggggctggaggctgctgcctgtgctgggccggggcggcgctgaccagctgcctgtgcggctgcaccggcccaggcacctgccccaccagggccccctgtgggccgccgccggcagcacccggcccaagagccctggcaccctggactgtggcggggcctgtggccctggcagccctggcaaccccacagctggggaggccgctgagccccccctgacctgtggccaggccggccagtggaggggctag

SEQ ID NO: 150353 - DNA, 1371 bp, synthetic construct
  misc_feature 1..1371: note = Description of Artificial Sequence: Synthetic coding sequence
  source 1..1371: mol_type = other DNA
atgggctacttccgctgtgcccgggccggcagctttggaagaagaaggaagatggagcccagcacagctgcccgggcctgggccctcttctggctgctgctgcccctgctgggcgctgtgtgtgccagcggccccaggaccctggtgctgctggacaacctgaatgtgcgggagacccacagcctcttcttccgcagcctgaaggaccggggctttgagctgaccttcaagacagcagatgaccccagcctgagcctcatcaagtatggagagttcctgtatgacaacctgatcatcttcagccccagcgtggaggactttggaggcaacatcaacgtggagaccatcagcgccttcattgatggcggcggctctgtgctggtggccgccagcagtgacatcggggaccccctgcgggagctgggctctgaatgtggcattgaatttgatgaggagaagacagctgtgattgaccaccacaactatgacatcagtgacctgggccagcacaccctgattgtggccgacacagagaacctgctgaaggcccccaccatcgtgggcaagagcagcctgaaccccatcctcttccggggcgtgggcatggtggccgaccctgacaaccccctggtgctggacatcctgaccggcagcagcaccagctacagcttcttcccagacaagcccatcacccagtacccccatgctgtgggcaagaacaccctgctgattgctggcctgcaggccaggaacaatgcccgggtcatcttcagcggcagcctggacttcttcagtgacagcttcttcaacagcgctgtgcagaaggccgcccctggcagccagcgctacagccagacaggcaactatgagctggccgtggccctgagccgctgggtgttcaaggaggagggcgtgctgcgggtgggccctgtgagccaccaccgggtgggggagacagcccccccaaatgcctacacagtgacagacctggtggagtacagcatcgtcatccagcagctgagcaatggcaagtgggtgccctttgatggagatgacatccagctggagtttgtgagaattgacccctttgtgaggaccttcctgaagaagaagggcggcaagtacagcgtgcagttcaagctgcctgatgtgtatggagtcttccagttcaaggtggactacaaccggctgggctacacccacctgtacagcagcacccaggtgtctgtgcggcccctgcagcacacccagtatgagcgcttcatccccagcgcctacccctactatgccagcgccttctccatgatgctgggcctcttcatcttcagcatcgtgttcctgcacatgaaggagaaggagaagagtgactag

SEQ ID NO: 150354 - DNA, 1260 bp, synthetic construct
  misc_feature 1..1260: note = Description of Artificial Sequence: Synthetic coding sequence
  source 1..1260: mol_type = other DNA
atgggctacttccgctgtgcccgggccggcagctttggaagaagaaggaagatggagcccagcacagctgcccgggcctgggccctcttctggctgctgctgcccctgctgggcgctgtgtgtgccagcggccccaggaccctggtgctgctggacaacctgaatgtgcgggagacccacagcctcttcttccgcagcctgaaggactttggaggcaacatcaacgtggagaccatcagcgccttcattgatggcggcggctctgtgctggtggccgccagcagtgacattggagaccccctgcgggagctgggctctgaatgtggcatcgagtttgatgaggagaagacagctgtgattgaccaccacaactatgacatcagtgacctgggccagcacaccctcatcgtggccgacacagagaacctgctgaaggcccccaccatcgtgggcaagagcagcctgaaccccatcctcttccggggcgtgggcatggtggccgaccctgacaaccccctggtgctggacatcctgaccggcagcagcaccagctacagcttcttcccagacaagcccatcacccagtacccccatgctgtgggcaagaacaccctgctgattgctggcctgcaggccagaaataatgcccgggtcatcttcagcggcagcctggacttcttcagtgacagcttcttcaacagcgctgtgcagaaggccgcccctggcagccagcgctacagccagacaggcaactatgagctggccgtggccctgagccgctgggtgttcaaggaggagggcgtgctgcgggtgggccctgtgagccaccaccgggtgggggagacagcccccccaaatgcctacacagtgacagacctggtggagtacagcatcgtcatccagcagctgagcaatggcaagtgggtgccctttgatggagatgacatccagctggagtttgtgagaattgacccctttgtgaggaccttcctgaagaagaagggcggcaagtacagcgtgcagttcaagctgcctgatgtgtatggagtcttccagttcaaggtggactacaaccggctgggctacacccacctgtacagcagcacccaggtgtctgtgcggcccctgcagcacacccagtatgagcgcttcatccccagcgcctacccctactatgccagcgccttctccatgatgctgggcctcttcatcttcagcatcgtgttcctgcacatgaaggagaaggagaagagtgactag

SEQ ID NO: 150355 - DNA, 279 bp, synthetic construct
  misc_feature 1..279: note = Description of Artificial Sequence: Synthetic coding sequence
  source 1..279: mol_type = other DNA
atgaccaagctggcccagtggctgtggggcctggccatcctgggcagcacctgggtggccctgaccactggagccctgggcctggagctgcccctgagctgccaggaggtgctgtggcccctgcctgcctacctgctggtgtctgctggctgctacgccctgggcaccgtgggctacagagtggccaccttccatgactgtgaagatgctgcccgggagctgcagagccagatccaggaggcccgggctgacctggcccggcggggcctgcgcttctag

SEQ ID NO: 150356 - DNA, 369 bp, synthetic construct
  misc_feature 1..369: note = Description of Artificial Sequence: Synthetic coding sequence
  source 1..369: mol_type = other DNA
atgctgtctgtgggcggcctgcggctgagcctggtgcgcttctccttcctgctgctgcggggggccctgctgcccagcctggccgtgaccatgaccaagctggcccagtggctgtggggcctggccatcctgggcagcacctgggtggccctgaccactggagccctgggcctggagctgcccctgagctgccaggaggtgctgtggcccctgcctgcctacctgctggtgtctgctggctgctacgccctgggcaccgtgggctacagagtggccaccttccatgactgtgaagatgctgcccgggagctgcagagccagatccaggaggcccgggctgacctggcccggcggggcctgcgcttctag

SEQ ID NO: 150357 - DNA, 279 bp, synthetic construct; identical to SEQ ID NO: 150355
  misc_feature 1..279: note = Description of Artificial Sequence: Synthetic coding sequence
  source 1..279: mol_type = other DNA

SEQ ID NO: 150358 - DNA, 1191 bp, synthetic construct
  misc_feature 1..1191: note = Description of Artificial Sequence: Synthetic coding sequence
  source 1..1191: mol_type = other DNA
atggacccccggggcaccaagagaggagctgagaagacagaggtggccgagcccaggaacaagctgcccaggcctgcccccagcctgcccacagatcctgccctgtacagcggccccttccccttctaccgccggcccagcgagctgggctgcttcagcctggatgcccagaggcagtaccatggagatgcccgggccctgcgctactacagccccccacccaccaacggccctggccccaactttgacctgagagatggctacccagaccgctaccagcccagagatgaggaggtgcaggagcggctggaccacctgctgtgctggctgctggagcaccggggccgcctggagggcggccctggctggctggccgaggccatcgtgacctggaggggccacctgaccaagctgctgaccaccccctatgagcggcaggagggctggcagctggccgccagccgcttccagggcaccctgtacctgtctgaggtggagaccccaaatgcccgggcccagaggctggcccggccccccctgctgcgggagctgatgtacatgggctacaagtttgagcagtacatgtgtgccgacaagccaggcagcagcccagaccccagcggggaggtgaacaccaacgtggccttctgcagcgtgctgcggagccggctgggcagccaccccctgctcttcagcggggaggtggactgcacagacccccaggcccccagcacccagccccccacctgctacgtggagctgaagaccagcaaggagatgcacagccctggccagtggaggagcttctaccgccacaagctgctgaagtggtgggcccagagcttcctgcccggggtgcccaacgtggtggccggcttcaggaacccagatggctttgtgagcagcctgaagaccttccccaccatgaagatgtttgaatatgtgagaaatgacagagatggctggaaccccagcgtgtgcatgaacttctgtgccgccttcctgagctttgcccagagcacagtggtgcaggatgacccccggctggtgcacctgttctcctgggagcccggcggccctgtgacagtgtctgtgcaccaggatgccccctatgccttcctgcccatctggtacgtggaggccatgacccaggacctgcccagcccccccaagacccccagccccaagtag

SEQ ID NO: 150359 - DNA, 1191 bp, synthetic construct; identical to SEQ ID NO: 150358
  misc_feature 1..1191: note = Description of Artificial Sequence: Synthetic coding sequence
  source 1..1191: mol_type = other DNA

SEQ ID NO: 150360 - DNA, 1191 bp, synthetic construct; identical to SEQ ID NO: 150358
  misc_feature 1..1191: note = Description of Artificial Sequence: Synthetic coding sequence
  source 1..1191: mol_type = other DNA

SEQ ID NO: 150361 - DNA, 1191 bp, synthetic construct; identical to SEQ ID NO: 150358
  misc_feature 1..1191: note = Description of Artificial Sequence: Synthetic coding sequence
  source 1..1191: mol_type = other DNA

SEQ ID NO: 150362 - DNA, 1191 bp, synthetic construct; identical to SEQ ID NO: 150358
  misc_feature 1..1191: note = Description of Artificial Sequence: Synthetic coding sequence
  source 1..1191: mol_type = other DNA

SEQ ID NO: 150363 - DNA, 1191 bp, synthetic construct; identical to SEQ ID NO: 150358
  misc_feature 1..1191: note = Description of Artificial Sequence: Synthetic coding sequence
  source 1..1191: mol_type = other DNA

SEQ ID NO: 150364 - DNA, 1191 bp, synthetic construct
  misc_feature 1..1191: note = Description of Artificial Sequence: Synthetic coding sequence
  source 1..1191: mol_type = other DNA
atggacccccggggcaccaagagaggagctgagaagacagaggtggccgagcccaggaacaagctgcccaggcctgcccccagcctgcccacagatcctgccctgtacagcggccccttccccttctaccgccggcccagcgagctgggctgcttcagcctggatgcccagaggcagtaccatggagatgcccgggccctgcgctactacagccccccacccaccaacggccctggccccaactttgacctgagagatggctacccagaccgctaccagcccagagatgaggaggtgcaggagcggctggaccacctgctgtgctggctgctggagcaccggggccgcctggagggcggccctggctggctggccgaggccatcgtgacctggaggggccacctgaccaagctgctgaccaccccctatgagcggcaggagggctggcagctggccgccagccgcttccagggcaccctgtacctgtctgaggtggagaccccaaatgcccgggcccagaggctggcccggccccccctgctgcgggagctgatgtacatgggctacaagtttgagcagtacatgtgtgccgacaagccaggcagcagcccagaccccagcggggaggtgaacaccaacgtggccttctgcagcgtgctgcggagccggctgggcagccaccccctgctcttcagcggggaggtggactgcacagacccccaggcccccagcacccagccccccacctgctacgtggagctgaagaccagcaaggagatgcagagccctggccagtggaggagcttctaccgccacaagctgctgaagtggtgggcccagagcttcctgcccggggtgcccaacgtggtggccggcttcaggaacccagatggctttgtgagcagcctgaagaccttccccaccatgaagatgtttgaatatgtgagaaatgacagagatggctggaaccccagcgtgtgcatgaacttctgtgccgccttcctgagctttgcccagagcacagtggtgcaggatgacccccggctggtgcacctgttctcctgggagcccggcggccctgtgacagtgtctgtgcaccaggatgccccctatgccttcctgcccatctggtacgtggaggccatgacccaggacctgcccagcccccccaagacccccagccccaagtag

SEQ ID NO: 150365 - DNA, 1191 bp, synthetic construct; identical to SEQ ID NO: 150358
  misc_feature 1..1191: note = Description of Artificial Sequence: Synthetic coding sequence
  source 1..1191: mol_type = other DNA

SEQ ID NO: 150366 - DNA, 1191 bp, synthetic construct; identical to SEQ ID NO: 150358
  misc_feature 1..1191: note = Description of Artificial Sequence: Synthetic coding sequence
  source 1..1191: mol_type = other DNA

SEQ ID NO: 150367 - DNA, 1191 bp, synthetic construct; identical to SEQ ID NO: 150358
  misc_feature 1..1191: note = Description of Artificial Sequence: Synthetic coding sequence
  source 1..1191: mol_type = other DNA

SEQ ID NO: 150368 - DNA, 1191 bp, synthetic construct; identical to SEQ ID NO: 150358
  misc_feature 1..1191: note = Description of Artificial Sequence: Synthetic coding sequence
  source 1..1191: mol_type = other DNA

SEQ ID NO: 150369 - DNA, 1191 bp, synthetic construct; identical to SEQ ID NO: 150364
  misc_feature 1..1191: note = Description of Artificial Sequence: Synthetic coding sequence
  source 1..1191: mol_type = other DNA

SEQ ID NO: 150370 - DNA, 1191 bp, synthetic construct; identical to SEQ ID NO: 150358
  misc_feature 1..1191: note = Description of Artificial Sequence: Synthetic coding sequence
  source 1..1191: mol_type = other DNA

SEQ ID NO: 150371 - DNA, 1191 bp, synthetic construct; identical to SEQ ID NO: 150358
  misc_feature 1..1191: note = Description of Artificial Sequence: Synthetic coding sequence
  source 1..1191: mol_type = other DNA

SEQ ID NO: 150372 - DNA, 1191 bp, synthetic construct; identical to SEQ ID NO: 150358
  misc_feature 1..1191: note = Description of Artificial Sequence: Synthetic coding sequence
  source 1..1191: mol_type = other DNA

SEQ ID NO: 150373 - DNA, 1191 bp, synthetic construct; identical to SEQ ID NO: 150358
  misc_feature 1..1191: note = Description of Artificial Sequence: Synthetic coding sequence
  source 1..1191: mol_type = other DNA

SEQ ID NO: 150374 - DNA, 1191 bp, synthetic construct; identical to SEQ ID NO: 150358
  misc_feature 1..1191: note = Description of Artificial Sequence: Synthetic coding sequence
  source 1..1191: mol_type = other DNA

SEQ ID NO: 150375 - DNA, 1191 bp, synthetic construct; identical to SEQ ID NO: 150364
  misc_feature 1..1191: note = Description of Artificial Sequence: Synthetic coding sequence
  source 1..1191: mol_type = other DNA

SEQ ID NO: 150376 - DNA, 1443 bp, synthetic construct
  misc_feature 1..1443: note = Description of Artificial Sequence: Synthetic coding sequence
  source 1..1443: mol_type = other DNA
atgaatgccagcgagttcagaagaagaggcaaggagatggtggactacatggccaactacatggagggcatcgagggccggcaggtgtacccagatgtggagcccggctacctgcggcccctcatcccagctgctgccccccaggagccagacacctttgaggacatcatcaatgatgtggagaagatcatcatgcctggggtgacccactggcacagcccctacttctttgcctacttccccacagccagcagctacccagccatgctggccgacatgctgtgtggggccatcggctgcatcggcttctcctgggccgccagccctgcctgcacagagctggagaccgtgatgatggactggctgggcaagatgctggagctgcccaaggccttcctgaatgagaaggccggggagggcggcggcgtcatccagggcagcgccagcgaggccaccctggtggccctgctggccgcccggaccaaggtgatccaccggctgcaggccgccagccctgagctgacccaggccgccatcatggagaagctggtggcctacagcagtgaccaggcccacagctctgtggagcgggccggcctgattggaggagtgaagctgaaggccatccccagtgatggcaactttgccatgagggccagcgccctgcaggaggccctggagcgggacaaggccgccggcctcatccccttcttcatggtggccaccctgggcaccaccacctgctgcagctttgacaacctgctggaggtgggccccatctgcaacaaggaggacatctggctgcacgtggatgctgcctatgccggcagcgccttcatctgcccagagttccgccacctgctgaatggagtggagtttgctgacagcttcaacttcaacccccacaagtggctgctggtgaactttgactgcagcgccatgtgggtgaagaagaggacagacctgactggagccttccggctggaccccacctacctgaagcacagccaccaggacagcggcctcatcacagactaccgccactggcagatccccctgggccgccgcttccgcagcctgaagatgtggtttgtgttcaggatgtatggagtgaagggcctgcaggcctacatcaggaagcacgtgcagctgagccatgaatttgagagcctggtgcggcaggaccccaggtttgagatctgtgtggaggtgatcctgggcctggtgtgcttccggctgaagggcagcaacaaggtgaatgaggccctgctgcagaggatcaacagcgccaagaagatccacctggtgccctgccacctgcgggacaagtttgtgctgcgctttgccatctgcagcaggacagtggagagcgcccacgtgcagagggcctgggagcacatcaaggagctggccgcagatgtgctgcgggcagagcgggagtag

SEQ ID NO: 150377 - DNA, 96 bp, synthetic construct
  misc_feature 1..96: note = Description of Artificial Sequence: Synthetic coding sequence
  source 1..96: mol_type = other DNA
atgaatgccagcgagttcagaagaagaggcaaggagatggtggactacatggccaactacatggagggcatcgagggccggcaggtgtacccctag

SEQ ID NO: 150378 - DNA, 51 bp, synthetic construct
  misc_feature 1..51: note = Description of Artificial Sequence: Synthetic coding sequence
  source 1..51: mol_type = other DNA
atgaatgccagcgagttcagaagaagaggcaaggagatggtggactactag

SEQ ID NO: 150379 - DNA, 1443 bp, synthetic construct; identical to SEQ ID NO: 150376
  misc_feature 1..1443: note = Description of Artificial Sequence: Synthetic coding sequence
  source 1..1443: mol_type = other DNA

SEQ ID NO: 150380 - DNA, 1017 bp, synthetic construct
  misc_feature 1..1017: note = Description of Artificial Sequence: Synthetic coding sequence
  source 1..1017: mol_type = other DNA
atgaatgccagcgagttcagaagaagaggcaaggagatggtggactacatggccaactacatggagggcatcgagggccggcaggtgtacccagatgtggagcccggctacctgcggcccctcatcccagctgctgccccccaggagccagacacctttgaggacatcatcaatgatgtggagaagatcatcatgcctggggtgacccactggcacagcccctacttctttgcctacttccccacagccagcagctacccagccatgctggccgacatgctgtgtggggccatcggctgcatcggcttctcctgggccgccagccctgcctgcacagagctggagaccgtgatgatggactggctgggcaagatgctggagctgcccaaggccttcctgaatgagaaggccggggagggcggcggcgtcatccagggcagcgccagcgaggccaccctggtggccctgctggccgcccggaccaaggtgatccaccggctgcaggccgccagccctgagctgacccaggccgccatcatggagaagctggtggcctacagcagtgaccaggcccacagctctgtggagcgggccggcctgattggaggagtgaagctgaaggccatccccagtgatggcaactttgccatgagggccagcgccctgcaggaggccctggagcgggacaaggccgccggcctcatccccttcttcatggtggccaccctgggcaccaccacctgctgcagctttgacaacctgctggaggtgggccccatctgcaacaaggaggacatctggctgcacgtggatgctgcctatgccggcagcgccttcatctgcccagagttccgccacctgctgaatggagtggagtttgctgacagcttcaacttcaacccccacaagtggctgctggtgaactttgactgcagcgccatgtggagccggcagcctgtgaggatgctgcggctgaagaagacctgcctggtgtctgctgtggtgcggcgctcctag

SEQ ID NO: 150381 - DNA, 1209 bp, synthetic construct
  misc_feature 1..1209: note = Description of Artificial Sequence: Synthetic coding sequence
  source 1..1209: mol_type = other DNA
atgaatgccagcgagttcagaagaagaggcaaggagatggtggactacatggccaactacatggagggcatcgagggccggcaggtgtacccagatgtggagcccggctacctgcggcccctcatcccagctgctgccccccaggagccagacacctttgaggacatcatcaatgatgtggagaagatcatcatgcctgggggcagcgccagcgaggccaccctggtggccctgctggccgcccggaccaaggtgatccaccggctgcaggccgccagccctgagctgacccaggccgccatcatggagaagctggtggcctacagcagtgaccaggcccacagctctgtggagcgggccggcctgattggaggagtgaagctgaaggccatccccagtgatggcaactttgccatgagggccagcgccctgcaggaggccctggagcgggacaaggccgccggcctcatccccttcttcatggtggccaccctgggcaccaccacctgctgcagctttgacaacctgctggaggtgggccccatctgcaacaaggaggacatctggctgcacgtggatgctgcctatgccggcagcgccttcatctgcccagagttccgccacctgctgaatggagtggagtttgctgacagcttcaacttcaacccccacaagtggctgctggtgaactttgactgcagcgccatgtgggtgaagaagaggacagacctgactggagccttccggctggaccccacctacctgaagcacagccaccaggacagcggcctcatcacagactaccgccactggcagatccccctgggccgccgcttccgcagcctgaagatgtggtttgtgttcaggatgtatggagtgaagggcctgcaggcctacatcaggaagcacgtgcagctgagccatgaatttgagagcctggtgcggcaggaccccaggtttgagatctgtgtggaggtgatcctgggcctggtgtgcttccggctgaagggcagcaacaaggtgaatgaggccctgctgcagaggatcaacagcgccaagaagatccacctggtgccctgccacctgcgggacaagtttgtgctgcgctttgccatctgcagcaggacagtggagagcgcccacgtgcagagggcctgggagcacatcaaggagctggccgcagatgtgctgcgggcagagcgggagtag

SEQ ID NO: 150382 - DNA, 1164 bp, synthetic construct
  misc_feature 1..1164: note = Description of Artificial Sequence: Synthetic coding sequence
  source 1..1164: mol_type = other DNA
atgaatgccagcgagttcagaagaagaggcaaggagatggtggactacatggccaactacatggagggcatcgagggccggcaggtgtacccagatgtggagcccggctacctgcggcccctcatcccagctgctgccccccaggagccagacacctttgaggacatcatcaatgatgtggagaagatcatcatgcctggggtgacccactggcacagcccctacttctttgcctacttccccacagccagcagctacccagccatgctggccgacatgctgtgtggggccatcggctgcatcggcttctcctgggccgccagccctgcctgcacagagctggagaccgtgatgatggactggctgggcaagatgctggagctgcccaaggccttcctgaatgagaaggccggggagggcggcggcgtcatccagatggtggccaccctgggcaccaccacctgctgcagctttgacaacctgctggaggtgggccccatctgcaacaaggaggacatctggctgcacgtggatgctgcctatgccggcagcgccttcatctgcccagagttccgccacctgctgaatggagtggagtttgctgacagcttcaacttcaacccccacaagtggctgctggtgaactttgactgcagcgccatgtgggtgaagaagaggacagacctgaccggggccttccggctggaccccacctacctgaagcacagccaccaggacagcggcctcatcacagactaccgccactggcagatccccctgggccgccgcttccgcagcctgaagatgtggtttgtgttcaggatgtatggagtgaagggcctgcaggcctacatcaggaagcacgtgcagctgagccatgaatttgagagcctggtgcggcaggaccccaggtttgagatctgtgtggaggtgatcctgggcctggtgtgcttccggctgaagggcagcaacaaggtgaatgaggccctgctgcagaggatcaacagcgccaagaagatccacctggtgccctgccacctgcgggacaagtttgtgctgcgctttgccatctgcagcaggacagtggagagcgcccacgtgcagagggcctgggagcacatcaaggagctggccgcagatgtgctgcgggcagagcgggagtag

SEQ ID NO: 150383 - DNA, 735 bp, synthetic construct
  misc_feature 1..735: note = Description of Artificial Sequence: Synthetic coding sequence
  source 1..735: mol_type = other DNA
atgagggaggccgccttcatgtacagcacagctgtggccatcttcctggtgatcctggtggccgccctgcagggcagcgccccccgggagagccccctgccctaccacatccccctggaccctgagggcagcctggagctgtcctggaatgtgtcctacacccaggaggccatccacttccagctgctggtgcggcggctgaaggccggcgtgctgtttggcatgtctgacagaggagagctggagaatgctgacctggtggtgctgtggacagatggagacacagcctactttgctgatggcaccgtgcacctggtgtatggcatcctggaggagcccttccgcagcctggaggccatcaatggaagtggcctgcagatgggcctgcagagggtgcagctgctgaagcccaacatccctgagcctgagctgcccagtgatgcctgcaccatggaggtgcaggcccccaacatccagatccccagccaggagaccacctactggtgctacatcaaggagctgcccaagggcttcagccgccaccacatcatcaagtatgagcccatcgtgaccaagggaaatgaggccctggtgcaccacatggaggtgttccagtgtgcccctgagatggacagcgtgccccacttcagcggcccctgtgacagcaagatgaagccagaccggctgaactactgccgccacgtgctggccgcctgggccctgggcgccaagtag

SEQ ID NO: 150384 - DNA, 1854 bp, synthetic construct
  misc_feature 1..1854: note = Description of Artificial Sequence: Synthetic coding sequence
  source 1..1854: mol_type = other DNA
atgcctgccctgagccgctgggccagcctgcccggccccagcatgagggaggccgccttcatgtacagcacagctgtggccatcttcctggtgatcctggtggccgccctgcagggcagcgccccccgggagagccccctgccctaccacatccccctggaccctgagggcagcctggagctgtcctggaatgtgtcctacacccaggaggccatccacttccagctgctggtgcggcggctgaaggccggcgtgctgtttggcatgtctgacagaggagagctggagaatgctgacctggtggtgctgtggacagatggagacacagcctactttgctgatgcctggagcgaccagaagggccagatccacctggacccccagcaggactaccagctgctgcaggtgcagaggaccccagagggcctgaccctgctcttcaagaggcccttcggcacctgtgaccccaaggactacctgattgaagatggcaccgtgcacctggtgtatggcatcctggaggagcccttccgcagcctggaggccatcaatggcagcggcctgcagatgggcctgcagagggtgcagctgctgaagcccaacatccctgagcctgagctgcccagtgatgcctgcaccatggaggtgcaggcccccaacatccagatccccagccaggagaccacctactggtgctacatcaaggagctgcccaagggcttcagccgccaccacatcatcaagtatgagcccatcgtgaccaagggaaatgaggccctggtgcaccacatggaggtgttccagtgtgcccctgagatggattctgtgccccacttcagcggcccctgtgacagcaagatgaagccagaccggctgaactactgcagacatgtgctggccgcctgggccctgggcgccaaggccttctactacccagaggaggccggcctggcctttggaggccctggcagcagccgctacctgcggctggaggtgcactaccacaaccccctggtgattgagggcagaaatgacagcagcggcatccggctgtactacacagccaagctgcggcgcttcaatgccggcatcatggagctgggcctggtgtacacccctgtgatggccatccccccccgggagacagccttcatcctgaccggctactgcacagacaagtgcacccagctggccctgccccccagcggcatccacatctttgccagccagctgcacacccacctgaccggcaggaaggtggtgacagtgctggtgagagatggccgggagtgggagatcgtgaaccaggacaaccactacagcccccacttccaggagatccgcatgctgaagaaggtggtgtctgtgcaccctggagatgtgctgatcaccagctgcacctacaacacagaagatcgggagctggccaccgtgggcggcttcggcatcctggaggagatgtgtgtgaactacgtgcactactacccccagacccagctggagctgtgcaagtctgctgtggatgctggcttcctgcagaagtacttccacctgatcaaccgcttcaacaatgaagatgtgtgcacctgcccccaggcctctgtgtcccagcagttcacctctgtgccctggaacagcttcaacagagatgtgctgaaggccctgtacagctttgcccccatctccatgcactgcaacaagagcagcgctgtgcgcttccagggcgagtggaacctgcagcccctgcccaaggtgatcagcaccctggaggagcccaccccccagtgccccaccagccagggccgcagccctgctggccccaccgtggtgtccatcggcggcggcaagggctag

SEQ ID NO: 150385 - DNA, 1341 bp, synthetic construct
  misc_feature 1..1341: note = Description of Artificial Sequence: Synthetic coding sequence
  source 1..1341: mol_type = other DNA
atgaggaccctgaacaccagcgccatggatggcaccggcctggtggtggagcgggacttctctgtgcgcatcctgacagcctgcttcctgagcctgctgatcctgagcaccctgctgggcaacaccctggtgtgtgccgctgtgatccgcttccgccacctgcggagcaaggtgaccaacttcttcgtcatcagcctggccgtgtctgacctgctggtggccgtgctggtgatgccctggaaggctgtggccgagattgctggcttctggcccttcggcagcttctgcaacatctgggtggcctttgacatcatgtgcagcacagccagcatcctgaacctgtgtgtgatctctgtggaccgctactgggccatcagcagccccttccgctatgaaaggaagatgacccccaaggccgccttcatcctgatctctgtggcctggaccctgtctgtgctgatctccttcatccctgtgcagctgtcctggcacaaggccaagcccaccagccccagtgatggaaatgccaccagcctggccgagaccatcgacaactgtgacagcagcctgagcaggacctacgccatcagcagcagcgtcatctccttctacatccctgtggccatcatgattgtgacctacacccgcatctaccgcatcgcccagaagcagatcagaagaattgctgccctggagagagctgctgtgcacgccaagaactgccagaccaccactggaaatggcaagcctgtggagtgcagccagcctgagagcagcttcaagatgtccttcaagcgggagaccaaggtgctgaagaccctgagcgtcatcatgggcgtgtttgtgtgctgctggctgcccttcttcatcctgaactgcatcctgcccttctgtggcagcggggagacccagcccttctgcatcgacagcaacacctttgatgtgtttgtgtggtttggctgggccaacagcagcctgaaccccatcatctatgccttcaatgctgacttcaggaaggccttcagcaccctgctgggctgctaccgcctgtgcccagccaccaacaatgccatcgagaccgtgtccatcaacaacaacggggccgccatgttcagcagccaccacgagccccggggcagcatcagcaaggagtgcaacctggtgtacctgatcccccatgctgtgggcagcagcgaggacctgaagaaggaggaggccgccggcatcgcccggcccctggagaagctgagccctgccctgagcgtcatcctggactatgacacagatgtgtccctggagaagatccagcccatcacccagaatggccagcaccccacctag

SEQ ID NO: 150386 - DNA, 1341 bp, synthetic construct; identical to SEQ ID NO: 150385
  misc_feature 1..1341: note = Description of Artificial Sequence: Synthetic coding sequence
  source 1..1341: mol_type = other DNA

SEQ ID NO: 150387 - DNA, 1245 bp, synthetic construct
  misc_feature 1..1245: note = Description of Artificial Sequence: Synthetic coding sequence
  source 1..1245: mol_type = other DNA
atggaccccctgaacctgtcctggtatgatgatgacctggagcggcagaactggagccggcccttcaatggaagtgatggcaaggctgaccggccccactacaactactatgccaccctgctgaccctgctgattgctgtgattgtgtttggaaatgtgctggtgtgcatggctgtgtcccgggagaaggccctgcagaccaccaccaactacctgattgtgtccctggccgtggccgacctgctggtggccaccctggtgatgccctgggtggtgtacctggaggtggtgggggagtggaagttcagccgcatccactgtgacatctttgtgaccctggatgtgatgatgtgcacagccagcatcctgaacctgtgtgccatcagcattgaccgctacacagctgtggccatgcccatgctgtacaacacccgctacagcagcaagagaagagtgacagtgatgatcagcatcgtgtgggtgctgtccttcaccatcagctgccccctgctgtttggcctgaacaatgctgaccagaatgaatgcatcatcgccaacccagcctttgtggtgtacagcagcatcgtgtccttctacgtgcccttcatcgtgaccctgctggtgtacatcaagatctacatcgtgctgcggcggcggaggaagagggtgaacaccaagaggagcagccgggccttccgggcccacctgcgggcccccctgaaggaggccgcccggcgggcccaggagctggagatggagatgctgagcagcaccagccccccagagaggacccgctacagccccatcccccccagccaccaccagctgaccctgcctgaccccagccaccacggcctgcacagcaccccagacagccctgccaagccagagaagaatggacatgccaaggaccaccccaagatcgccaagatctttgagatccagaccatgcccaacgggaagaccaggaccagcctgaagaccatgagcaggaggaagctgagccagcagaaggagaagaaggccacccagatgctggccatcgtgctgggcgtcttcatcatctgctggctgcccttcttcatcacccacatcctgaacatccactgtgactgcaacatcccccctgtgctgtacagcgccttcacctggctgggctacgtgaacagcgctgtgaaccccatcatctacaccaccttcaacatcgagttcaggaaggccttcctgaagatcctgcactgctag

SEQ ID NO: 150388 - DNA, 1338 bp, synthetic construct
  misc_feature 1..1338: note = Description of Artificial Sequence: Synthetic coding sequence
  source 1..1338: mol_type = other DNA
atggaccccctgaacctgtcctggtatgatgatgacctggagcggcagaactggagccggcccttcaatggaagtgatggcaaggctgaccggccccactacaactactatgccaccctgctgaccctgctgattgctgtgattgtgtttggaaatgtgctggtgtgcatggctgtgtcccgggagaaggccctgcagaccaccaccaactacctgattgtgtccctggccgtggccgacctgctggtggccaccctggtgatgccctgggtggtgtacctggaggtggtgggggagtggaagttcagccgcatccactgtgacatctttgtgaccctggatgtgatgatgtgcacagccagcatcctgaacctgtgtgccatcagcattgaccgctacacagctgtggccatgcccatgctgtacaacacccgctacagcagcaagagaagagtgacagtgatgatcagcatcgtgtgggtgctgtccttcaccatcagctgccccctgctgtttggcctgaacaatgctgaccagaatgaatgcatcatcgccaacccagcctttgtggtgtacagcagcatcgtgtccttctacgtgcccttcatcgtgaccctgctggtgtacatcaagatctacatcgtgctgcggcggcggaggaagagggtgaacaccaagaggagcagccgggccttccgggcccacctgcgggcccccctgaagggcaactgcacccaccctgaggacatgaagctgtgcaccgtcatcatgaagagcaatggcagcttccctgtgaacagaagaagagtggtgcaggaggccgcccggcgggcccaggagctggagatggagatgctgagcagcaccagccccccagagaggacccgctacagccccatcccccccagccaccaccagctgaccctgcctgaccccagccaccacggcctgcacagcaccccagacagccctgccaagccagagaagaatggccacgccaaggaccaccccaagatcgccaagatctttgagatccagaccatgcccaacgggaagaccaggaccagcctgaagaccatgagcaggaggaagctgagccagcagaaggagaagaaggccacccagatgctggccatcgtgctgggcgtcttcatcatctgctggctgcccttcttcatcacccacatcctgaacatccactgtgactgcaacatcccccctgtgctgtacagcgccttcacctggctgggctacgtgaacagcgctgtgaaccccatcatctacaccaccttcaacatcgagttcaggaaggccttcctgaagatcctgcactgctag

SEQ ID NO: 150389 - DNA, 1332 bp, synthetic construct
  misc_feature 1..1332: note = Description of Artificial Sequence: Synthetic coding sequence
  source 1..1332: mol_type = other DNA
atggaccccctgaacctgtcctggtatgatgatgacctggagcggcagaactggagccggcccttcaatggaagtgatggcaaggctgaccggccccactacaactactatgccaccctgctgaccctgctgattgctgtgattgtgtttggaaatgtgctggtgtgcatggctgtgtcccgggagaaggccctgcagaccaccaccaactacctgattgtgtccctggccgtggccgacctgctggtggccaccctggtgatgccctgggtggtgtacctggaggtggtgggggagtggaagttcagccgcatccactgtgacatctttgtgaccctggatgtgatgatgtgcacagccagcatcctgaacctgtgtgccatcagcattgaccgctacacagctgtggccatgcccatgctgtacaacacccgctacagcagcaagagaagagtgacagtgatgatcagcatcgtgtgggtgctgtccttcaccatcagctgccccctgctgtttggcctgaacaatgctgaccagaatgaatgcatcatcgccaacccagcctttgtggtgtacagcagcatcgtgtccttctacgtgcccttcatcgtgaccctgctggtgtacatcaagatctacatcgtgctgcggcggcggaggaagagggtgaacaccaagaggagcagccgggccttccgggcccacctgcgggcccccctgaagggcaactgcacccaccctgaggacatgaagctgtgcaccgtcatcatgaagagcaatggcagcttccctgtgaacagaagaagagtggaggccgcccggcgggcccaggagctggagatggagatgctgagcagcaccagccccccagagaggacccgctacagccccatcccccccagccaccaccagctgaccctgcctgaccccagccaccacggcctgcacagcaccccagacagccctgccaagccagagaagaatggccacgccaaggaccaccccaagatcgccaagatctttgagatccagaccatgcccaacgggaagaccaggaccagcctgaagaccatgagcaggaggaagctgagccagcagaaggagaagaaggccacccagatgctggccatcgtgctgggcgtcttcatcatctgctggctgcccttcttcatcacccacatcctgaacatccactgtgactgcaacatcccccctgtgctgtacagcgccttcacctggctgggctacgtgaacagcgctgtgaaccccatcatctacaccaccttcaacatcgagttcaggaaggccttcctgaagatcctgcactgctag

SEQ ID NO: 150390 - DNA, 1338 bp, synthetic construct; identical to SEQ ID NO: 150388
  misc_feature 1..1338: note = Description of Artificial Sequence: Synthetic coding sequence
  source 1..1338: mol_type = other DNA

SEQ ID NO: 150391 - DNA, 24 bp, synthetic construct
  misc_feature 1..24: note = Description of Artificial Sequence: Synthetic coding sequence
  source 1..24: mol_type = other DNA
atggaccccctgaacctgtcctag

SEQ ID NO: 150392 - DNA, 1332 bp, synthetic construct; identical to SEQ ID NO: 150389
  misc_feature 1..1332: note = Description of Artificial Sequence: Synthetic coding sequence
  source 1..1332: mol_type = other DNA

SEQ ID NO: 150393 - DNA, 534 bp, synthetic construct
  misc_feature 1..534: note = Description of Artificial Sequence: Synthetic coding sequence
  source 1..534: mol_type = other DNA
atggaccccctgaacctgtcctggtatgatgatgacctggagcggcagaactggagccggcccttcaatggaagtgatggcaaggctgaccggccccactacaactactatgccaccctgctgaccctgctgattgctgtgattgtgtttggaaatgtgctggtgtgcatggctgtgtcccgggagaaggccctgcagaccaccaccaactacctgattgtgtccctggccgtggccgacctgctggtggccaccctggtgatgccctgggtggtgtacctggaggtggtgggggagtggaagttcagccgcatccactgtgacatctttgtgaccctggatgtgatgatgtgcacagccagcatcctgaacctgtgtgccatcagcattgaccgctacacagctgtggccatgcccatgctgtacaacacccgctacagcagcaagagaagagtgacagtgatgatcagcatcgtgtgggtgctgtccttcaccatcagctgccccctgctgtttggcctgaacaatgcctag

SEQ ID NO: 150394 - DNA, 1329 bp, synthetic construct
  misc_feature 1..1329: note = Description of Artificial Sequence: Synthetic coding sequence
  source 1..1329: mol_type = other DNA
atggaccccctgaacctgtcctggtatgatgatgacctggagcggcagaactggagccggcccttcaatggaagtgatggcaaggctgaccggccccactacaactactatgccaccctgctgaccctgctgattgctgtgattgtgtttggaaatgtgctggtgtgcatggctgtgtcccgggagaaggccctgcagaccaccaccaactacctgattgtgtccctggccgtggccgacctgctggtggccaccctggtgatgccctgggtggtgtacctggaggtgggggagtggaagttcagccgcatccactgtgacatctttgtgaccctggatgtgatgatgtgcacagccagcatcctgaacctgtgtgccatcagcattgaccgctacacagctgtggccatgcccatgctgtacaacacccgctacagcagcaagagaagagtgacagtgatgatcagcatcgtgtgggtgctgtccttcaccatcagctgccccctgctgtttggcctgaacaatgctgaccagaatgaatgcatcatcgccaacccagcctttgtggtgtacagcagcatcgtgtccttctacgtgcccttcatcgtgaccctgctggtgtacatcaagatctacatcgtgctgcggcggcggaggaagagggtgaacaccaagaggagcagccgggccttccgggcccacctgcgggcccccctgaagggcaactgcacccaccctgaggacatgaagctgtgcaccgtcatcatgaagagcaatggcagcttccctgtgaacagaagaagagtggaggccgcccggcgggcccaggagctggagatggagatgctgagcagcaccagccccccagagaggacccgctacagccccatcccccccagccaccaccagctgaccctgcctgaccccagccaccacggcctgcacagcaccccagacagccctgccaagccagagaagaatggacatgccaaggaccaccccaagatcgccaagatctttgagatccagaccatgcccaacgggaagaccaggaccagcctgaagaccatgagcaggaggaagctgagccagcagaaggagaagaaggccacccagatgctggccatcgtgctgggcgtcttcatcatctgctggctgcccttcttcatcacccacatcctgaacatccactgtgactgcaacatcccccctgtgctgtacagcgccttcacctggctgggctacgtgaacagcgctgtgaaccccatcatctacaccaccttcaacatcgagttcaggaaggccttcctgaagatcctgcactgctag

SEQ ID NO: 150395 - DNA, 1029 bp, synthetic construct
  misc_feature 1..1029: note = Description of Artificial Sequence: Synthetic coding sequence
  source 1..1029: mol_type = other DNA
atggccagcctgagccagctgagcggccacctgaactacacctgtggggctgagaacagcactggagccagccaggcccggccccacgcctactatgccctgagctactgtgccctgatcctggccatcgtgtttggaaatggcctggtgtgcatggctgtgctgaaggagcgggccctgcagaccaccaccaactacctggtggtgtccctggccgtggccgacctgctggtggccaccctggtgatgccctgggtggtgtacctggaggtgactggaggagtgtggaacttcagccgcatctgctgtgatgtgtttgtgaccctggatgtgatgatgtgcacagccagcatcctgaacctgtgtgccatcagcattgaccgctacacagctgtggtgatgcctgtgcactaccagcacggcaccggccagagcagctgccggcgggtggccctgatgatcacagctgtgtgggtgctggcctttgctgtgtcctgccccctgctgtttggcttcaacaccactggagaccccaccgtgtgcagcatcagcaacccagactttgtgatctacagctctgtggtgtccttctacctgccctttggagtgacagtgctggtgtatgcccgcatctacgtggtgctgaagcagaggaggaggaagaggatcctgacccggcagaacagccagtgcaacagcgtgcggcccggcttcccccagcagaccctgagcccagaccctgcccacctggagctgaagcgctactacagcatctgccaggacacagccctgggcggccctggcttccaggagcggggcggggagctgaagcgggaggagaagaccaggaacagcctgagcgccaccagcggggaggagggcaaccccaatggaggccactgtgcctggggcctgcactgcctgctggccgccctgctgctggacccctgcagccagtaccccctgcctgacatgccccgggtgccccgggccctgcagtgccacgacatggccggcctgcgggagtag

SEQ ID NO: 150396 - DNA, 1104 bp, synthetic construct
  misc_feature 1..1104: note = Description of Artificial Sequence: Synthetic coding sequence
  source 1..1104: mol_type = other DNA
atggccagcctgagccagctgagcggccacctgaactacacctgtggggctgagaacagcactggagccagccaggcccggccccacgcctactatgccctgagctactgtgccctgatcctggccatcgtgtttggaaatggcctggtgtgcatggctgtgctgaaggagcgggccctgcagaccaccaccaactacctggtggtgtccctggccgtggccgacctgctggtggccaccctggtgatgccctgggtggtgtacctggaggtgactggaggagtgtggaacttcagccgcatctgctgtgatgtgtttgtgaccctggatgtgatgatgtgcacagccagcatcctgaacctgtgtgccatcagcattgaccgctacacagctgtggtgatgcctgtgcactaccagcacggcaccggccagagcagctgccggcgggtggccctgatgatcacagctgtgtgggtgctggcctttgctgtgtcctgccccctgctgtttggcttcaacaccactggagaccccaccgtgtgcagcatcagcaacccagactttgtgatctacagctctgtggtgtccttctacctgccctttggagtgacagtgctggtgtatgcccgcatctacgtggtgctgaagcagaggaggaggaagaggatcctgacccggcagaacagccagtgcaacagcgtgcggcccggcttcccccagcagaccctgagcccagaccctgcccacctggagctgaagcgctactacagcatctgccaggacacagccctgggcggccctggcttccaggagcggggcggggagctgaagcgggaggagaagaccaggaacagcctgatgcccctgcgggagaagaaggccacccagatggtggccatcgtgctgggcgccttcatcgtgtgctggctgcccttcttcctgacccacgtgctgaacacccactgccagacctgccacgtgtccccagagctgtacagcgccaccacctggctgggctacgtgaacagcgccctgaaccctgtgatctacaccaccttcaacatcgagttcaggaaggccttcctgaagatcctgagctgctag

SEQ ID NO: 150397 - DNA, 1203 bp, synthetic construct
  misc_feature 1..1203: note = Description of Artificial Sequence: Synthetic coding sequence
  source 1..1203: mol_type = other DNA
atggccagcctgagccagctgagcggccacctgaactacacctgtggggctgagaacagcactggagccagccaggcccggccccacgcctactatgccctgagctactgtgccctgatcctggccatcgtgtttggaaatggcctggtgtgcatggctgtgctgaaggagcgggccctgcagaccaccaccaactacctggtggtgtccctggccgtggccgacctgctggtggccaccctggtgatgccctgggtggtgtacctggaggtgactggaggagtgtggaacttcagccgcatctgctgtgatgtgtttgtgaccctggatgtgatgatgtgcacagccagcatcctgaacctgtgtgccatcagcattgaccgctacacagctgtggtgatgcctgtgcactaccagcacggcaccggccagagcagctgccggcgggtggccctgatgatcacagctgtgtgggtgctggcctttgctgtgtcctgccccctgctgtttggcttcaacaccactggagaccccaccgtgtgcagcatcagcaacccagactttgtgatctacagctctgtggtgtccttctacctgccctttggagtgacagtgctggtgtatgcccgcatctacgtggtgctgaagcagaggaggaggaagaggatcctgacccggcagaacagccagtgcaacagcgtgcggcccggcttcccccagcagaccctgagcccagaccctgcccacctggagctgaagcgctactacagcatctgccaggacacagccctgggcggccctggcttccaggagcggggcggggagctgaagcgggaggagaagaccaggaacagcctgagccccaccatcgcccccaagctgagcctggaggtgaggaagctgagcaatggccgcctgagcaccagcctgaagctgggccccctgcagccccggggcgtgcccctgcgggagaagaaggccacccagatggtggccatcgtgctgggcgccttcatcgtgtgctggctgcccttcttcctgacccacgtgctgaacacccactgccagacctgccacgtgtccccagagctgtacagcgccaccacctggctgggctacgtgaacagcgccctgaaccctgtgatctacaccaccttcaacatcgagttcaggaaggccttcctgaagatcctgagctgctag

SEQ ID NO: 150398 - DNA, 1203 bp, synthetic construct; identical to SEQ ID NO: 150397
  misc_feature 1..1203: note = Description of Artificial Sequence: Synthetic coding sequence
  source 1..1203: mol_type = other DNA

SEQ ID NO: 150399 - DNA, 1203 bp, synthetic construct; identical to SEQ ID NO: 150397
  misc_feature 1..1203: note = Description of Artificial Sequence: Synthetic coding sequence
  source 1..1203: mol_type = other DNA

SEQ ID NO: 150400 - DNA, 1260 bp, synthetic construct
  misc_feature 1..1260: note = Description of Artificial Sequence: Synthetic coding sequence
  source 1..1260: mol_type = other DNA
atgggcaacagaagcacagcagatgctgatggcctgctggccggccggggccctgctgctggggccagcgctggggccagcgctggcctggccggccagggcgccgccgccctggtgggcggcgtgctgctgattggagctgtgctggccggcaacagcctggtgtgtgtgtctgtggccacagagcgggccctgcagacccccaccaacagcttcatcgtgtccctggccgctgctgacctgctgctggccctgctggtgctgcccctgtttgtgtacagcgaggtgcagggcggggcctggctgctgagcccccggctgtgtgatgccctgatggccatggatgtgatgctgtgcacagccagcatcttcaacctgtgtgccatctctgtggacagatttgtggccgtggccgtgcccctgcgctacaaccggcagggcggcagccggcggcagctgctgctgattggagccacctggctgctgtctgctgctgtggccgcccctgtgctgtgtggcctgaatgatgtgcggggccgggaccctgctgtgtgccgcctggaggaccgggactatgtggtgtacagctctgtgtgcagcttcttcctgccctgccccctgatgctgctgctgtactgggccaccttccggggcctgcagcgctgggaggtggcccggcgggccaagctgcacggccgggccccccggcggcccagcggccctggcccccccagccccaccccaccagccccccggctgccccaggacccctgtggccctgactgtgcccccccagcccctggcctgccccggggcccctgtggccctgactgtgccccagctgcccccagcctgccccaggacccctgtggccctgactgtgcccccccagcccctggcctgcccccagacccctgtggcagcaactgtgcccccccagatgctgtgcgggctgctgccctgcccccccagaccccaccccagaccaggagaagaagaagagccaagatcaccggccgggagaggaaggccatgagggtgctgcctgtggtggtgggcgccttcctgctgtgctggacccccttctttgtggtgcacatcacccaggccctgtgcccagcctgcagcgtgcccccccggctggtgtctgctgtgacctggctgggctacgtgaacagcgccctgaaccctgtgatctacacagtgttcaatgctgagttcagaaatgtgttcaggaaggccctgcgggcctgctgctag

SEQ ID NO: 150401 - DNA, 1434 bp, synthetic construct
  misc_feature 1..1434: note = Description of Artificial Sequence: Synthetic coding sequence
  source 1..1434: mol_type = other DNA
atgctgcccccaggcagcaatggaacagcctacccaggccagtttgccctgtaccagcagctggcccagggcaatgctgtgggcggcagcgctggggccccacccctgggccccagccaggtggtgacagcctgcctgctgaccctgctgatcatctggaccctgctgggcaatgtgctggtgtgtgccgccatcgtgcgcagccgccacctgcgggccaacatgaccaacgtgttcatcgtgtccctggccgtgtctgacctgtttgtggccctgctggtgatgccctggaaggctgtggccgaggtggccggctactggccctttggagccttctgtgatgtgtgggtggcctttgacatcatgtgcagcacagccagcatcctgaacctgtgtgtgatctctgtggaccgctactgggccatcagccggcccttccgctacaagaggaagatgacccagaggatggccctggtgatggtgggcctggcctggaccctgagcatcctgatctccttcatccctgtgcagctgaactggcaccgggaccaggccgcctcctggggcggcctggacctgcccaacaacctggccaactggaccccctgggaggaggacttctgggagccagatgtgaatgctgagaactgtgacagcagcctgaacagaacctacgccatcagcagcagcctcatctccttctacatccctgtggccatcatgattgtgacctacacccgcatctacagaattgcccaggtgcagatccgccgcatcagcagcctggagagagctgctgagcacgcccagagctgccgcagcagcgctgcctgtgccccagacaccagcctgcgggccagcatcaagaaggagaccaaggtgctgaagaccctgagcgtcatcatgggcgtgtttgtgtgctgctggctgcccttcttcatcctgaactgcatggtgcccttctgcagcggccaccctgagggccccccagctggcttcccctgtgtgtctgagaccacctttgatgtgtttgtgtggtttggctgggccaacagcagcctgaaccctgtgatctatgccttcaatgctgacttccagaaggtgtttgcccagctgctgggctgcagccacttctgcagcaggacccctgtggagaccgtgaacatcagcaatgaactcatctcctacaaccaggacatcgtgttccacaaggagattgctgctgcctacatccacatgatgcccaatgctgtgaccccaggcaaccgggaggtggacaatgatgaggaggagggcccctttgacaggatgttccagatctaccagaccagcccagatggagaccctgtggccgagagcgtgtgggagctggactgtgagggggagatcagcctggacaagatcacccccttcacccccaacggcttccactag

SEQ ID NO: 150402 - DNA, 438 bp, synthetic construct
  misc_feature 1..438: note = Description of Artificial Sequence: Synthetic coding sequence
  source 1..438: mol_type = other DNA
atggaccctgaggagcaggagctgctgaatgactaccgctaccgcagctacagctctgtgattgagaaggccctgaggaactttgagagcagcagcgagtgggccgacctgatcagcagcctgggcaagctgaacaaggccctgcagagcaacctgcgctacagcctgctgccccggcggctgctgatcagcaagaggctggcccagtgcctgcacccagccctgcccagcggcgtgcacctgaaggccctggagacctatgagatcatcttcaagatcgtgggcaccaagtggctggccaaggacctcttcctgtacagctgtggcctcttccccctgctggcccatgctgctgtgtctgtgcggcctgtgctgctgaccctgtatgagaagtacttcctgcccctgcagaagctgctgctgcccagcctgcagtag

SEQ ID NO: 150403 - DNA, 6897 bp, synthetic construct
  misc_feature 1..6897: note = Description of Artificial Sequence: Synthetic coding sequence
  source 1..6897: mol_type = other DNA
atggaccctgaggagcaggagctgctgaatgactaccgctaccgcagctacagctctgtgattgagaaggccctgaggaactttgagagcagcagcgagtgggccgacctgatcagcagcctgggcaagctgaacaaggccctgcagagcaacctgcgctacagcctgctgccccggcggctgctgatcagcaagaggctggcccagtgcctgcacccagccctgcccagcggcgtgcacctgaaggccctggagacctatgagatcatcttcaagatcgtgggcaccaagtggctggccaaggacctcttcctgtacagctgtggcctcttccccctgctggcccatgctgctgtgtctgtgcggcctgtgctgctgaccctgtatgagaagtacttcctgcccctgcagaagctgctgctgcccagcctgcaggccttcatcgtgggcctgctgcccggcctggaggagggcagcgagatcagtgacagaacagatgccctgctgctgcggctgagcctggtggtgggcaaggaggtgttctacacagccctgtggggctctgtgctggccagccccagcatccggctgcctgcctctgtgtttgtggtgggccacatcaacagagatgcccctggccgggagcagaagtacatgctgggcaccaaccaccagctgactgtgaagagcctgcgggccagcctgctggacagcaatgtgctggtgcagaggaacaacctggagatcgtgctcttcttcttccccttctacacctgcctggacagcaatgaaagagccatccccctgctgcggagtgacatcgtgcgcatcctgtctgctgccacccagaccctgctgcggcgggacatgagcctgaacagaaggctgtatgcctggctgctgggcagtgacatcaagggcaacacagtggtgcctgagagcgagatcagcaacagctatgaggaccagagcagctacttctttgagaagtacagcaaggacctgctggtggagggcctggccgagatcctgcaccagaagttcattgatgctgatgtggaggagcggcaccacgcctacctgaagcccttccgggtgctgatcagcctgctggacaagccagagatcggcccccaggtggtgggcaacctcttcctggaggtgatccgggccttctacagctactgcagagatgccctgggcagtgacctgaagctgagctacacccagagcggcaacagcctcatcagcgccatcaaggaaaatagaaatgccagcgagatcgtgaagacagtgaacctgctgatcaccagcctgagcacagacttcctgtgggactacatgacccgctgctttgaggagtgcttccggcctgtgaagcagcgctacagcgtgaggaacagcgtgtccccaccacccaccgtgtctgagctgtgtgccctgctggtgttcctgctggatgtgatccccctggagctgtacagcgaggtgcagacccagtacctgccccaggtgctgggctgcctggtgcagcccctggccgaggacatggaggccctgagcctgcctgagctgacccacgccctgaagacctgcttcaaggtgctgagcaaggtgcagatgccacccagctacctggacacagagagcaccagcggcaccagcagccctgtgaagggagaaaatggcaagatcatcctggagaccaaggctgtgattcctggagatgaagatgccagcttcccccccctgaagtcagaagattctggaattggcctgagcgccagcagccctgagctgtctgagcacctgcgggtgccccgggtgtccctggagagagatgatgtgtggaagaagggcggctccatgcagaggaccttcctgtgcatccaggagctgattgccaactttgccagcaagaacatctttggagtgcagctgacagccagcggggaggagagcaagtctgaggagcctgctgggaagagggacagagatggcacccagagcctggccgccaatgacagcagcaggaagaacagctgggagcccaagcccatcaccgtgccccagttcaagcagatgctgagtgacctcttcaccgcccggggcagccccttcaagaccaagagcagcgagagccccagcagcagccccagcagccctgccaggaagaatggaggagagtgggatgtggagaaggtggtgattgacctgggcggcagccgggaggagcggcgggaggcctttgctgctgcctgccacctgctgctggactgtgccaccttccctgtgtacctgtctgaggaggagacagagcagctgtgtgccaccctcttccagctgcctggagctggggacagcagcttccccagctggctgaagagcctgatgaccatctgctgctgcgtgacagactgctacctgcagaatgtggccatcagcaccctgctggaggtgatcaaccacagccagagcctggccctggtgattgaggacaagatgaagcgctacaagagcagcggccacaaccccttcttcggcaagctgcagatggtgacagtgccccccatcgcccctggcatcctgaaggtgattgctgagaagacagacttctaccagagggtggcccgggtgctgtggaaccagctgaacaaggagacccgggagcaccacgtgacctgtgtggagctgttctaccgcctgcactgcctggcccccacagccaacatctgtgaggacatcatctgccacgccctgctggaccctgacaagggcacccggctggaggccctcttccgcttcagcgtcatctggcacctgacccgggagatccagggcagccgggtgaccagccacaacagaagctttgacaggagcctgtttgtggtgctggacagcctggcctgcacagatggagccatcggggccgccgcccagggctggctggtgcgggccctgagcctgggagatgtggcccgcatcctggagcctgtgctgctgctgctgctgcagcccaagacccagaggaccagcatccactgcctgaagcaggagaacagcgcagatgacctgcaccgctggttcaacaggaagaagaccagcttccgggaggcctgtgctgtgcctgagccccaggagagcggcagcgaggagcacctgcccctgagccagttcaccaccgtggaccgggaggccatctgggccgaggtggagaaggagcctgagaagtaccccctgcggggggagctgtctgaggaggagctgccctactacgtggagctgcctgacagaacagcccatggagccccagacagcagcgagcacacagagagcgctgacaccagcagctgccacacagacagcgagaacaccagcagcttcagcagccccagccatgacctgcaggagctgagcaatgaggagaactgctgtgcccccatccccatgggcggccgggcctaccccaagaggtctgccctgctggccgccttccagagcgagagcttcaaggccggggccaagctgagcctggtgcgggtggacagcgacaagacccaggccagcgagagcttcagcagtgatgaggaggccgacctggagctgcaggccctgaccaccagccggctgctgaagcagcagcgggagcggcaggaggccgtggaggccctcttcaagcacatcctgctgtacctgcagccctatgacagccggcgggtgctgtatgccttctctgtgctggaggccgtgctgaagaccaaccccaaggagttcattgaagctgtgtccaggacctccatggacaccagcagcacagcccacctgaacctgatcagcaacctgctggcccggcaccaggaggccctgattggccagagcttctacggcaagctgcagacccaggtgcccaacgtgtgcccccacagcctgctgctggagctgctgacctacctgtgcctgtccttcctgcggagctactacccctgctacctgaaggtgagccaccgggacatcctgggcaacagagatgtgcaggtgaagtctgtggaggtgctgatccgcatcatgatgcagctggtgtctgtggccaagagcagcgagggcaagaatgtggagttcatccacagcctgctgcagcgctgcaaggtgcaggagtttgtgctgctgagcctgagcgcctccatgtacaccagccagaagagatatggcctggccacagcccaccacggccgggccctgcctgaggacagcctgtttgaggagagcctcatcaacctgggccaggaccagatctggagcgagcaccccctgcagatcgagctgctgaagctgctgcaggtgctgattgtgctggagcaccacctgggccgggcccacgaggaggccgagaaccagcctgacctgagccgggagtggcagagggccctgaacttccagcaggccatcagcgccctgcagtatgtgcagccccaccccctgaccagccagggcctgctggtgtctgctgtggtgcggggcctgcagcctgcctacggctacggcatgcacccagcctgggtgtccctggtgacccacagcctgccctactttgggaagagcctgggctggacagtgaccccatttgtggtgcagatctgcaagaacctggatgacctggtgaagcagtatgagagcgagagcgtgaagctgtctgtgtccaccaccagcaagcgggagaacatcagcccagactaccccctgaccctgctggagggcctgaccaccatcagccacttctgcctgctggagcaggccaaccagaacaagaagaccatggctgctggggaccctgccaacctgagaaatgccagaaatgccatcctggaggagctgcccaggacagtgaacaccatggccctgctgtggaatgtgctgaggaaggaggagacccagaagaggcctgtggacctgctgggcgccaccaagggcagcagctctgtgtacttcaagaccaccaagaccatccggcagaagatcctggacttcctgaaccccctgacagcccacctgggcgtgcagctgacagctgctgtggccgctgtgtggagcaggaagaaggcccagaggcacagcaagatgaagatcatccccacagccagcgccagccagctgaccctggtggacctggtgtgtgccctgagcaccctgcagacagacaccctgctgcacctggtgaaggaggtggtgaagaggcctccccaggtgaagggaggagatgagaagagccccctggtggacatccctgtgctgcagttctgctacgccttcctgcagaggctgcctgtgcctgccctgcaggagaacttcagcagcctgctgggcgtgctgaaggagagcgtgcagctgaacctggcccctcctggctacttcctgctgctgtccatgctgaatgactttgtgaccaggacccccaacctggagaacaagaaggaccagaaggacctgcaggagatcacccagaagatcctggaggccgtgggcaacattgctggcagcagcctggagcagacctcctggctgagcaggaacctggaggtgaaggcccagccccaggccagcctggaggagagtgatgctgaggaggacctgtatgatgctgctgctgccagcgccatggtgagcagcagcgcccccagcgtgtacagcgtgcaggccctgagcctgctggccgaggtgctggccagcctgctggacatggtgtacagaagtgatgagaaggagaaggctgtgcccctcatcagccggctgctgtactacgtgttcccctacctgaggaaccacagcgcctacaatgcccccagcttccgggccggggcccagctgctgagcagcctgagcggctacgcctacaccaagagggcctggaggaaggaggtgctggagctgttcctggaccctgccttcttccagatggacaccagctgtgtgcactggaagagcatcatcgaccacctgctgacccatgagaagaccatgttcaaggacctgatgaacatgcagagcagcagcctgaagctgttcagcagctttgagcagaaggccatgctgctgaagaggcaggcctttgctgtgttttctggagagctggaccagtaccacctgtacctgcccctcatccaggagcggctgacagacaacctgcgggtgggccagaccagcatcgtggccgcccagatgttcctgttcttccgggtgctgctgctgcgcatcagcccccagcacctgaccagcctgtggcccatcatggtgtctgagctgatccagaccttcacccagctggaggaggacctgaaggatgaagatgagagcctgcggagcaccaacaaggtgaacagaaccaaggtgtctgtgcctgatgccaacggccccagcgtgggggagatcccccagagcgagctgatcctgtacctgagcgcctgcaagttcctggacacagccctgtccttccccccagacaagatgcccctcttccagatctaccgctgggccttcatccctgaggtggacacagagggccctgccttcctgagtgatgtggaggagaaccaccaggagtgcaagccccacacagtgcgcatcctggagctgctgaagctgaagtttggagagatcagcagcagtgatgagatcaccatgaagtctgagttccccctgctgcggcagcacagcgtgagcagcatccggcagctgatgcccttcttcatgaccctgaatggagccttcaagacccagaggcagctgcctgctgacagccctggcacccccttcctggacttccctgtgacagacagcccccgcatcctgaagcagctggaggagtgcatcgagtatgacttcctggagcacccagaatgttag

SEQ ID NO: 150404 - DNA, 792 bp, synthetic construct
  misc_feature 1..792: note = Description of Artificial Sequence: Synthetic coding sequence
  source 1..792: mol_type = other DNA
atgttctacttccactgccccccccagctggagggcacagccaccttcggcaaccacagcagcggggactttgatgatggcttcctgcggaggaagcagaggaggaacagaaccaccttcaccctgcagcagctggaggccctggaggccgtgtttgcccagacccactacccagatgtgttcacccgggaggagctggccatgaagatcaacctgacagaggcccgggtgcaggtgtggttccagaacagaagagccaagtggaggaagacagagcggggggccagtgaccaggagcccggggccaaggagcccatggccgaggtgaccccacctcctgtgaggaacatcaacagccccccacctggggaccaggcccggagcaagaaggaggccctggaggcccagcagagcctgggccgcacagtgggccctgctggccccttcttccccagctgcctgcccggcaccctgctgaacacagccacctacgcccaggccctgagccacgtggccagcctgaagggcggccccctgtgcagctgctgcgtgcctgaccccatgggcctgtccttcctgcccacctacggctgccagagcaacagaacagcctctgtggccaccctgaggatgaaggcccgggagcacagcgaggccgtgctgcagagcgccaacctgctgcccagcaccagcagcagccctggccctgtggccaagccagcccccccagatggcagccaggagaagaccagccccaccaaggagcagagcgaggccgagaagtctgtgtag

SEQ ID NO: 150405 - DNA, 807 bp, synthetic construct
  misc_feature 1..807: note = Description of Artificial Sequence: Synthetic coding sequence
  source 1..807: mol_type = other DNA
atggtgctgatgagctgtgaccagaggctcatcagcctgctgctggtgggcacagccacctttggaaaccacagcagcggggactttgatgatggcttcctgcggaggaagcagaggaggaacagaaccaccttcaccctgcagcagctggaggccctggaggccgtgtttgcccagacccactacccagatgtgttcacccgggaggagctggccatgaagatcaacctgacagaggcccgggtgcaggtgtggttccagaacagaagagccaagtggaggaagacagagcggggggccagtgaccaggagcccggggccaaggagcccatggccgaggtgaccccacctcctgtgaggaacatcaacagccccccacctggggaccaggcccggagcaagaaggaggccctggaggcccagcagagcctgggccgcacagtgggccctgctggccccttcttccccagctgcctgcccggcaccctgctgaacacagccacctacgcccaggccctgagccacgtggccagcctgaagggcggccccctgtgcagctgctgcgtgcctgaccccatgggcctgtccttcctgcccacctacggctgccagagcaacagaacagcctctgtggccaccctgaggatgaaggcccgggagcacagcgaggccgtgctgcagagcgccaacctgctgcccagcaccagcagcagccctggccctgtggccaagccagcccccccagatggcagccaggagaagaccagccccaccaaggagcagagcgaggccgagaagtctgtgtag

SEQ ID NO: 150406 - DNA, 384 bp, synthetic construct
  misc_feature 1..384: note = Description of Artificial Sequence: Synthetic coding sequence
  source 1..384: mol_type = other DNA
atgaagctgaatgtggatggcctgctggtgtacttcccctatgactacatctacccagagcagttctcctacatgagggagctgaagaggaccctggatgccaagggccatggagtgctggagatgcccagcggcaccgggaagacagtgtccctgctggccctgatcatggcctaccagagggcctaccccctggaggtgaccaagctgatctactgcagcaggacagtgcctgagattgagaaggtgattgaggagctgaggaagctgctgaacttctatgagaagcaggagggggagaagctgcccttcctgggcctggccctgagcagcaggaagaacctgtgcatccaccctgagaccaccagcgccagcaccccctag

SEQ ID NO: 150407 - DNA, 4614 bp, synthetic construct
  misc_feature 1..4614: note = Description of Artificial Sequence: Synthetic coding sequence
  source 1..4614: mol_type = other DNA
atgggagagaagctggagctgcggctgaagagccctgtgggcgctgagcctgctgtgtacccctggcccctgcctgtgtatgacaagcaccatgatgctgcccacgagatcatcgagaccatccgctgggtgtgtgaggagatcccagacctgaagctggccatggagaactacgtgctgattgattatgacaccaagagctttgagagcatgcagaggctgtgtgacaagtacaacagagccatcgacagcatccaccagctgtggaagggcaccacccagcccatgaagctgaacacccggcccagcacaggcctgctgcggcacatcctgcagcaggtgtacaaccacagcgtgacagatcctgagaagctgaacaactatgagcccttcagccctgaggtgtatggagagaccagctttgacctggtggcccagatgattgatgagatcaagatgacagatgatgacctgtttgtggacctgggcagcggcgtgggccaggtggtgctgcaggtggccgccgccaccaactgcaagcaccactatggagtggagaaggctgacatcccagccaagtatgcagagaccatggaccgggagttcaggaagtggatgaagtggtacggcaagaagcacgccgagtacaccctggagcggggggacttcctgtctgaggagtggagggagcgcatcgccaacaccagcgtcatctttgtgaacaactttgcctttggacctgaggtggaccaccagctgaaggagagatttgccaacatgaaggagggcggccgcatcgtgagcagcaagccctttgcccccctgaacttccgcatcaacagcaggaacctgagtgacatcggcaccatcatgagggtggtggagctgagccccctgaagggctctgtgtcctggacaggcaagcctgtgtcctactacctgcacaccatcgacaggaccatcctggagaactacttcagcagcctgaagaaccccaagctgcgggaggagcaggaggccgcccggcggcggcagcagcgggagagcaagagcaatgctgccacccccaccaagggccctgagggcaaggtggccggccctgcagatgcccccatggacagcggggctgaggaggagaaggccggggccgccaccgtgaagaagcccagccccagcaaggccaggaagaagaagctgaacaagaagggcaggaagatggccggcaggaagaggggccggcccaagaagatgaacacagccaaccctgagaggaagcccaagaagaaccagacagccctggatgccctgcacgcccagacagtgtcccagacagctgccagcagcccccaggatgcctaccgcagcccccacagccccttctaccagctgccccccagcgtgcagaggcacagccccaaccccctgctggtggcccccaccccaccagccctgcagaagctgctggagagcttcaagatccagtacctgcagttcctggcctacaccaagaccccccagtacaaggccagcctgcaggagctgctgggccaggagaaggagaagaatgcccagctgctgggcgccgcccagcagctgctgagccactgccaggcccagaaggaggagatccggcggctcttccagcagaagctggatgagctgggcgtgaaggccctgacctacaatgacctgatccaggcccagaaggagatcagcgcccacaaccagcagctgcgggagcagagcgagcagctggagcaggacaacagagccctgcggggccagagcctgcagctgctgaaggcccgctgtgaggagctgcagctggactgggccaccctgagcctggagaagctgctgaaggagaagcaggccctgaagagccagatcagcgagaagcagaggcactgcctggagctgcagatcagcatcgtggagctggagaagagccagaggcagcaggagctgctgcagctgaagagctgtgtgcccccagatgatgccctgagcctgcacctgcggggcaagggggccctgggccgggagctggagccagatgccagccggctgcacctggagctggactgcaccaagttcagcctgccccacctgagctccatgagccctgagctgtccatgaatggccaggccgccggctatgagctgtgtggggtgctgagccggcccagcagcaagcagaacaccccccagtacctggccagccccctggaccaggaggtggtgccctgcacccccagccacgtgggccggccccggctggagaagctgagcggcctggccgccccagactacacccggctgagccctgccaagatcgtgctgcggcggcacctgagccaggaccacacagtgcccggccggcctgctgccagcgagctgcacagcagagctgagcacaccaaggaaaatggcctgccctaccagagccccagcgtgcccggctccatgaagctgagcccccaggacccccggcccctgagccctggggccctgcagctggccggggagaagagcagcgagaagggcctgcgggagcgggcctacggcagcagcggggagctgatcaccagcctgcccatcagcatccccctgagcacagtgcagcccaacaagctgcctgtgtccatccccctggcctctgtggtgctgcccagcagagctgagcgggcccggagcacccccagccctgtgctgcagccccgggaccccagcagcaccctggagaagcagatcggggccaatgcccatggagctggcagccgcagcctggccctggccccagctggcttctcctatgccggctctgtggccatcagcggggccctggccggcagccctgccagcctgaccccaggagctgagcccgccaccctggatgagagcagcagcagcggcagcctgtttgccaccgtgggcagccgcagcagcaccccccagcaccccctgctgctggcccagcccaggaacagcctgcctgccagccctgcccaccagctgagcagcagcccccggctgggcggggccgcccagggccccctgcctgaggccagcaaaggagacctgcccagcgacagcggcttcagtgaccctgagagcgaggccaagagaagaattgtgttcaccatcaccactggagctggcagcgccaagcagagccccagcagcaagcacagccccctgacagccagcgcccggggggactgtgtgcccagccacggccaggacagcagaagaagaggccgcaggaagagggccagcgctggcacccccagcctgtctgctggggtgagccccaagagaagagccctgcccagcgtggccggcctcttcacccagcccagcggcagccccctgaacctgaacagcatggtgagcaacatcaaccagcccctggagatcacagccatcagcagccctgagaccagcctgaagagcagccctgtgccctaccaggaccatgaccagccccctgtgctgaagaaggagcggcccctgagccagaccaacggggcccactacagccccctgaccagtgatgaggagcccggctctgaagatgagcccagcagcgcccgcatcgagaggaagatcgccaccatcagcctggagagcaagagcccccccaagaccctggagaatggaggcggcctggccggcaggaagccagccccagctggggagcctgtgaacagcagcaagtggaagagcaccttcagccccatcagtgacatcggcctggccaagtctgctgacagccccctgcaggccagcagcgccctgagccagaacagcctcttcaccttccggcctgccctggaggagcccagcgcagatgccaagctggccgcccaccccaggaagggcttccctggcagcctgtctggagcagatggcctgagccctggcaccaacccagccaacggctgcaccttcggcggcggcctggccgctgacctgagcctgcacagcttcagtgatggagccagcctgccccacaagggccctgaggccgccggcctgagcagccccctgtccttccccagccagaggggcaaggagggcagtgatgccaaccccttcctgagcaagaggcagctggatggcctggccggcctgaagggggagggcagccggggcaaggaggccggggagggcggcctgcccctgtgtggccccacagacaagacccccctgctgagcggcaaggccgccaaggcccgggaccgggaggtggacctgaagaatggccacaacctcttcatctctgctgctgctgtgcccccaggcagcctgctgagcggccctggcctggccccagctgccagcagcgctggaggagctgccagcagcgcccagacccaccgctccttcctgggccccttccccccaggcccccagtttgccctgggccccatgagcctgcaggccaacctgggctctgtggccggcagctctgtgctgcagagcctcttcagctctgtgcctgctgctgctggcctggtgcacgtgagcagcgctgccacccggctgaccaacagccacgccatgggcagcttctctggagtggccggcggcaccgtgggcggcaactag

SEQ ID NO: 150408 - DNA, 1203 bp, synthetic construct
  misc_feature 1..1203: note = Description of Artificial Sequence: Synthetic coding sequence
  source 1..1203: mol_type = other DNA
atgaggggccggcggggggacaggatgaccatcaacatccaggagcacatggccatcaacgtgtgccccggccccatccggcccatccggcagatcagtgactacttcccccggggccctggccctgagggcggcggcggcggcggcggggaggccccagcccacctggtgcccctggccctggcccctcctgctgccctgctgggcgccaccaccccagaagatggagctgaggtggacagctatgacagtgatgatgccacagccctgggcaccctggagtttgacctgctgtatgaccgggccagctgcaccctgcactgcagcatcctgcgggccaagggcctgaagcccatggacttcaacggcctggccgacccctacgtgaagctgcacctgctgcccggggcctgcaaggccaacaagctgaagaccaagacccagaggaacaccctgaaccctgtgtggaatgaagacctgacctacagcggcatcacagatgatgacatcacccacaaggtgctgagaattgctgtgtgtgatgaggacaagctgagccacaatgagttcatcggggagatccgggtgcccctgcggcggctgaagcccagccagaagaagcacttcaacatctgcctggagcggcaggtgcccctggccagccccagctccatgtctgctgccctgcggggcatcagctgctacctgaaggagctggagcaggccgagcagggccagggcctgctggaggagcggggccgcatcctgctgagcctgagctacagcagcagaagaagaggcctgctggtgggcatcctgcgctgtgcccacctggccgccatggatgtgaatggctacagcgacccctacgtgaagacctacctgcggccagatgtggacaagaagagcaagcacaagacctgtgtgaagaagaagaccctgaaccctgagttcaatgaggagttcttctatgaaattgagctgagcaccctggccaccaagaccctggaggtgacagtgtgggactatgacatcggcaagagcaatgacttcatcggcggcgtgtccctgggccctggggcccggggggaggccaggaagcactggagcgactgcctgcagcagccagatgctgccctggagcgctggcacaccctgaccagcgagctgcccccagctgctggggccctgagcagcgcctag

SEQ ID NO: 150409 - DNA, 927 bp, synthetic construct
  misc_feature 1..927: note = Description of Artificial Sequence: Synthetic coding sequence
  source 1..927: mol_type = other DNA
atgaccctgcggaggagaggagagaaggccaccatcagcatccaggagcacatggccattgatgtgtgccccggccccatccggcccatcaagcagatcagtgactacttcccccgcttcccccggggcctgcccccagatgctggccccagggctgctgcccccccagatgccccagcccggcctgctgtggccggggccggcagaagaagccccagtgatggagcccgggaggatgatgaagatgtggaccagctgtttggagcctacggcagcagccctggccccagccctggccccagccctgcccggcccccagccaagcccccagaagatgagccagatgctgatggctatgaaagtgatgactgcacagccctgggcaccctggacttcagcctgctgtatgaccaggagaacaatgccctgcactgcaccatcaccaaggccaagggcctgaagcccatggaccacaacggcctggccgacccctacgtgaagctgcacctgctgcccggggccagcaaggccaacaagctgcggaccaagaccctgaggaacaccctgaaccccacctggaatgagaccctgacctactacggcatcacagatgaggacatgatcaggaagaccctgcgcatctctgtgtgtgatgaggacaagttccgccacaatgagttcatcggggagaccagggtgcccctgaagaagctgaagcccaaccacaccaagaccttcagcatctgcctggagaagcagctgcctgtggacaagacagaggacaagagcctggaggagcggggccgcatcctgatcagcctgaagtacagcagccagaagcagggcctgctggtgggcatcgtgcgctgtgcccacctggccgccatggatgccaacggctacagcgacccctacgtgaagacctag

SEQ ID NO: 150410 - DNA, 927 bp, synthetic construct; identical to SEQ ID NO: 150409
  misc_feature 1..927: note = Description of Artificial Sequence: Synthetic coding sequence
  source 1..927: mol_type = other DNA

SEQ ID NO: 150411 - DNA, 1275 bp, synthetic construct
  misc_feature 1..1275: note = Description of Artificial Sequence: Synthetic coding sequence
  source 1..1275: mol_type = other DNA
atggccctgcccacccccagcgacagcaccctgcctgctgaggcccggggccggggcagaagaagaaggctggtgtggacccccagccagagcgaggccctgcgggcctgctttgagaggaacccctacccaggcatcgccacccgggagcggctggcccaggccatcggcatccctgagccccgggtgcagatctggttccagaatgaaagaagccggcagctgcggcagcacagaagagagagccggccctggccaggccggcggggccccccagagggccgcaggaagaggacagctgtgacaggcagccagacagccctgctgctgcgggcctttgagaaggaccgcttccctggcattgctgcccgggaggagctggcccgggagaccggcctgcctgagagccgcatccagatctggttccagaacagaagagcccggcaccctggccagggcggccgggccccagcccaggccggcggcctgtgcagcgctgcccctgggggcggccacccagcccccagctgggtggcctttgcccacactggagcctggggcaccggcctgcctgccccccacgtgccctgtgcccctggggccctgccccagggcgcctttgtgtcccaggccgcccgggccgccccagccctgcagcccagccaggccgccccagctgagggcgtgtcccagcctgccccagcccggggggactttgcctatgctgccccagcccccccagatggagccctgagccacccccaggccccccgctggccaccccaccctgggaagagccgggaggaccgggacccccagagagatggcctgcccggcccctgtgctgtggcccagcccggccctgcccaggccggcccccagggccagggcgtgctggccccacccaccagccagggcagcccctggtggggctggggccggggcccccaggtggccggggccgcctgggagccccaggccggggccgcccccccaccccagcctgcccccccagatgccagcgccagcgcccggcagggccagatgcagggcatcccagcccccagccaggccctgcaggagcccgccccctggagcgccctgccctgtggcctgctgctggatgagctgctggccagccctgagttcctgcagcaggcccagcccctgctggagacagaggcccctggagagctggaggccagcgaggaggccgccagcctggaggcccccctgtctgaggaggagtaccgggccctgctggaggagctgtag

SEQ ID NO: 150412 - DNA, 1458 bp, synthetic construct
  misc_feature 1..1458: note = Description of Artificial Sequence: Synthetic coding sequence
  source 1..1458: mol_type = other DNA
atgaagggctggagcctgcctgcctgtggccccctgcagggccgcctggccggctggctggccgtgcgggccggcctgctggccgccccagctgctgtgcacagccctgctgaggtgcacggcagccccccagccagcctgtgcccccggcccagcgtgaagttccggcccggcctgacagccatggccctgcccacccccagcgacagcaccctgcctgctgaggcccggggccggggcagaagaagaaggctggtgtggacccccagccagagcgaggccctgcgggcctgctttgaaagaaacccctacccaggcatcgccacccgggagcggctggcccaggccatcggcatccctgagccccgggtgcagatctggttccagaatgaaagaagccggcagctgcggcagcaccggcgggagagccggccctggccaggaagaagaggccccccagagggccgcaggaagaggacagctgtgacaggcagccagacagccctgctgctgcgggcctttgagaaggaccgcttccctggcattgctgcccgggaggagctggcccgggagaccggcctgcctgagagccgcatccagatctggttccagaacagaagagcccggcaccctggccagggcggccgggccccagcccaggccggcggcctgtgcagcgctgcccctgggggcggccacccagcccccagctgggtggcctttgcccacactggagcctggggcaccggcctgcctgcccctcatgtgccctgtgcccctggggccctgccccagggcgcctttgtgtcccaggccgcccgggccgccccagccctgcagcccagccaggccgccccagctgagggcgtgtcccagcctgccccagcccggggggactttgcctatgctgccccagcccccccagatggagccctgagccacccccaggccccccgctggccaccccaccctgggaagagcagagaagatcgggacccccagagagatggcctgcccggcccctgtgctgtggcccagcccggccctgcccaggccggcccccagggccagggcgtgctggccccacccaccagccagggcagcccctggtggggctggggccggggcccccaggtggccggggccgcctgggagccccaggccggggccgcccccccaccccagcctgcccccccagatgccagcgccagcgcccggcagggccagatgcagggcatcccagcccccagccaggccctgcaggagcccgccccctggagcgccctgccctgtggcctgctgctggatgagctgctggccagccctgagttcctgcagcaggcccagcccctgctggagacagaggcccctggagagctggaggccagcgaggaggccgccagcctggaggcccccctgtctgaggaggagtaccgggccctgctggaggagctgtag

SEQ ID NO: 150413 - DNA, 1326 bp, synthetic construct
  misc_feature 1..1326: note = Description of Artificial Sequence: Synthetic coding sequence
  source 1..1326: mol_type = other DNA
atgaagaccctgcccctgcacagccactgcacagagatgcagaggctgctgcccaagctggagatgctgaccctgggcagcagcttctgcagcctgcagggcgagttctgccaggccatggacagcttcaccaccgtgagccacgtgggcatgtgtgaggagacagatgccagcttcaacgtgttcagccccaagttccagtttgacaggagccactgccagagcctgcgcttccaccagaacatggagctggactttggccactttgatgagcgggacaagaccagcaggaacatgaggggcagcaggatgaatggcctgcccagccccacccacagcgcccactgcagcttctaccgcaccaggaccctgcaggccctgagcaatgagaagaaggccaagaaggtgcgcttctacagaaatggagaccgctacttcaagggcatcgtgtatgctgtgtccagtgaccgcttccgcagctttgatgccctgctggccgacctgaccaggagcctgagtgacaacatcaacctgccccagggcgtgcgctacatctacaccattgatggcagcaggaagattggctccatggatgagctggaggagggggagagctatgtgtgcagcagtgacaacttcttcaagaaggtggagtacaccaagaatgtgaaccccaactggagcgtgaatgtgaagaccagcgccaacatgaaggccccccagagcctggccagcagcaacagcgcccaggcccgggagaacaaggactttgtgcggcccaagctggtgaccatcatccgcagcggcgtgaagcccaggaaggctgtgcgggtgctgctgaacaagaagacagcccacagctttgagcaggtgctgacagacatcacagaggccatcaagctggagactggagtggtgaagaagctgtacaccctggatggcaagcaggtgacctgcctgcatgacttctttggagatgatgatgtgttcatcgcctgtggccctgagaagttccgctatgcccaggatgacttcagcctggatgaaaatgaatgtcgggtgatgaagggcaaccccagcgccacagctggccccaaggccagccccaccccccagaagaccagcgccaagagccctggccccatgagaagaagcaagagccctgctgacagcgccaacggcaccagcagcagccagctgagcacccccaagagcaagcagagccccatcagcacccccaccagccctggcagcctgaggaagcacaaggacctgtacctgcccctgagcctggatgacagcgacagcctgggggacagcatgtag

SEQ ID NO: 150414 - DNA, 1098 bp, synthetic construct
  misc_feature 1..1098: note = Description of Artificial Sequence: Synthetic coding sequence
  source 1..1098: mol_type = other DNA
atggagctggactttggccactttgatgagcgggacaagaccagcaggaacatgaggggcagcaggatgaatggcctgcccagccccacccacagcgcccactgcagcttctaccgcaccaggaccctgcaggccctgagcaatgagaagaaggccaagaaggtgcgcttctacagaaatggagaccgctacttcaagggcatcgtgtatgctgtgtccagtgaccgcttccgcagctttgatgccctgctggccgacctgaccaggagcctgagtgacaacatcaacctgccccagggcgtgcgctacatctacaccattgatggcagcaggaagattggctccatggatgagctggaggagggggagagctatgtgtgcagcagtgacaacttcttcaagaaggtggagtacaccaagaatgtgaaccccaactggagcgtgaatgtgaagaccagcgccaacatgaaggccccccagagcctggccagcagcaacagcgcccaggcccgggagaacaaggactttgtgcggcccaagctggtgaccatcatccgctctggagtgaagcccaggaaggctgtgcgggtgctgctgaacaagaagacagcccacagctttgagcaggtgctgacagacatcacagaggccatcaagctggagaccggggtggtgaagaagctgtacaccctggatggcaagcaggtgacctgcctgcatgacttctttggagatgatgatgtgttcatcgcctgtggccctgagaagttccgctatgcccaggatgacttcagcctggatgaaaatgaatgtcgggtgatgaagggcaaccccagcgccacagctggccccaaggccagccccaccccccagaagaccagcgccaagagccctggccccatgaggaggagcaagagccctgctgacagcggaaatgaccaggatgccaacggcaccagcagcagccagctgagcacccccaagagcaagcagagccccatcagcacccccaccagccctggcagcctgaggaagcacaaggacctgtacctgcccctgagcctggatgacagcgacagcctgggggacagcatgtag

SEQ ID NO: 150415 - DNA, 1098 bp, synthetic construct; identical to SEQ ID NO: 150414
  misc_feature 1..1098: note = Description of Artificial Sequence: Synthetic coding sequence
  source 1..1098: mol_type = other DNA

SEQ ID NO: 150416 - DNA, 1317 bp, synthetic construct
  misc_feature 1..1317: note = Description of Artificial Sequence: Synthetic coding sequence
  source 1..1317: mol_type = other DNA
tgatgcacagagatgcagaggctgctgcccaagctggagatgctgaccctgggcagcagcttctgcagcctgcagggcgagttctgccaggccatggacagcttcaccaccgtgagccacgtgggcatgtgtgaggagacagatgccagcttcaacgtgttcagccccaagttccagtttgacaggagccactgccagagcctgcgcttccaccagaacatggagctggactttggccactttgatgagcgggacaagaccagcaggaacatgaggggcagcaggatgaatggcctgcccagccccacccacagcgcccactgcagcttctaccgcaccaggaccctgcaggccctgagcaatgagaagaaggccaagaaggtgcgcttctacagaaatggagaccgctacttcaagggcatcgtgtatgctgtgtccagtgaccgcttccgcagctttgatgccctgctggccgacctgaccaggagcctgagtgacaacatcaacctgccccagggcgtgcgctacatctacaccattgatggcagcaggaagattggctccatggatgagctggaggagggggagagctatgtgtgcagcagtgacaacttcttcaagaaggtggagtacaccaagaatgtgaaccccaactggagcgtgaatgtgaagaccagcgccaacatgaaggccccccagagcctggccagcagcaacagcgcccaggcccgggagaacaaggactttgtgcggcccaagctggtgaccatcatccgcagcggcgtgaagcccaggaaggctgtgcgggtgctgctgaacaagaagacagcccacagctttgagcaggtgctgacagacatcacagaggccatcaagctggagactggagtggtgaagaagctgtacaccctggatggcaagcaggtgacctgcctgcatgacttctttggagatgatgatgtgttcatcgcctgtggccctgagaagttccgctatgcccaggatgacttcagcctggatgaaaatgaatgtcgggtgatgaagggcaaccccagcgccacagctggccccaaggccagccccaccccccagaagaccagcgccaagagccctggccccatgagaagaagcaagagccctgctgacagcggaaatgaccaggatgccaacggcaccagcagcagccagctgagcacccccaagagcaagcagagccccatcagcacccccaccagccctggcagcctgaggaagcacaaggacctgtacctgcccctgagcctggatgacagcgacagcctgggggacagcatgtag

SEQ ID NO: 150417 - DNA, 1083 bp, synthetic construct
  misc_feature 1..1083: note = Description of Artificial Sequence: Synthetic coding sequence
  source 1..1083: mol_type = other DNA
atggagctggactttggccactttgatgagcgggacaagaccagcaggaacatgaggggcagcaggatgaatggcctgcccagccccacccacagcgcccactgcagcttctaccgcaccaggaccctgcaggccctgagcaatgagaagaaggccaagaaggtgcgcttctacagaaatggagaccgctacttcaagggcatcgtgtatgctgtgtccagtgaccgcttccgcagctttgatgccctgctggccgacctgaccaggagcctgagtgacaacatcaacctgccccagggcgtgcgctacatctacaccattgatggcagcaggaagattggctccatggatgagctggaggagggggagagctatgtgtgcagcagtgacaacttcttcaagaaggtggagtacaccaagaatgtgaaccccaactggagcgtgaatgtgaagaccagcgccaacatgaaggccccccagagcctggccagcagcaacagcgcccaggcccgggagaacaaggactttgtgcggcccaagctggtgaccatcatccgctctggagtgaagcccaggaaggctgtgcgggtgctgctgaacaagaagacagcccacagctttgagcaggtgctgacagacatcacagaggccatcaagctggagaccggggtggtgaagaagctgtacaccctggatggcaagcaggtgacctgcctgcatgacttctttggagatgatgatgtgttcatcgcctgtggccctgagaagttccgctatgcccaggatgacttcagcctggatgaaaatgaatgtcgggtgatgaagggcaaccccagcgccacagctggccccaaggccagccccaccccccagaagaccagcgccaagagccctggccccatgaggaggagcaagagccctgctgacagcgccaacggcaccagcagcagccagctgagcacccccaagagcaagcagagccccatcagcacccccaccagccctggcagcctgaggaagcacaaggacctgtacctgcccctgagcctggatgacagcgacagcctgggggacagcatgtag

SEQ ID NO: 150418 - DNA, 342 bp, synthetic construct
  misc_feature 1..342: note = Description of Artificial Sequence: Synthetic coding sequence
  source 1..342: mol_type = other DNA
atggagctggactttggccactttgatgagcgggacaagaccagcaggaacatgaggggcagcaggatgaatggcctgcccagccccacccacagcgcccactgcagcttctaccgcaccaggaccctgcaggccctgagcaatgagaagaaggccaagaaggtgcgcttctacagaaatggagaccgctacttcaagggcatcgtgtatgctgtgtccagtgaccgcttccgcagctttgatgccctgctggccgacctgaccaggagcctgagtgacaacatcaacctgccccagggcgtgcgctacatctacaccattgatggcagcaggaagatctag

SEQ ID NO: 150419 - DNA, 1083 bp, synthetic construct; identical to SEQ ID NO: 150417
  misc_feature 1..1083: note = Description of Artificial Sequence: Synthetic coding sequence
  source 1..1083: mol_type = other DNA

SEQ ID NO: 150420 - DNA, 1065 bp, synthetic construct
  misc_feature 1..1065: note = Description of Artificial Sequence: Synthetic coding sequence
  source 1..1065: mol_type = other DNA
atggccaagacaggagctgaggaccaccgggaggccctgagccagagcagcctgagcctgctgacagaggccatggaggtgctgcagcagagcagccctgagggcaccctggatggcaacacagtgaaccccatctacaagtacatcctgaatgacctgccccgggagttcatgagcagccaggccaaggccgtcatcaagaccacagatgactacctgcagagccagtttggccccaaccggctggtgcacagcgctgctgtgtctgagggcagcggcctgcaggactgcagcacccaccagacagccagtgaccacagccatgatgagatcagtgacctggacagctacaagagcaacagcaagaacaacagctgcagcatcagcgccagcaagaggaacagacctgtgtctgcccctgtgggccagctgcgggtggccgagttcagcagcctgaagttccagagcgccaggaactggcagaagctgagccagaggcacaagctgcagcccagggtcatcaaggtgacagcctacaagaatggcagcaggacagtgtttgcccgggtgacagtgcccaccatcaccctgctgctggaggagtgcacagagaagctgaacctgaacatggccgcccggcgggtcttcctggctgatggcaaggaggccctggagcctgaggacatcccccatgaagcagatgtgtatgtgtccactggagagcccttcctgaaccccttcaagaagatcaaggaccacctgctgctgatcaagaaggtgacctggaccatgaatggcctgatgctgcccacagacatcaagaggaggaagaccaagcctgtgctgagcatccgcatgaagaagctgacagagaggacctctgtgcgcatcctcttcttcaagaatggcatgggccaggacggccacgagatcaccgtgggcaaggagaccatgaagaaggtgctggacacctgcaccatccgcatgaacctgaacctgcctgcccgctacttctatgacctgtatggcaggaagattgaggacatcagcaagggcaagcactag

SEQ ID NO: 150421 - DNA, 690 bp, synthetic construct
  misc_feature 1..690: note = Description of Artificial Sequence: Synthetic coding sequence
  source 1..690: mol_type = other DNA
atgaagatgtggaacaactggggctggtgtggcggcagaagaagaggctgcaccaagatcctgagcaccaagaagggcatccagatgagcatcaagaacaagcacctgattgtcatcccagccttcagccacaccatgagccagctggactttgacttccactgtgtgtttgtgtccattgatgagggcatcttcaaggccggggctgagaggtctgagaccagaggagctgctgaggtgcaggaggatgaggacacccaggtggaggtgcctgtggaccagaggcctgctgagatcgtggatgaggaggaggatggagagaaggccaacaaggatgctgagcagaaggaggacttcagcggcatgaatggagacctggaggaggagggcggccgggaggccacagatgcccctgagcaggtggaggagatcctggaccacagcgagcagcaggcccggcctgcccgggtgaatggaggaacagatgaggagaatggagaggagctgcagcaggtgaacaatgagctgcagctggtgctggacaaggagaggaagagccagggcgccggcagcggccaggatgaagcagatgtggacccccagaggcctcccaggcctgaggtgaagatcaccagcccagaagaaaatgaaaacaaccagcagaacaaggactatgctgctgtggcctag

SEQ ID NO: 150422 - DNA, 1431 bp, synthetic construct
  misc_feature 1..1431: note = Description of Artificial Sequence: Synthetic coding sequence
  source 1..1431: mol_type = other DNA
atgagcggcagcagcgcccggagcagccacctgagccagcctgtggtgaagtctgtgctggtgtacagaaatggagaccccttctacgccggccggcgggtggtgattcatgagaagaaggtgtcctcctttgaggtgttcctgaaggaggtgactggaggagtgcaggccccctttggagctgtgaggaacatctacacccccaggacaggccaccgcatcaggaagctggaccagatccagagcggcggcaactacgtggccggcggccaggaggccttcaagaagctgaactacctggacatcggggagatcaagaagaggcccatggaggtggtgaacacagaggtgaagcctgtgatccacagccgcatcaacgtgtctgcccgcttcaggaagcccctgcaggagccctgcaccatcttcctgattgccaacggggacctgatcaacccagccagccggctgctgatccccaggaagaccctgaaccagtgggaccacgtgctgcagatggtgacagagaagatcaccctgcggtctggagctgtgcaccggctgtacaccctggagggcaagctggtggagagcggggctgagctggagaatggccagttctacgtggccgtgggccgggacaagttcaagaagctgccctacagcgagctgctgtttgacaagagcaccatgagaagacccttcggccagaaggccagcagcctgccccccatcgtgggcagcaggaagagcaaaggaagtggaaatgacagacacagcaagagcacagtgggcagcagtgacaacagcagcccccagcccctgaagaggaagggcaagaaggaggatgtgaacagcgagaagctgaccaagctgaagcagaatgtgaagctgaagaacagccaggagaccatccccaacagtgatgagggcatcttcaaggccggggctgagaggtctgagaccagaggagctgctgaggtgcaggaggatgaggacacccaggtggaggtgcctgtggaccagaggcctgctgagatcgtggatgaggaggaggatggagagaaggccaacaaggatgctgagcagaaggaggacttcagcggcatgaatggagacctggaggaggagggcggccgggaggccacagatgcccctgagcaggtggaggagatcctggaccacagcgagcagcaggcccggcctgcccgggtgaatggaggaacagatgaagaaaatggagaggagctgcagcaggtgaacaatgagctgcagctggtgctggacaaggagaggaagagccagggcgccggcagcggccaggatgaagcagatgtggacccccagaggcctcccaggcctgaggtgaagatcaccagccctgaggagaatgaaaacaaccagcagaacaaggactatgctgctgtggcctag

SEQ ID NO: 150423 - DNA, 267 bp, synthetic construct
  misc_feature 1..267: note = Description of Artificial Sequence: Synthetic coding sequence
  source 1..267: mol_type = other DNA
tgagtggtgattcatgagaagaaggtgtcctcctttgaggtgttcctgaaggaggtgactggaggagtgcaggccccctttggagctgtgaggaacatctacacccccaggacaggccaccgcatcaggaagctggaccagatccagagcggcggcaactacgtggccggcggccaggaggccttcaagaagctgaactacctggacatcggggagatcaagaagaggcccatggaggtggtgaacacagagctgcacgtgctgtag

SEQ ID NO: 150424 - DNA, 363 bp, synthetic construct
  misc_feature 1..363: note = Description of Artificial Sequence: Synthetic coding sequence
  source 1..363: mol_type = other DNA
atgagcggcagcagcgcccggagcagccacctgagccagcctgtggtgaagtctgtgctggtgtacagaaatggagaccccttctacgccggccggcgggtggtgattcatgagaagaaggtgtcctcctttgaggtgttcctgaaggaggtgactggaggagtgcaggccccctttggagctgtgaggaacatctacacccccaggacaggccaccgcatcaggaagctggaccagatccagagcggcggcaactacgtggccggcggccaggaggccttcaagaagctgaactacctggacatcggggagatcaagaagaggcccatggaggtggtgaacacagagctgcacgtgctgtag

SEQ ID NO: 150425 - DNA, 1947 bp, synthetic construct
  misc_feature 1..1947: note = Description of Artificial Sequence: Synthetic coding sequence
  source 1..1947: mol_type = other DNA
atgaagaagcccatctgcaagaccacagagccctatgcccctgtgcggctgcgggtgctgcagaatggagagaagaacaagaacagatctgtgaccatcctgggccctgacatcagccctggcaggaagacccagtgcacagagatcctgaacctgcccagcgctgcccggcggctgtacaatgagaagggcaaggagatctttgccctgaaggacctgcagagagatgagctggtgtatgtgtcctgtggggagctgtggatcaacccagacctgagcatcgcccagcagaagaagcagatcttcctgaggaacctggagagtgacatcgccaagatccagatcttctgcagcacccacaagattgaggccctggtgctggaggtgcagagcgacatcgtgtctggcagcaagctggccgtgcacaagcctgtggccatctttggagaggagaagcaggtgacagagcctgaggagaagcagatgcaggaggaccccctgaccacagaaaatgccagcagcgagatcctggacagccacgtgcgggcccacctgaggatgaaggcctgccacaccctgcccaggtatgcctggcaggagaccagccatgactttgatgaagatgacagcctgcccaagaagacagagaagggcctgtttgaaaatgtggagccccagaagaagcacagctgcagccccaagcacagcaagctgcacaagcactgccaccagcagtttgagtacagagatggccagatcatcagccatgctgccccccagctggtgctgggcgtgcagggccccaacctgcggagcggcatggaggtggtgctggtggagaagaagagtgatggcagccaccagcgctggatccaccaggaggacagcaggaccttccacctggtgagcaacccagacctggtgctggccgtgtccatgaccaagaccagaaatgaggtgtgtggctaccctgtgattgtgcagaagtacaagccctacaacaatggagctgccaaccagaagtggcactacatgaagaacatcaaggccctggtggccttccacagcacagccctggacaaggagatcaccagcgccaactatgccggcgtgtgcaccagcagcgtcatcaaggaggagaacatcgaccagcccggctactgctacctgagcccagatggcaagaggaagaccatgctgtgcctggcctgtggccagagcatgaggacagagaagggcctgaagcagctgctgcccggggtgcccttcctgtgcatcagcggcaccaagacccagaagcccttcctgcagggccccttcaaggtgatctctgtggccgaggtggacctgagctgtgacaaggccgagaagaccctgagctactaccaggcccggctgctgagcctgaggatgaagacctgcacccaggccgccagccacagcggcatggccgccacccaccagaaggctgtgaagatcatcgcctacaagaatggagatggctacagaaatggcaagctgattgtggccggcaccttccccatgctgctgacagaatgtacagagcagctgggcctggcccgggccgccagcaaggtgtacaccaaggatggcacccccatcttcaccctgcgggacctggtgctgtgggccctggatgagagcttcctgcagagggacagcgagaagcagaagcaggatgctgcccctgtgggcaaggagcagatcatcgtggagaagaaccccaggatgaaggtgaagaaccggctgtttgccaagtctgtgaccagtgacagcctggatggcatcgacaagagcctgctgaccctcatcctgaggaaccccatcgccatctgggtgtcctgtggggagcccttcctgcccccaaatgaaagcaggaagatccgggagacagagctggccaagaagggccagaactttggatag

SEQ ID NO: 150426 - DNA, 1365 bp, synthetic construct
  misc_feature 1..1365: note = Description of Artificial Sequence: Synthetic coding sequence
  source 1..1365: mol_type = other DNA
atgaagaacatcaaggccctggtggccttccacagcacagccctggacaaggagatcaccagcgccaactatgccggcgtgtgcaccagcagcgtcatcaaggaggagaacatcgaccagcccggctactgctacctgagcccagatggcaagaggaagaccatgctgtgcctggcctgtggccagagcatgaggacagagaagggcctgaagcagctgctgcccggggtgcccttcctgtgcatcagcggcaccaagacccagaagcccttcctgcagggccccttcaaggtgatctctgtggccgaggtggacctgagctgtgacaaggccgagaagaccctgagctactaccaggcccggctgctgagcctgaggatgaagacctgcacccaggccgccagccacagcggcatggccgccacccaccagaaggctgtgaagatcatcgcctacaagaatggagatggctacagaaatggcaagctgattgtggccggcaccttccccatgctgctgacagaatgtacagagcagctgggcctggcccgggccgccagcaaggtgtacaccaaggatggcacccccatcttcaccctgcgggacctggtgctgtgggccctggatgagagcttcctgcagagggacagcgagaagcagaagcaggatgctgcccctgtgggcaaggagcagatcatcgtggagagcatggaggagaaccccaggatgaaggtgaagaacagactctttgccaagtctgtgaccagtgacagcctggatggcatcgacaagagcctgctgaccctcatcctgaggaaccccatcgccatctgggtgtcctgtggggagcccttcctgcccccaaatgccctgcagaaggccgagaagctggagaagcagaactggctgaagaaggaccgcatcctggccgacctggacaccatgaggcacaagatgaggcagctgaagggcagaagagtggccgcctgccagcctgccaccatggtgcccaccaagagccctgtgcagcctgtggtggtggagggcggctggacagagcagacccagcaggagatcaagctgatggagctgatccgccacacagaggcccacctgtctgagatccaggagatggagagcaagatcaacttccccatcgccaccaagagaattgctgtgaagcccagcaacctgtacaagcagcccaacaccaagagggtgtggatctacctgaatggaggccgcccagaagatggcacctacgcctggggcaagaccatcagcgaggtgtccctgctgtacctgaagacctggatcttcatctggagcaggaaggtgttcttctacttcctgatcacagcctag

SEQ ID NO: 150427 - DNA, 2190 bp, synthetic construct
  misc_feature 1..2190: note = Description of Artificial Sequence: Synthetic coding sequence
  source 1..2190: mol_type = other DNA
atgagctttggccgggacatggagctggagcactttgatgagcgggacaaggcccagcgctacagccggggcagccgggtgaatggcctgcccagccccacccacagcgcccactgcagcttctaccgcaccaggaccctgcagaccctgagcagcgagaagaaggccaagaaggtgcgcttctacagaaatggagaccgctacttcaagggcatcgtgtatgccatcagcccagaccgcttccgcagctttgaggccctgctggccgacctgaccaggaccctgagtgacaacgtgaacctgccccagggcgtgaggaccatctacaccattgatggcctgaagaagatcagcagcctggaccagctggtggagggggagagctatgtgtgtggcagcattgagcccttcaagaagctggagtacaccaagaatgtgaaccccaactggagcgtgaatgtgaagaccaccagcgccagcagagctgtgagcagcctggccacagccaagggcagccccagcgaggtgcgggagaacaaggacttcatccggcccaagctggtgaccatcatccgctctggagtgaagcccaggaaggctgtgcgcatcctgctgaacaagaagacagcccacagctttgagcaggtgctgacagacatcacagatgccatcaagctggacagcggcgtggtgaagaggctgtacaccctggatggcaagcaggtgatgtgcctgcaggacttctttggagatgatgacatcttcatcgcctgtggccctgagaagttccgctaccaggatgacttcctgctggatgaaagtgaatgtcgggtggtgaagagcaccagctacaccaagatcgccagcagcagccgccgcagcaccaccaagagccctggccccagcagaagaagcaagagccctgccagcaccagctctgtgaatggcaccccaggcagccagctgagcacccccaggtctgggaagagccccagccccagccccaccagccctggcagcctgaggaagcagaggagcagccagcacggcggcagcagcaccagcctggccagcaccaaggtgtgcagctccatggatgaaaatgatggccctggagaggaggtgtctgaggagggcttccagatcccagccaccatcacagagcgctacaaggtgggccgcaccatcggagatggcaactttgctgtggtgaaggaatgtgtggagaggagcacagcccgggagtatgccctgaagatcatcaagaagagcaaatgtcggggcaaggagcacatgatccagaatgaggtgtccatcctgcggcgggtgaagcaccccaacatcgtgctgctgattgaggagatggatgtgcccacagagctgtacctggtgatggagctggtgaagggcggggacctgtttgatgccatcaccagcaccaacaagtacacagaaagagatgccagcggcatgctgtacaacctggccagcgccatcaagtacctgcacagcctgaacatcgtgcaccgggacatcaagccagagaacctgctggtgtatgagcaccaggacggcagcaagagcctgaagctgggggactttggcctggccaccatcgtggatggccccctgtacacagtgtgtggcacccccacctacgtggcccctgagatcatcgccgagaccggctacggcctgaaggtggacatctgggccgccggggtcatcacctacatcctgctgtgtggcttcccccccttccggggcagcggagatgaccaggaggtgctgtttgaccagatcctgatgggccaggtggacttccccagcccctactgggacaacgtgtctgattctgccaaggagctgatcaccatgatgctgctggtggatgtggaccagcgcttctctgctgtgcaggtgctggagcacccctgggtgaatgatgatggcctgcctgaaaatgagcaccagctgtctgtggccggcaagatcaagaagcacttcaacacaggccccaagcccaacagcacagctgctggggtgtctgtgattgccctggaccacggcttcaccatcaagaggagcggcagcctggactactaccagcagcccggcatgtactggatccggccccccctgctgatcagaagaggccgcttcagtgatgaagatgccaccaggatgtag

SEQ ID NO: 150428 - DNA, 2223 bp, synthetic construct
  misc_feature 1..2223: note = Description of Artificial Sequence: Synthetic coding sequence
  source 1..2223: mol_type = other DNA
atgagctttggccgggacatggagctggagcactttgatgagcgggacaaggcccagcgctacagccggggcagccgggtgaatggcctgcccagccccacccacagcgcccactgcagcttctaccgcaccaggaccctgcagaccctgagcagcgagaagaaggccaagaaggtgcgcttctacagaaatggagaccgctacttcaagggcatcgtgtatgccatcagcccagaccgcttccgcagctttgaggccctgctggccgacctgaccaggaccctgagtgacaacgtgaacctgccccagggcgtgaggaccatctacaccattgatggcctgaagaagatcagcagcctggaccagctggtggagggggagagctatgtgtgtggcagcattgagcccttcaagaagctggagtacaccaagaatgtgaaccccaactggagcgtgaatgtgaagaccaccagcgccagcagagctgtgagcagcctggccacagccaagggcagccccagcgaggtgcgggagaacaaggacttcatccggcccaagctggtgaccatcatccgctctggagtgaagcccaggaaggctgtgcgcatcctgctgaacaagaagacagcccacagctttgagcaggtgctgacagacatcacagatgccatcaagctggacagcggcgtggtgaagaggctgtacaccctggatggcaagcaggtgatgtgcctgcaggacttctttggagatgatgacatcttcatcgcctgtggccctgagaagttccgctaccaggatgacttcctgctggatgaaagtgaatgtcgggtggtgaagagcaccagctacaccaagatcgccagcagcagccgccgcagcaccaccaagagccctggccccagcagaagaagcaagagccctgccagcaccagctctgtgaatggcaccccaggcagccagctgagcacccccaggtctgggaagagccccagccccagccccaccagccctggcagcctgaggaagcagaggagcagccagcacggcggcagcagcaccagcctggccagcaccaaggtgtgcagctccatggatgaaaatgatggccctggagaggaggtgtctgaggagggcttccagatcccagccaccatcacagagcgctacaaggtgggccgcaccatcggagatggcaactttgctgtggtgaaggaatgtgtggagaggagcacagcccgggagtatgccctgaagatcatcaagaagagcaaatgtcggggcaaggagcacatgatccagaatgaggtgtccatcctgcggcgggtgaagcaccccaacatcgtgctgctgattgaggagatggatgtgcccacagagctgtacctggtgatggagctggtgaagggcggggacctgtttgatgccatcaccagcaccaacaagtacacagaaagagatgccagcggcatgctgtacaacctggccagcgccatcaagtacctgcacagcctgaacatcgtgcaccgggacatcaagccagagaacctgctggtgtatgagcaccaggacggcagcaagagcctgaagctgggggactttggcctggccaccatcgtggatggccccctgtacacagtgtgtggcacccccacctacgtggcccctgagatcatcgccgagaccggctacggcctgaaggtggacatctgggccgccggggtcatcacctacatcctgctgtgtggcttcccccccttccggggcagcggagatgaccaggaggtgctgtttgaccagatcctgatgggccaggtggacttccccagcccctactgggacaacgtgtctgattctgccaaggagctgatcaccatgatgctgctggtggatgtggaccagcgcttctctgctgtgcaggtgctggagcacccctgggtgaatgatgatggcctgcctgaaaatgagcaccagctgtctgtggccggcaagatcaagaagcacttcaacacaggccccaagcccaacagcacagctgctggggtgtctgtgattgccaccacagccctggacaaggagcggcaggtgttcagaagaagaagaaaccaggatgtgcgcagccgctacaaggcccagcctgcccctcctgagctgaacagcgagagcgaggactacagccccagcagcagcgagaccgtgcgcagccccaacagccccttctag

SEQ ID NO: 150429 - DNA, 1092 bp, synthetic construct
  misc_feature 1..1092: note = Description of Artificial Sequence: Synthetic coding sequence
  source 1..1092: mol_type = other DNA
atgagctttggccgggacatggagctggagcactttgatgagcgggacaaggcccagcgctacagccggggcagccgggtgaatggcctgcccagccccacccacagcgcccactgcagcttctaccgcaccaggaccctgcagaccctgagcagcgagaagaaggccaagaaggtgcgcttctacagaaatggagaccgctacttcaagggcatcgtgtatgccatcagcccagaccgcttccgcagctttgaggccctgctggccgacctgaccaggaccctgagtgacaacgtgaacctgccccagggcgtgaggaccatctacaccattgatggcctgaagaagatcagcagcctggaccagctggtggagggggagagctatgtgtgtggcagcattgagcccttcaagaagctggagtacaccaagaatgtgaaccccaactggagcgtgaatgtgaagaccaccagcgccagcagagctgtgagcagcctggccacagccaagggcagccccagcgaggtgcgggagaacaaggacttcatccggcccaagctggtgaccatcatccgctctggagtgaagcccaggaaggctgtgcgcatcctgctgaacaagaagacagcccacagctttgagcaggtgctgacagacatcacagatgccatcaagctggacagcggcgtggtgaagaggctgtacaccctggatggcaagcaggtgatgtgcctgcaggacttctttggagatgatgacatcttcatcgcctgtggccctgagaagttccgctaccaggatgacttcctgctggatgaaagtgaatgtcgggtggtgaagagcaccagctacaccaagatcgccagcagcagccgccgcagcaccaccaagagccctggccccagcagaagaagcaagagccctgccagcaccagctctgtgaatggcaccccaggcagccagctgagcacccccaggtctgggaagagccccagccccagccccaccagccctggcagcctgaggaagcagagggacctgtaccggcccctgagcagtgatgacctggacagcgtgggggacagcgtgtag

SEQ ID NO: 150430 - DNA, 1302 bp, synthetic construct
  misc_feature 1..1302: note = Description of Artificial Sequence: Synthetic coding sequence
  source 1..1302: mol_type = other DNA
atgctggagctgattgaggtgaatggcaccccaggcagccagctgagcacccccaggtctgggaagagccccagccccagccccaccagccctggcagcctgaggaagcagaggagcagccagcacggcggcagcagcaccagcctggccagcaccaaggtgtgcagctccatggatgaaaatgatggccctggagaggaggtgtctgaggagggcttccagatcccagccaccatcacagagcgctacaaggtgggccgcaccatcggagatggcaactttgctgtggtgaaggaatgtgtggagaggagcacagcccgggagtatgccctgaagatcatcaagaagagcaagtgccggggcaaggagcacatgatccagaatgaggtgtccatcctgcggcgggtgaagcaccccaacatcgtgctgctgattgaggagatggatgtgcccacagagctgtacctggtgatggagctggtgaagggcggggacctgtttgatgccatcaccagcaccaacaagtacacagaaagagatgccagcggcatgctgtacaacctggccagcgccatcaagtacctgcacagcctgaacatcgtgcaccgggacatcaagccagagaacctgctggtgtatgagcaccaggacggcagcaagagcctgaagctgggggactttggcctggccaccatcgtggatggccccctgtacacagtgtgtggcacccccacctacgtggcccctgagatcatcgccgagaccggctacggcctgaaggtggacatctgggccgccggggtcatcacctacatcctgctgtgtggcttcccccccttccggggcagcggagatgaccaggaggtgctgtttgaccagatcctgatgggccaggtggacttccccagcccctactgggacaacgtgtctgacagcgccaaggagctgatcaccatgatgctgctggtggatgtggaccagcgcttctctgctgtgcaggtgctggagcacccctgggtgaatgatgatggcctgcctgaaaatgagcaccagctgtctgtggccggcaagatcaagaagcacttcaacacaggccccaagcccaacagcacagctgctggggtgtctgtcatcgccaccacagccctggacaaggagcggcaggtgttcagaagaagaagaaaccaggatgtgcgcagccgctacaaggcccagcctgcccctcctgagctgaacagcgagagcgaggactacagccccagcagcagcgagaccgtgcgcagccccaacagccccttctag

SEQ ID NO: 150431 - DNA, 1266 bp, synthetic construct
  misc_feature 1..1266: note = Description of Artificial Sequence: Synthetic coding sequence
  source 1..1266: mol_type = other DNA
ctgagcctcatcaagttcaacggcaccccaggcagccagctgagcacccccaggtctgggaagagccccagccccagccccaccagccctggcagcctgaggaagcagaggagcagccagcacggcggcagcagcaccagcctggccagcaccaaggtgtgcagctccatggatgaaaatgatggccctggagaggaggtgtctgaggagggcttccagatcccagccaccatcacagagcgctacaaggtgggccgcaccatcggagatggcaactttgctgtggtgaaggaatgtgtggagaggagcacagcccgggagtatgccctgaagatcatcaagaagagcaaatgtcggggcaaggagcacatgatccagaatgaggtgtccatcctgcggcgggtgaagcaccccaacatcgtgctgctgattgaggagatggatgtgcccacagagctgtacctggtgatggagctggtgaagggcggggacctgtttgatgccatcaccagcaccaacaagtacacagaaagagatgccagcggcatgctgtacaacctggccagcgccatcaagtacctgcacagcctgaacatcgtgcaccgggacatcaagccagagaacctgctggtgtatgagcaccaggacggcagcaagagcctgaagctgggggactttggcctggccaccatcgtggatggccccctgtacacagtgtgtggcacccccacctacgtggcccctgagatcatcgccgagaccggctacggcctgaaggtggacatctgggccgccggggtcatcacctacatcctgctgtgtggcttcccccccttccggggcagcggagatgaccaggaggtgctgtttgaccagatcctgatgggccaggtggacttccccagcccctactgggacaacgtgtctgattctgccaaggagctgatcaccatgatgctgctggtggatgtggaccagcgcttctctgctgtgcaggtgctggagcacccctgggtgaatgatgatggcctgcctgaaaatgagcaccagctgtctgtggccggcaagatcaagaagcacttcaacacaggccccaagcccaacagcacagctgctggggtgtctgtgattgccctggaccacggcttcaccatcaagaggagcggcagcctggactactaccagcagcccggcatgtactggatccggccccccctgctgatcagaagaggccgcttcagtgatgaagatgccaccaggatgtag

SEQ ID NO: 150432 - DNA, 1860 bp, synthetic construct
  misc_feature 1..1860: note = Description of Artificial Sequence: Synthetic coding sequence
  source 1..1860: mol_type = other DNA
atgagctttggccgggacatggagctggagcactttgatgagcgggacaaggcccagcgctacagccggggcagccgggtgaatggcctgcccagccccacccacagcgcccactgcagcttctaccgcaccaggaccctgcagaccctgagcagcgagaagaaggccaagaaggtgcgcttctacagaaatggagaccgctacttcaagggcatcgtgtatgccatcagcccagaccgcttccgcagctttgaggccctgctggccgacctgaccaggaccctgagtgacaacgtgaacctgccccagggcgtgaggaccatctacaccattgatggcctgaagaagatcagcagcctggaccagctggtggagggggagagctatgtgtgtggcagcattgagcccttcaagaagctggagtacaccaagaatgtgaaccccaactggagcgtgaatgtgaagaccaccagcgccagcagagctgtgagcagcctggccacagccaagggcagccccagcgaggtgcgggagaacaaggacttcatccggcccaagctggtgaccatcatccgctctggagtgaagcccaggaaggctgtgcgcatcctgctgaacaagaagacagcccacagctttgagcaggtgctgacagacatcacagatgccatcaagctggacagcggcgtggtgaagaggctgtacaccctggatggcaagcaggtgatgtgcctgcaggacttctttggagatgatgacatcttcatcgcctgtggccctgagaagttccgctaccaggatgacttcctgctggatgaaagtgaatgtcgggtggtgaagagcaccagctacaccaagatcgccagcagcagccgccgcagcaccaccaagagccctggccccagcagaagaagcaagagccctgccagcaccagctctgtgaatggcaccccaggcagccagctgagcacccccaggtctgggaagagccccagccccagccccaccagccctggcagcctgaggaagcagaggagcagccagcacggcggcagcagcaccagcctggccagcaccaaggtgtgcagctccatggatgaaaatgatggccctggagaggaggtgtctgaggagggcttccagatcccagccaccatcacagagcgctacaaggtgggccgcaccatcggagatggcaactttgctgtggtgaaggaatgtgtggagaggagcacagcccgggagtatgccctgaagatcatcaagaagagcaaatgtcggggcaaggagcacatgatccagaatgaggtgtccatcctgcggcgggtgaagcaccccaacatcgtgctgctgattgaggagatggatgtgcccacagagctgtacctggtgatggagctggtgaagggcggggacctgtttgatgccatcaccagcaccaacaagtacctgcacagcctgaacatcgtgcaccgggacatcaagccagagaacctgctggtgtatgagcaccaggacggcagcaagagcctgaagctgggggactttggcctggccaccatcgtggatggccccctgtacacagtgtgtggcacccccacctacgtggcccctgagatcatcgccgagaccggctacggcctgaaggtggacatctgggccgccggggtcatcacctacatcctgctgtgtggcttcccccccttccggggcagcggagatgaccaggaggtgctgtttgaccagatcctgatgggccaggtggacttccccagcccctactgggacaacgtgtctgattctgccaaggagctgatcaccatgatggccagccagaagatgaacatcagctgccagtag

SEQ ID NO: 150433 - DNA, 2301 bp, synthetic construct
  misc_feature 1..2301: note = Description of Artificial Sequence: Synthetic coding sequence
  source 1..2301: mol_type = other DNA
atggccagcaccaggagcattgagctggagcactttgaggagcgggacaagaggcccaggcctggcagccggcggggggcccccagcagcagcggcggcagcagcagcagcggccccaagggaaatggcctcatccccagccctgcccacagcgcccactgcagcttctaccgcaccaggaccctgcaggccctgagcagcgagaagaaggccaagaaggcccgcttctacagaaatggagaccgctacttcaagggcctggtgtttgccatcagcagtgaccgcttccgcagctttgatgccctgctgattgagctgaccaggagcctgagtgacaacgtgaacctgccccagggcgtgaggaccatctacaccattgatggcagcaggaaggtgaccagcctggatgagctgctggagggggagagctatgtgtgtgccagcaatgagcccttcaggaaggtggactacaccaagaacatcaaccccaactggagcgtgaacatcaagggcggcaccagccgggccctggccgccgccagctctgtgaagtctgaggtgaaggagagcaaggacttcatcaagcccaagctggtgaccgtcatccgcagcggcgtgaagcccaggaaggctgtgcgcatcctgctgaacaagaagacagcccacagctttgagcaggtgctgacagacatcacagaggccatcaagctggacagcggcgtggtgaagaggctgtgcaccctggatggcaagcaggtgacctgcctgcaggacttctttggagatgatgatgtgttcatcgcctgtggccctgagaagttccgctatgcccaggatgactttgtgctggaccacagtgaatgtcgggtgctgaagagcagctacagccgcagcagcgctgtgaagtacagcggcagcaagagccctggccccagcagaagaagcaagagccctgcctctgtgaatggcacccccagcagccagctgagcacccccaagagcaccaagagcagcagcagcagccccaccagccctggcagcttccggggcctgaagcagatcagcgcccacggccgcagcagcagcaatgtgaatggaggccctgagctggaccgctgcatcagccctgagggcgtgaatggaaaccgctgcagcgagagcagcaccctgctggagaagtacaagattggcaaggtgattggagatggcaactttgctgtggtgaaggagtgcatcgacaggagcacaggcaaggagtttgccctgaagatcatcgacaaggccaagtgctgcggcaaggagcacctgattgaaaatgaggtgtccatcctgcggcgggtgaagcaccccaacatcatcatgctggtggaggagatggagacagccacagagctgttcctggtgatggagctggtgaagggcggggacctgtttgatgccatcaccagcagcaccaagtacacagaaagagatggcagcgccatggtgtacaacctggccaatgccctgcgctacctgcacggcctgagcatcgtgcaccgggacatcaagccagagaacctgctggtgtgtgagtacccagatggcaccaagagcctgaagctgggggactttggcctggccaccgtggtggagggccccctgtacacagtgtgtggcacccccacctacgtggcccctgagatcatcgccgagaccggctacggcctgaaggtggacatctgggccgccggggtcatcacctacatcctgctgtgtggcttcccccccttccgctctgagaacaacctgcaggaggacctgtttgaccagatcctggccggcaagctggagttccctgccccctactgggacaacatcacagattctgccaaggagctgatcagccagatgctgcaggtgaatgtggaggcccgctgcacagctggccagatcctgagccacccctgggtgtctgatgatgccagccaggagaacaacatgcaggccgaggtgacaggcaagctgaagcagcacttcaacaatgccctgcccaagcagaacagcaccaccactggagtgtctgtcatcatgaacacagccctggacaaggagggccagatcttctgcagcaagcactgccaggacagcggccggcccggcatggagcccatcagccctgtgccccccagcgtggaggagatccctgtgcctggagaggccgtgcctgcccccaccccacctgagagccccaccccccaccccccacctgctgcccctggaggagagcgggccggcacctggaggaggcaccgggactag

SEQ ID NO: 150434 - DNA, 2352 bp, synthetic construct
  misc_feature 1..2352: note = Description of Artificial Sequence: Synthetic coding sequence
  source 1..2352: mol_type = other DNA
atggccagcaccaggagcattgagctggagcactttgaggagcgggacaagaggcccaggcctggcagccggcggggggcccccagcagcagcggcggcagcagcagcagcggccccaagggaaatggcctcatccccagccctgcccacagcgcccactgcagcttctaccgcaccaggaccctgcaggccctgagcagcgagaagaaggccaagaaggcccgcttctacagaaatggagaccgctacttcaagggcctggtgtttgccatcagcagtgaccgcttccgcagctttgatgccctgctgattgagctgaccaggagcctgagtgacaacgtgaacctgccccagggcgtgaggaccatctacaccattgatggcagcaggaaggtgaccagcctggatgagctgctggagggggagagctatgtgtgtgccagcaatgagcccttcaggaaggtggactacaccaagaacatcaaccccaactggagcgtgaacatcaagggcggcaccagccgggccctggccgccgccagctctgtgaagtctgaggtgaaggagagcaaggacttcatcaagcccaagctggtgaccgtcatccgcagcggcgtgaagcccaggaaggctgtgcgcatcctgctgaacaagaagacagcccacagctttgagcaggtgctgacagacatcacagaggccatcaagctggacagcggcgtggtgaagaggctgtgcaccctggatggcaagcaggtgacctgcctgcaggacttctttggagatgatgatgtgttcatcgcctgtggccctgagaagttccgctatgcccaggatgactttgtgctggaccacagtgaatgtcgggtgctgaagagcagctacagccgcagcagcgctgtgaagtacagcggcagcaagagccctggccccagcagaagaagcaagagccctgcctctgtgaagaggggcggccactacagcagcgcctacagcacagccaagagccctgtgaatggcacccccagcagccagctgagcacccccaagagcaccaagagcagcagcagcagccccaccagccctggcagcttccggggcctgaagcagatcagcgcccacggccgcagcagcagcaatgtgaatggaggccctgagctggaccgctgcatcagccctgagggcgtgaatggaaaccgctgcagcgagagcagcaccctgctggagaagtacaagattggcaaggtgattggagatggcaactttgctgtggtgaaggaatgtattgacaggagcacaggcaaggagtttgccctgaagatcatcgacaaggccaagtgctgcggcaaggagcacctgattgaaaatgaggtgtccatcctgcggcgggtgaagcaccccaacatcatcatgctggtggaggagatggagacagccacagagctgttcctggtgatggagctggtgaagggcggggacctgtttgatgccatcaccagcagcaccaagtacacagaaagagatggcagcgccatggtgtacaacctggccaatgccctgcgctacctgcacggcctgagcatcgtgcaccgggacatcaagccagagaacctgctggtgtgtgagtacccagatggcaccaagagcctgaagctgggggactttggcctggccaccgtggtggagggccccctgtacacagtgtgtggcacccccacctacgtggcccctgagatcatcgccgagaccggctacggcctgaaggtggacatctgggccgccggggtcatcacctacatcctgctgtgtggcttcccccccttccgctctgagaacaacctgcaggaggacctgtttgaccagatcctggccggcaagctggagttccctgccccctactgggacaacatcacagacagcgccaaggagctgatcagccagatgctgcaggtgaatgtggaggcccgctgcacagctggccagatcctgagccacccctgggtgtctgatgatgccagccaggagaacaacatgcaggccgaggtgacaggcaagctgaagcagcacttcaacaatgccctgcccaagcagaacagcaccaccaccggggtgtctgtcatcatgaacacagccctggacaaggagggccagatcttctgcagcaagcactgccaggacagcggccggcccggcatggagcccatcagccctgtgcccccatctgtggaggagatccctgtgcctggagaggccgtgcctgcccccaccccacctgagagccccaccccccaccccccacctgctgcccctggaggagagagagctggcacctggaggaggcaccgggactag

SEQ ID NO: 150435 - DNA, 2298 bp, synthetic construct
  misc_feature 1..2298: note = Description of Artificial Sequence: Synthetic coding sequence
  source 1..2298: mol_type = other DNA
atggccagcaccaggagcattgagctggagcactttgaggagcgggacaagaggcccaggcctggcagccggcggggggcccccagcagcagcggcggcagcagcagcagcggccccaagggaaatggcctcatccccagccctgcccacagcgcccactgcagcttctaccgcaccaggaccctgcaggccctgagcagcgagaagaaggccaagaaggcccgcttctacagaaatggagaccgctacttcaagggcctggtgtttgccatcagcagtgaccgcttccgcagctttgatgccctgctgattgagctgaccaggagcctgagtgacaacgtgaacctgccccagggcgtgaggaccatctacaccattgatggcagcaggaaggtgaccagcctggatgagctgctggagggggagagctatgtgtgtgccagcaatgagcccttcaggaaggtggactacaccaagaacatcaaccccaactggagcgtgaacatcaagggcggcaccagccgggccctggccgccgccagctctgtgaagtctgaggtgaaggagagcaaggacttcatcaagcccaagctggtgaccgtcatccgcagcggcgtgaagcccaggaaggctgtgcgcatcctgctgaacaagaagacagcccacagctttgagcaggtgctgacagacatcacagaggccatcaagctggacagcggcgtggtgaagaggctgtgcaccctggatggcaagcaggtgacctgcctgcaggacttctttggagatgatgatgtgttcatcgcctgtggccctgagaagttccgctatgcccaggatgactttgtgctggaccacagtgaatgtcgggtgctgaagagcagctacagccgcagcagcgctgtgaagtacagcggcagcaagagccctggccccagcagaagaagcaagagccctgcctctgtgaatggcacccccagcagccagctgagcacccccaagagcaccaagagcagcagcagcagccccaccagccctggcagcttccggggcctgaagatcagcgcccacggccgcagcagcagcaatgtgaatggaggccctgagctggaccgctgcatcagccctgagggcgtgaatggaaaccgctgcagcgagagcagcaccctgctggagaagtacaagattggcaaggtgattggagatggcaactttgctgtggtgaaggaatgtattgacaggagcacaggcaaggagtttgccctgaagatcatcgacaaggccaagtgctgcggcaaggagcacctgattgaaaatgaggtgtccatcctgcggcgggtgaagcaccccaacatcatcatgctggtggaggagatggagacagccacagagctgttcctggtgatggagctggtgaagggcggggacctgtttgatgccatcaccagcagcaccaagtacacagaaagagatggcagcgccatggtgtacaacctggccaatgccctgcgctacctgcacggcctgagcatcgtgcaccgggacatcaagccagagaacctgctggtgtgtgagtacccagatggcaccaagagcctgaagctgggggactttggcctggccaccgtggtggagggccccctgtacacagtgtgtggcacccccacctacgtggcccctgagatcatcgccgagaccggctacggcctgaaggtggacatctgggccgccggggtcatcacctacatcctgctgtgtggcttcccccccttccgctctgagaacaacctgcaggaggacctgtttgaccagatcctggccggcaagctggagttccctgccccctactgggacaacatcacagacagcgccaaggagctgatcagccagatgctgcaggtgaatgtggaggcccgctgcacagctggccagatcctgagccacccctgggtgtctgatgatgccagccaggagaacaacatgcaggccgaggtgacaggcaagctgaagcagcacttcaacaatgccctgcccaagcagaacagcaccaccaccggggtgtctgtcatcatgaacacagccctggacaaggagggccagatcttctgcagcaagcactgccaggacagcggccggcccggcatggagcccatcagccctgtgcccccatctgtggaggagatccctgtgcctggagaggccgtgcctgcccccaccccacctgagagccccaccccccaccccccacctgctgcccctggaggagagagagctggcacctggaggaggcaccgggactag

SEQ ID NO: 150436 - DNA, 1947 bp, synthetic construct
  misc_feature 1..1947: note = Description of Artificial Sequence: Synthetic coding sequence
  source 1..1947: mol_type = other DNA
atgggcaaggagcccctgaccctgaagagcatccaggtggccgtggaggagctgtaccccaacaaggcccgggccctgaccctggcccagcacagccgggcccccagcccccggctgcggagccgcctcttcagcaaggccctgaagggggaccaccgctgtggggagacagagacccccaagagctgcagcgaggtggccggctgcaaggccgccatgaggcaccagggcaagatccctgaggagctgagcctggatgaccgggcccggacccagaagaagtggggccggggcaagtgggagcctgagcccagcagcaagccaccccgggaggccaccctggaggagagacatgcccggggggagaagcacctgggcgtggagattgagaagaccagcggggagatcatccgctgtgagaagtgcaagcgggagcgggagctgcagcagagcctggagcgggagcggctgagcctgggcaccagcgagctggacatgggcaagggccccatgtatgatgtggagaagctggtgaggaccaggagctgccgccgcagccctgaggccaacccagccagcggggaggagggctggaagggggacagccacaggagcagccccaggaaccccacccaggagctgcggcggcccagcaagtccatggacaagaaggaggaccggggccctgaggaccaggagagccacgcccagggcgccgccaaggccaagaaggacctggtggaggtgctgcctgtgacagaggagggcctgcgggaggtgaagaaggacacccggcccatgagccgcagcaagcacggcggctggctgctgcgggagcaccaggccggctttgagaagctgcggaggaccagaggagaggagaaggaggccgagaaggagaagaagccctgcatgtctgggggccgcaggatgaccctgagagatgaccagcctgccaagctggagaaggagcccaagaccaggcctgaggagaacaagccagagcggcccagcggcaggaagccccggcccatgggcatcatcgccgccaacgtggagaagcactatgagaccggccgggtgattggagatggcaactttgctgtggtgaaggagtgccgccaccgggagacccggcaggcctatgccatgaagatcatcgacaagagccggctgaagggcaaggaggacatggtggacagcgagatcctgatcatccagagcctgagccaccccaacatcgtgaagctgcacgaggtgtatgaaacagacatggagatctacctgatcctggagtatgtgcagggcggggacctgtttgatgccatcatcgagagcgtgaagtttcctgagccagatgctgccctgatgatcatggacctgtgcaaggccctggtgcacatgcatgacaagagcatcgtgcaccgggacctgaagccagagaacctgctggtgcagagaaatgaagacaagagcaccaccctgaagctggccgactttggcctggccaagcacgtggtgcggcccatcttcaccgtgtgtggcacccccacctacgtggcccctgagatcctgtctgagaagggctacggcctggaggtggacatgtgggccgccggggtcatcctgtacatcctgctgtgtggcttcccccccttccgcagccctgagcgggaccaggatgagctgttcaacatcatccagctgggccactttgagttcctgcccccctactgggacaacatcagtgatgctgccaaggacctggtgtcccggctgctggtggtggaccccaagaagcgctacacagcccaccaggtgctgcagcacccctggattgaaacagctgggaagaccaacacagtgaagaggcagaagcaggtgagccccagcagcgagggccacttccgcagccagcacaagagggtggtggagcaggtgtcctag

SEQ ID NO: 150437 - DNA, 1122 bp, synthetic construct
  misc_feature 1..1122: note = Description of Artificial Sequence: Synthetic coding sequence
  source 1..1122: mol_type = other DNA
atgcccaatgatgaggccttcagcaagcccagcacccccagcgaggccccccacgcccctggggtgcccccccagggccgggccggcggctttgggaaggccagcggggccctggtgggcgccgccagcggcagcagcgctgggggcagcagcagaggaggcggcagcggcagcggggccagtgacctgggcgccggcagcaagaagagcccccggctgcccaagtgtgcccgctgcaggaaccacggctacgccagccccctgaagggccacaagcgcttctgcatgtggagggactgccagtgcaagaagtgcaacctgattgctgagcggcagagggtgatggccgcccaggtggccctgcggcggcagcaggcccaggaggaggagctgggcatcagccaccccatccccctgcccagcgctgctgagctgctggtgaagcgggagaacaacggcagcaacccctgcctgatgacagaatgttctggcaccagccagcccccaccagcctctgtgcccaccacagctgccagcgagggccgcatggtgatccaggacatcccagctgtgaccagccggggccacgtggagaacaccccagacctggtgtctgacagcacctactacagcagcttctaccagcccagcctcttcccctactacaacaacctgtacaactgcccccagtacagcatggccctggccgctgacagcgccagcggggaggtgggcaaccccctgggcggcagccctgtgaagaacagcctgcggggcctgcccggcccctacgtgcccggccagacaggcaaccagtggcagatgaagaacatggagaacagacatgccatgagcagccagtacaggatgcacagctactaccccccacccagctacctgggccagagcgtgccccagttcttcacctttgaagatgcccccagctacccagaggcccgggccagcgtcttcagcccccccagcagccaggacagcggcctggtgtccctgagcagcagcagccccatcagcaacaagagcaccaaggctgtgctggagtgtgagcccgccagcgagcccagcagcttcaccgtgacccctgtgattgaagaagatgaatag

SEQ ID NO: 150438 - DNA, 525 bp, synthetic construct
  misc_feature 1..525: note = Description of Artificial Sequence: Synthetic coding sequence
  source 1..525: mol_type = other DNA
atgcccaatgatgaggccttcagcaagcccagcacccccagcgaggccccccacgcccctggggtgcccccccagggccgggccggcggctttgggaaggccagcggggccctggtgggcgccgccagcggcagcagcgctgggggcagcagcagaggaggcggcagcggcagcggggccagtgacctgggcgccggcagcaagaagagcccccggctgcccaagtgtgcccgctgcaggaaccacggctacgccagccccctgaagggccacaagcgcttctgcatgtggagggactgccagtgcaagaagtgcaacctgattgctgagcggcagagggtgatggccgcccaggtgggcgccggcgtgcgggagcccggcttcagcctgtccttcttcttcttcttcttcttccgctggagcctggcccggctgccccggctgcagtgcagcggggccatcctggcccactgcaacagcgccagccgggtgcaggccatcctgctgccccagccccccaagtag

SEQ ID NO: 150439 - DNA, 681 bp, synthetic construct
  misc_feature 1..681: note = Description of Artificial Sequence: Synthetic coding sequence
  source 1..681: mol_type = other DNA
atggctgacccccaggccggcagcgctgctggggactgggagattgatgtggagagcctggagctggaggaggatgtgtgtggggcccccaggagcaccccacctggccccagccccccaccagcagatggagactgtgaagatgatgaagatgatgatggagtggatgaagatgctgaggaggagggagatggagaggaggccggggccagccctggcatgcctggccagcctgagcagaggggcggcccccagccccggccccccctggccccccaggccagccctgctggcaccggcccccgggagcgctgcaccccagctgggggcggcgctgagcccaggaagctgagcaggacccccaagtgtgcccgctgcagaaatcatggagtggtgtcctgcctgaagggccacaagcgcttctgccgctggagggactgccagtgtgccaactgcctgctggtggtggagcggcagagggtgatggccgcccaggtggccctgcggcggcagcaggccacagaggacaagaagggcctgagcggcaagcagaacaactttgagaggaaggctgtgtaccagaggcaggtgcgggcccccagcctgctggccaagagcatcctggaggtgctgctgggcctcttctacagctactacgtgtacatcatgaaccacctgtag

SEQ ID NO: 150440 - DNA, 1686 bp, synthetic construct
  misc_feature 1..1686: note = Description of Artificial Sequence: Synthetic coding sequence
  source 1..1686: mol_type = other DNA
atggctgacccccaggccggcagcgctgctggggactgggagattgatgtggagagcctggagctggaggaggatgtgtgtggggcccccaggagcaccccacctggccccagccccccaccagcagatggagactgtgaagatgatgaagatgatgatggagtggatgaagatgctgaggaggagggagatggagaggaggccggggccagccctggcatgcctggccagcctgagcagaggggcggcccccagccccggccccccctggccccccaggccagccctgctggcaccggcccccgggagcgctgcaccccagctgggggcggcgctgagcccaggaagctgagcaggacccccaagtgtgcccgctgcagaaatcatggagtggtgtcctgcctgaagggccacaagcgcttctgccgctggagggactgccagtgtgccaactgcctgctggtggtggagcggcagagggtgatggccgcccaggtggccctgcggcggcagcaggccacagaggacaagaagggcctgagcggcaagcagaacaactttgagaggaaggctgtgtaccagaggcaggtgcgggcccccagcctgctggccaagagcatcctggagggctaccggcccatcccagctgagacctacgtgggcggcaccttccccctgcccccacctgtgtctgacaggatgaggaagagaagagcctttgctgacaaggagctggagaacatcatgctggagcgggagtacaaggagcgggagatgctggagaccagccaggccgccgccctcttcctgcccaacaggatggtgcccggccctgactacaacagctacaagagcgcctacagccccagccctgtggagccccccagcaaggacttctgcaacttcctgcccacctgcctggacctgaccatgcagtacagcggcagcggcaacatggagctgatcagcagcaatgtgtctgtggccaccacctaccggcagtaccccctgagcagccgcttcctggtgtggcccaagtgtggccccatcagtgacaccctgctgtaccagcagtgcctgctgaatgccaccacctctgtgcaggccctgaagccaggggcctcctgggacctgaagggggcccgggtgcaggacggcctgtctgctgagcaggacatgatgcccagcaagctggagggcagcctggtgctgccccacaccccagagatccagaccaccaggagtgacctgcagggccaccaggccgtgcctgagaggtctgccttcagccccccaagaagaaacttcagccccatcgtggacacagacagcctggccgcccagggccacgtgctgaccaagatcagcaaggagaacaccaggcaccccctgcccctgcggcacaaccccttccacagcctcttccagcagaccctgacagacaagagcggccctgagctgaagaccccatttgtgaaggaggcctttgaggagacccccaagaagcacagagaatgtctggtgaaggacaaccagaagtacaccttcaccatcgacagatgtgccaaggacctgtttgtggccaagcaggtgggcaccaagctgtctgtgaatgagcccctgtccttctctgtggagagcatcctgaagaggcccagcagcgccatcaccagggtgtcccagtag

SEQ ID NO: 150441 - DNA, 1686 bp, synthetic construct; identical to SEQ ID NO: 150440
  misc_feature 1..1686: note = Description of Artificial Sequence: Synthetic coding sequence
  source 1..1686: mol_type = other DNA

SEQ ID NO: 150442 - DNA, 1686 bp, synthetic construct; identical to SEQ ID NO: 150440
  misc_feature 1..1686: note = Description of Artificial Sequence: Synthetic coding sequence
  source 1..1686: mol_type = other DNA

SEQ ID NO: 150443 - DNA, 681 bp, synthetic construct; identical to SEQ ID NO: 150439
  misc_feature 1..681: note = Description of Artificial Sequence: Synthetic coding sequence
  source 1..681: mol_type = other DNA

SEQ ID NO: 150444 - DNA, 681 bp, synthetic construct; identical to SEQ ID NO: 150439
  misc_feature 1..681: note = Description of Artificial Sequence: Synthetic coding sequence
  source 1..681: mol_type = other DNA

SEQ ID NO: 150445 - DNA, 6039 bp, synthetic construct
  misc_feature 1..6039: note = Description of Artificial Sequence: Synthetic coding sequence
  source 1..6039: mol_type = other DNA
atgtggatcctggccctgagcctcttccagagctttgccaacgtgttttctgaggacctgcacagcagcctgtactttgtgaatgccagcctgcaggaggtggtgtttgccagcaccaccggcaccctggtgccctgcccagctgctggcatcccccctgtgaccctgcgctggtacctggccaccggggaggagatctatgatgtgcccggcatccgccacgtgcaccccaacggcaccctgcagatcttccccttcccccccagcagcttcagcaccctcatccatgacaacacctactactgcacagctgagaaccccagcggcaagatccgcagccaggatgtgcacatcaaggctgtgctgcgggagccctacacagtgcgggtggaggaccagaagaccatgagaggaaatgtggccgtgttcaagtgcatcatccccagctctgtggaggcctacatcaccgtggtgtcctgggagaaggacacagtgtccctggtgtctggcagccgcttcctgatcaccagcactggagccctgtacatcaaggatgtgcagaatgaagatggcctgtacaactaccgctgcatcaccaggcaccgctacaccggggagacccggcagagcaacagcgcccggctgtttgtgtctgaccctgccaacagcgcccccagcatcctggatggctttgaccacaggaaggccatggccggccagagggtggagctgccctgcaaggccctgggccaccctgagccagactaccgctggctgaaggacaacatgcccctggagctgagcggccgcttccagaagacagtgacaggcctgctgattgagaacatccggcccagcgacagcggcagctatgtgtgtgaggtgagcaacagatatggaacagccaaggtgattggccgcctgtatgtgaagcagcccctgaaggccaccatcagccccaggaaggtgaagagctctgtgggcagccaggtgtccctgagctgcagcgtgactggaacagaggaccaggagctgtcctggtacagaaatggagagatcctgaaccctgggaagaatgtgcgcatcaccggcatcaaccacgagaacctgatcatggaccacatggtgaagagtgatggaggagcctaccagtgctttgtgaggaaggacaagctgagcgcccaggactatgtgcaggtggtgctggaggatggcacccccaagatcatcagcgccttcagcgagaaggtggtgtccccagctgagcctgtgtccctgatgtgcaatgtgaagggcacccccctgcccaccatcacctggaccctggatgatgaccccatcctgaagggcggcagccaccgcatcagccagatgatcaccagcgagggcaatgtggtgtcctacctgaacatcagcagcagccaggtgagagatggcggcgtgtaccgctgcacagccaacaacagcgctggggtggtgctgtaccaggcccgcatcaacgtgcggggccctgccagcatccggcccatgaagaacatcacagccatcgccggccgggacacctacatccactgcagggtcatcggctacccctactacagcatcaagtggtacaagaacagcaacctgctgcccttcaaccaccggcaggtggcctttgagaacaacggcaccctgaagctgagtgatgtgcagaaggaggtggatgaaggagagtacacctgcaatgtgctggtgcagccccagctgagcaccagccagagcgtgcacgtgacagtgaaggtgccccccttcatccagccctttgagttcccccgcttcagcatcggccagagggtcttcatcccctgtgtggtggtgtctggggacctgcccatcaccatcacctggcagaaggatggccggcccatccctggcagcctgggcgtgaccatcgacaacatcgacttcaccagcagcctgcgcatcagcaacctgagcctgatgcacaacggcaactacacctgcatcgccagaaatgaagctgctgctgtggagcaccagagccagctgattgtgcgggtgccccccaagtttgtggtgcagccccgggaccaggacggcatctacggcaaggccgtcatcctgaactgcagcgctgagggctaccctgtgcccaccatcgtgtggaagttcagcaaaggagctggggtgccccagttccagcccatcgccctgaatggccgcatccaggtgctgagcaatggcagcctgctgatcaagcacgtggtggaggaggacagcggctactacctgtgcaaggtgtccaatgatgtgggcgcagatgtgtccaagtccatgtacctgactgtgaagatcccagccatgatcaccagctaccccaacaccaccctggccacccagggccagaagaaggagatgagctgcacagcccacggggagaagcccatcatcgtgcgctgggagaaggaggaccgcatcatcaaccctgagatggcccgctacctggtgtccaccaaggaggtgggggaggaggtgatcagcaccctgcagatcctgcccaccgtgcgggaggacagcggcttcttcagctgccacgccatcaacagctatggagaagatcggggcatcatccagctgactgtgcaggagcccccagaccccccagaaattgagatcaaggatgtgaaggcccggaccatcaccctgcgctggaccatgggctttgatggcaacagccccatcaccggctatgacatcgagtgcaagaacaagagtgacagctgggacagcgcccagaggaccaaggatgtgagcccccagctgaacagcgccaccatcatcgacatccaccccagcagcacctacagcatccgcatgtatgccaagaaccgcatcggcaagtctgagcccagcaatgagctgaccatcacagcagatgaggccgccccagatggccccccccaggaggtgcacctggagcccatcagcagccagagcatccgggtgacctggaaggcccccaagaagcacctgcagaatggcatcatccggggctaccagatcggctaccgggagtacagcactggaggcaacttccagttcaacatcatctctgtggacaccagcggggacagcgaggtgtacaccctggacaacctgaacaagttcacccagtatggcctggtggtgcaggcctgcaacagagctggcaccggccccagcagccaggagatcatcaccaccaccctggaggatgtgcccagctaccccccagaaaatgtgcaggccatcgccaccagccctgagagcatcagcatctcctggagcaccctgagcaaggaggccctgaatggcatcctgcagggcttccgggtcatctactgggccaacctgatggatggagagctgggggagatcaagaacatcaccaccacccagcccagcctggagctggatggcctggagaagtacaccaactacagcatccaggtgctggccttcaccagggctggagatggagtgcgctctgagcagatcttcaccaggaccaaggaggatgtgcccggccccccagctggggtgaaggctgctgctgccagcgcctccatggtgtttgtgtcctggctgccccccctgaagctgaatggcatcatcaggaagtacacagtgttctgcagccacccctaccccaccgtcatcagcgagtttgaggccagcccagacagcttctcctaccgcatccccaacctgagcaggaaccggcagtacagcgtgtgggtggtggccgtgaccagcgctggccggggcaacagcagcgagatcatcaccgtggagcccctggccaaggccccagcccgcatcctgaccttcagcggcaccgtgaccaccccctggatgaaggacatcgtgctgccctgcaaggctgtgggggaccccagccctgctgtgaagtggatgaaggacagcaatggcacccccagcctggtgaccattgatggaagaagaagcatcttcagcaatggcagcttcatcatcagaacagtgaaggccgaggacagcggctactacagctgcatcgccaacaacaactggggcagtgatgagatcatcctgaacctgcaggtgcaggtgcccccagaccagccccggctgactgtgtccaagaccaccagcagcagcatcaccctgtcctggctgcccggggacaatggaggcagcagcatccggggctacatcctgcagtacagcgaggacaacagcgagcagtggggcagcttccccatcagccccagcgagaggagctaccgcctggagaacctgaagtgtggcacctggtacaagttcaccctgacagcccagaatggagtgggccctggccgcatcagcgagatcatcgaggccaagaccctgggcaaggagccccagttcagcaaggagcaggagctgtttgccagcatcaacaccaccagggtgcggctgaacctgattggctggaatgatggcggctgccccatcaccagcttcaccctggagtaccggcccttcggcaccaccgtgtggaccacagcccagaggaccagcctgagcaagagctacatcctgtatgacctgcaggaggccacctggtatgagctgcagatgagggtgtgcaacagcgctggctgtgccgagaagcaggccaactttgccaccctgaactatgatggcagcaccatccccccactcatcaagtctgtggtgcagaatgaggagggcctgaccaccaatgaaggcctgaagatgctggtgaccatcagctgcatcctggtgggcgtgctgctgctgtttgtgctgctgctggtggtgagaagaagaagaagagagcagaggctgaagaggctgagagatgccaagagcctggccgagatgctgatgagcaagaacaccaggaccagtgacaccctgagcaagcagcagcagaccctgaggatgcacatcgacatcccccgggcccagctgctgattgaggagcgggacaccatggagaccattgatgacaggagcacagtgctgctgacagatgctgactttggagaggccgccaagcagaagagcctgactgtgacccacacagtgcactaccagagcgtgtcccaggccaccggccccctggtggatgtgtctgatgcccggcccggcaccaaccccaccaccaggagaaatgccaaggccggccccacagccaggaacagatatgccagccagtggaccctgaaccggccccaccccaccatcagcgcccacaccctgaccacagactggaggctgcccacccccagggctgctggctctgtggacaaggagagtgacagctacagcgtgagccccagccaggacacagaccgggcccggagctccatggtgtccacagagagcgccagcagcacctatgaggagctggcccgggcctatgagcacgccaagatggaggagcagctgcggcatgccaagttcaccatcacagagtgcttcatcagtgacaccagcagcgagcagctgacagctggcaccaatgagtacacagacagcctgaccagcagcacccccagcgagagcggcatctgccgcttcaccgccagcccccccaagccccaggacggcggccgggtgatgaacatggctgtgcccaaggcccacaggcctggggacctgatccacctgcccccctacctgaggatggacttcctgctgaacagaggaggccctggcaccagccgggacctgagcctgggccaggcctgcctggagccccagaagagcaggaccctgaagaggcccaccgtgctggagcccatccccatggaggccgccagcagcgccagcagcacccgggagggccagagctggcagcctggagctgtggccaccctgccccagcgggagggcgctgagctgggccaggccgccaagatgagcagcagccaggagagcctgctggacagccggggccacctgaagggcaacaacccctatgccaagagctacaccctggtgtag

SEQ ID NO: 150446 - DNA, 6342 bp, synthetic construct
  misc_feature 1..6342: note = Description of Artificial Sequence: Synthetic coding sequence
  source 1..6342: mol_type = other DNA
atgaccggggccggggagccccggcgggaggagcccccaccccagcccagcgctggcctgcggagccgggagagcggggcccccagcgctgggggctgggagcgggcagagcggggccgcggggctgctgcccggcctgccaccggccccccaccaagaagaattggccccctgtatggcatgtggctggtgaccttcctgctgctgctggacagcctgcacaaggcccggccagaagatgtgggcaccagcctgtactttgtgaatgacagcctgcagcaggtgaccttcagcagctctgtgggcgtggtggtgccctgcccagctgctggcagccccagcgctgccctgcgctggtacctggccactggagatgacatctatgatgtgccccacatcagacatgtgcacgccaacggcaccctgcagctgtaccccttcagccccagcgccttcaacagcttcatccatgacaatgactacttctgcacagcagaaaatgctgctgggaagatccgcagccccaacatccgggtgaaggctgtgttccgggagccctacacagtgcgggtggaggaccagaggtccatgagaggaaatgtggccgtgttcaagtgcctgatccccagctctgtgcaggagtatgtgtctgtggtgtcctgggagaaggacacagtgtccatcatccctgagcaccgcttcttcatcacctaccatggaggcctgtacatcagtgatgtgcagaaggaggatgccctgagcacctaccgctgcatcaccaagcacaagtacagcggggagacccggcagagcaatggagcccggctgtctgtgacagatcctgctgagagcatccccaccatcctggatggcttccacagccaggaggtgtgggccggccacacagtggagctgccctgcacagccagcggctaccccatcccagccatccgctggctgaaggatggccggcccctgcctgctgacagccgctggaccaagaggatcaccggcctgaccatcagtgacctgaggacagaagattctggcacctacatctgtgaggtgaccaacaccttcggcagcgctgaggccaccggcatcctgatggtgattgaccccctgcacgtgaccctgacccccaagaagctgaagacaggcatcggcagcaccgtcatcctgagctgtgccctgaccggcagccctgagttcaccatccgctggtacagaaacacagagctggtgctgcctgatgaggccatcagcatccggggcctgagcaatgagaccctgctgatcaccagcgcccagaagagccacagcggggcctaccagtgctttgccaccaggaaggcccagacagcccaggactttgccatcatcgccctggaggatggcaccccccgcatcgtgtcctccttcagcgagaaggtggtgaaccctggagagcagttcagcctgatgtgtgccgccaagggggcccccccacccaccgtgacctgggccctggatgatgagcccatcgtgagagatggcagccacaggaccaaccagtacaccatgtctgatggcaccaccatcagccacatgaatgtgacaggcccccagatcagagatggaggagtgtaccgctgcacagccaggaacctggtgggcagcgctgagtaccaggcccgcatcaacgtgcggggccccccatccatccgggccatgaggaacatcacagctgtggccggccgggacaccctcatcaactgccgggtgattggctacccctactacagcatcaagtggtacaaggatgccctgctgctgcctgacaaccaccggcaggtggtgtttgaaaatggcaccctgaagctgacagatgtgcagaagggcatggatgaaggagagtacctgtgcagcgtgctgatccagccccagctgagcatcagccagagcgtgcacgtggccgtgaaggtgcccccactcatccagccctttgagttccccccagccagcatcggccagctgctgtacatcccctgtgtggtgtcctctggggacatgcccatccgcatcacctggaggaaggatggccaggtgatcatcagcggcagcggcgtgaccatcgagagcaaggagttcatgagcagcctgcagatcagctctgtgtccctgaagcacaacggcaactacacctgcatcgccagcaatgctgctgccaccgtgtcccgggagcggcagctgattgtgcgggtgcccccaagatttgtggtgcagcccaacaaccaggacggcatctacggcaaggccggcgtgctgaactgcagcgtggatggctaccccccacccaaggtgatgtggaagcacgccaagggcagcggcaacccccagcagtaccaccctgtgcccctgaccggccgcatccagatcctgcccaacagcagcctgctgatccgccacgtgctggaggaggacatcggctactacctgtgccaggccagcaatggagtgggcacagacatcagcaagtccatgttcctgactgtgaagatcccagccatgatcaccagccaccccaacaccaccatcgccatcaagggccacgccaaggagctgaactgcacagcccggggggagcggcccatcatcatccgctgggagaagggggacacagtgattgatcctgacagagtgatgagatatgccatcgccaccaaggacaatggagatgaggtggtgtccaccctgaagctgaagccagctgacagaggagacagcgtcttcttcagctgccacgccatcaacagctatggagaagatcggggcctcatccagctgactgtgcaggagcccccagaccccccagagctggagatccgggaggtgaaggcccgctccatgaacctgcgctggacccagagatttgatggcaacagcatcatcaccggctttgacatcgagtacaagaacaagagtgacagctgggacttcaagcagagcaccaggaacatcagccccaccatcaaccaggccaacatcgtggacctgcacccagcctctgtgtacagcatccgcatgtacagcttcaacaagattggccgctctgagcccagcaaggagctgaccatcagcacagaggaggccgccccagatggcccccccatggatgtgaccctgcagcctgtgaccagccagagcatccaggtgacctggaaggcccccaagaaggagctgcagaatggagtcatccggggctaccagatcggctaccgggagaacagccctggcagcaatggccagtacagcatcgtggagatgaaggccactggagacagcgaggtgtacaccctggacaacctgaagaagtttgcccagtatggagtggtggtgcaggccttcaacagagctggcaccggccccagcagcagcgagatcaatgccaccaccctggaggatgtgcccagccagcccccagaaaatgtgcgggccctgagcatcaccagtgatgtggccgtcatctcctggagcgagccccccaggagcaccctgaatggagtgctgaagggctacagagtcatcttctggagcctgtatgtggatggagagtggggcgagatgcagaacatcaccaccacccgggagcgggtggagctgcggggcatggagaagttcaccaactacagcgtgcaggtgctggcctacacccaggccggagatggagtgcgcagctctgtgctgtacatccagaccaaggaggatgtgcccggccccccagctggcatcaaggctgtgcccagcagcgccagctctgtggtggtgtcctggctgccccccaccaagcccaacggggtcatcaggaagtacaccatcttctgcagcagccctggcagcggccagcctgcccccagtgaatatgagaccagccctgagcagctgttctaccgcatcgcccacctgaacagaggccagcagtacctgctgtgggtggccgctgtgaccagcgctggccggggcaacagcagcgagaaggtgaccatcgagcctgctgggaaggccccagccaagatcatcagctttggaggcaccgtgaccaccccctggatgaaggatgtgcggctgccctgcaacagcgtgggggaccctgccccagctgtgaagtggaccaaggacagcgaggacagcgccatccctgtgtccatggatggccacaggctcatccacaccaacggcaccctgctgctgcgggctgtgaaggccgaggacagcggctactacacctgcacagccaccaacacaggaggctttgacaccatcatcgtgaacctgctggtgcaggtgcccccagaccagccccggctgactgtgtccaagaccagcgccagcagcatcaccctgacctggatccctggggacaatggaggcagcagcatccggggctttgtgctgcagtacagcgtggacaacagcgaggagtggaaggatgtgttcatcagcagcagcgagaggagcttcaagctggacagcctgaagtgtggcacctggtacaaggtgaagctggccgccaagaacagcgtgggcagcggccgcatcagcgagatcatcgaggccaagacccacggccgggagcccagcttcagcaaggaccagcacctgttcacccacatcaacagcacccacgcccggctgaacctgcagggctggaacaatggaggctgccccatcacagccatcgtgctggagtaccggcccaagggcacctgggcctggcagggcctgcgggccaacagcagtggagaggtgttcctgacagagctgcgggaggccacctggtatgagctgaggatgagggcctgcaacagcgctggctgtggaaatgaaacagcccagtttgccaccctggactatgatggcagcaccatcccccccatcaagagcgcccagggcgagggagatgatgtgaagaagctgttcaccatcggctgccctgtgatcctggccaccctgggcgtggccctgctcttcatcgtgaggaagaagaggaaggagaagaggctgaagaggctgagagatgccaagagcctggccgagatgctgatcagcaagaacaacagaagctttgacacccctgtgaagggccccccccagggcccccggctgcacatcgacatcccccgggtgcagctgctgattgaggacaaggagggcatcaagcagctgggagatgacaaggccaccatccctgtgacagatgctgagttcagccaggccgtgaacccccagagcttctgcaccggggtgtccctgcaccaccccaccctcatccagagcacaggccccctgattgacatgtctgacatccggcccggcaccaaccctgtgtccaggaagaatgtgaagagcgcccacagcaccaggaaccgctacagcagccagtggaccctgaccaagtgccaggccagcaccccagcccggaccctgaccagtgactggaggacagtgggcagccagcacggcgtgacagtgacagaaagtgacagctacagcgccagcctgagccaggacacagacaagggcagaaattccatggtgtccacagaaagtgccagcagcacctatgaggagctggcccgggcctatgaacatgccaagctggaggagcagctgcagcacgccaagtttgagatcacagagtgcttcatcagtgacagcagcagtgaccagatgaccaccggcaccaatgaaaatgctgacagcatgacctccatgagcacccccagcgagcccggcatctgccgcttcaccgccagcccccccaagccccaggatgctgaccggggcaagaatgtggccgtgcccatcccccaccgggccaacaagagtgactactgcaacctgcccctgtatgccaagtctgaggccttcttcaggaaggcagatggccgggagccctgccctgtggtgcccccccgggaggccagcatccggaacctggcccggacctaccacacccaggcccggcacctgaccctggaccctgccagcaagagcctgggcctgccccaccctggggccccagctgctgccagcacagccaccctgccccagaggaccctggccatgcctgcccctcctgctggaacagcccccccagcccctggccccaccccagctgagcccccaacagcccccagcgctgcccccccagcccccagcacagagccccccagggctgggggcccccacaccaagatgggcggcagccgggacagcctgctggagatgagcaccagcggcgtgggccgcagccagaagcagggcgctggggcctacagcaagagctacaccctggtgtag

SEQ ID NO: 150447 - DNA, 5463 bp, synthetic construct
  misc_feature 1..5463: note = Description of Artificial Sequence: Synthetic coding sequence
  source 1..5463: mol_type = other DNA
atgctgccctactgggccggccacacagtggagctgccctgcacagccagcggctaccccatcccagccatccgctggctgaaggatggccggcccctgcctgctgacagccgctggaccaagaggatcaccggcctgaccatcagtgacctgaggacagaggacagcggcacctacatctgtgaggtgaccaacacctttggatctgctgaggccaccggcatcctgatggtgattgaccccctgcacgtgaccctgacccccaagaagctgaagacaggaattggcagcaccgtcatcctgagctgtgccctgaccggcagccctgagttcaccatccgctggtacagaaacacagagctggtgctgcctgatgaggccatcagcatccggggcctgagcaatgagaccctgctgatcaccagcgcccagaagagccacagcggggcctaccagtgctttgccaccaggaaggcccagacagcccaggactttgccatcatcgccctggaggatggcaccccaagaattgtgagcagcttcagcgagaaggtggtgaaccctggagagcagttcagcctgatgtgtgccgccaagggggcccccccacccaccgtgacctgggccctggatgatgagcccatcgtgagagatggcagccacaggaccaaccagtacaccatgtctgatggcaccaccatcagccacatgaatgtgacaggcccccagatcagagatggcggcgtgtaccgctgcacagccaggaacctggtgggcagcgctgagtaccaggcccgcatcaacgtgcggggcccccccagcatccgggccatgaggaacatcacagctgtggccggccgggacaccctcatcaactgcagggtcatcggctacccctactacagcatcaagtggtacaaggatgccctgctgctgcctgacaaccaccggcaggtggtgtttgaaaatggcaccctgaagctgacagatgtgcagaagggcatggatgaaggagagtacctgtgcagcgtgctgatccagccccagctgagcatcagccagagcgtgcacgtggccgtgaaggtgcccccactcatccagccctttgagttccccccagccagcatcggccagctgctgtacatcccctgtgtggtgagcagcggggacatgcccatccgcatcacctggaggaaggatggccaggtgatcatcagcggcagcggcgtgaccatcgagagcaaggagttcatgagcagcctgcagatcagctctgtgtccctgaagcacaatggaaactacacctgcatcgccagcaatgctgctgccaccgtgtcccgggagcggcagctgattgtgcgggtgccccccaggtttgtggtgcagcccaacaaccaggacggcatctacggcaaggccggcgtgctgaactgcagcgtggatggctaccccccacccaaggtgatgtggaagcacgccaagggcagcggcaacccccagcagtaccaccctgtgcccctgaccggccgcatccagatcctgcccaacagcagcctgctgatcagacatgtgctggaggaggacatcggctactacctgtgccaggccagcaatggagtgggcacagacatcagcaagtccatgttcctgactgtgaagatcccagccatgatcaccagccaccccaacaccaccatcgccatcaagggccacgccaaggagctgaactgcacagcccggggggagcggcccatcatcatccgctgggagaagggggacaccgtcatcgaccctgacagagtgatgagatatgccatcgccaccaaggacaatggagatgaggtggtgtccaccctgaagctgaagccagctgacagaggagacagcgtcttcttcagctgccacgccatcaacagctatggagaggaccggggcctcatccagctgactgtgcaggagcccccagaccccccagagctggagatccgggaggtgaaggcccgctccatgaacctgcgctggacccagagatttgatggcaacagcatcatcactggatttgatattgagtacaagaacaagagtgacagctgggacttcaagcagagcaccaggaacatcagccccaccatcaaccaggccaacatcgtggacctgcacccagcctctgtgtacagcatccgcatgtacagcttcaacaagattggccgctctgagcccagcaaggagctgaccatcagcacagaggaggccgccccagatggcccccccatggatgtgaccctgcagcctgtgaccagccagagcatccaggtgacctggaaggcccccaagaaggagctgcagaatggagtcatccggggctaccagatcggctaccgggagaacagccctggcagcaatggccagtacagcatcgtggagatgaaggccaccggggacagcgaggtgtacaccctggacaacctgaagaagtttgcccagtatggagtggtggtgcaggccttcaacagagctggcaccggccccagcagcagcgagatcaatgccaccaccctggaggatgtgcccagccagcccccagaaaatgtgcgggccctgagcatcaccagtgatgtggccgtcatctcctggagcgagcccccaagaagcaccctgaatggagtgctgaagggctacagagtcatcttctggagcctgtatgtggatggagagtggggcgagatgcagaacatcaccaccacccgggagcgggtggagctgcggggcatggagaagttcaccaactacagcgtgcaggtgctggcctacacccaggccggagatggagtgcgcagctctgtgctgtacatccagaccaaggaggatgtgcccggccccccagctggcatcaaggctgtgcccagcagcgccagctctgtggtggtgtcctggctgccccccaccaagcccaatggagtcatcaggaagtacaccatcttctgcagcagccctggcagcggccagcctgcccccagtgaatatgagaccagccctgagcagctgttctacagaattgcccacctgaacagaggccagcagtacctgctgtgggtggccgctgtgaccagcgctggccggggcaacagcagcgagaaggtgaccatcgagcctgctgggaaggccccagccaagatcatcagctttggaggcaccgtgaccaccccctggatgaaggatgtgcggctgccctgcaacagcgtgggggaccctgccccagctgtgaagtggaccaaggacagtgaagattctgccatccctgtgtccatggatggccacaggctcatccacaccaacggcaccctgctgctgcgggctgtgaaggcagaagattctggctactacacctgcacagccaccaacacaggaggctttgacaccatcatcgtgaacctgctggtgcaggtgcccccagaccagccccggctgactgtgtccaagaccagcgccagcagcatcaccctgacctggatccctggggacaatggaggcagcagcatccggggctttgtgctgcagtacagcgtggacaacagcgaggagtggaaggatgtgttcatcagcagcagcgagaggagcttcaagctggacagcctgaagtgtggcacctggtacaaggtgaagctggccgccaagaacagcgtgggcagcggccgcatcagcgagatcatcgaggccaagacccacggccgggagcccagcttcagcaaggaccagcacctgttcacccacatcaacagcacccacgcccggctgaacctgcagggctggaacaacggcggctgccccatcacagccatcgtgctggagtaccggcccaagggcacctgggcctggcagggcctgcgggccaacagcagcggggaggtgttcctgacagagctgcgggaggccacctggtatgagctgaggatgagggcctgcaacagcgctggctgtggaaatgaaacagcccagtttgccaccctggactatgatggcagcaccatcccccccatcaagagcgcccagggcgagggagatgatgtgaagaagctgttcaccatcggctgccctgtgatcctggccaccctgggcgtggccctgctcttcatcgtgaggaagaagaggaaggagaagaggctgaagaggctgagagatgccaagagcctggccgagatgctgatcagcaagaacaacagaagctttgacacccctgtgaagggccccccccagggcccccggctgcacatcgacatcccccgggtgcagctgctgattgaggacaaggagggcatcaagcagctgggagatgacaaggccaccatccctgtgacagatgctgagttcagccaggccgtgaacccccagagcttctgcacaggagtgtccctgcaccaccccaccctcatccagagcacaggccccctgattgacatgtctgacatccggcccggcaccaaccctgtgtccaggaagaatgtgaagagcgcccacagcaccaggaaccgctacagcagccagtggaccctgaccaagtgccaggccagcaccccagcccggaccctgaccagtgactggaggacagtgggcagccagcacggcgtgacagtgacagaaagtgacagctacagcgccagcctgagccaggacacagacaagggcaggaacagcatggtgtccacagagagcgccagcagcacctatgaggagctggcccgggcctatgagcacgccaagctggaggagcagctgcagcacgccaagtttgagatcacagagtgcttcatcagtgacagcagcagtgaccagatgaccaccggcaccaatgaaaatgctgacagcatgacctccatgagcaccccatctgagcccggcatctgccgcttcaccgccagcccccccaagccccaggatgctgaccggggcaagaatgtggccgtgcccatcccccaccgggccaacaagagtgactactgcaacctgcccctgtatgccaagtctgaggccttcttcaggaaggcagatggccgggagccctgccctgtggtgcccccccgggaggccagcatccggaacctggcccggacctaccacacccaggcccggcacctgaccctggaccctgccagcaagagcctgggcctgccccaccctggggccccagctgctgccagcacagccaccctgccccagaggaccctggccatgcctgcccccccagctggaacagcccccccagcccctggccccaccccagctgagcccccaacagcccccagcgctgcccccccagcccccagcacagagcccccccgggccggcggcccccacaccaagatgggcggcagccgggacagcctgctggagatgagcaccagcggcgtgggccgcagccagaagcagggcgctggggcctacagcaagagctacaccctggtgtag

SEQ ID NO: 150448 - DNA, 762 bp, synthetic construct
  misc_feature 1..762: note = Description of Artificial Sequence: Synthetic coding sequence
  source 1..762: mol_type = other DNA
atggagggcaccgtgaacctgcagctgagcgccaagtctgtgggcgtgtttgaggccttctacaacagcgtgaagcccatccagatcatcaacagcaccatcgagatggtgaagccaggcaagttccccagcggcaagacagagatcccctttgagttccccctgcacctgaagggcaacaaggtgctgtatgagacctaccacggcgtgtttgtgaacatccagtacaccctgcgctgtgacatgaagaggagcctgctggccaaggacctgaccaagacctgtgagttcatcgtgcacagcgccccccagaagggcaagttcacccccagccctgtggacttcaccatcaccccagagaccctgcagaatgtgaaggagcgggccctgctgcccaagttcctgctgcggaccagccagctgaacaagctgtgccaccacgccgccaccaacggccgggccggcggcggggagctgggcagccgccaccagaagagaggagctgctgctggggcccggggagatgtgcgggtgtgccgctatgccagagatgccacagagatccagaacatccagattgctgatggagatgtgtgccggggcctgtctgtgcccatctacatggtgttccccaggctcttcacctgccccaccctggagaccaccaacttcaaggtggagtttgaggtgaacatcgtggtgctgctgcacccagaccacctgatcacagagaacttccccctgaagctgtgccgcatctag

SEQ ID NO: 150449 - DNA, 894 bp, synthetic construct
  misc_feature 1..894: note = Description of Artificial Sequence: Synthetic coding sequence
  source 1..894: mol_type = other DNA
atgggcacagccctggacatcaagatcaagagggccaacaaggtgtaccacgccggggaggtgctgtctggagtggtggtgatcagcagcaaggacagcgtgcagcaccagggcgtgtccctgaccatggagggcaccgtgaacctgcagctgagcgccaagtctgtgggcgtgtttgaggccttctacaacagcgtgaagcccatccagatcatcaacagcaccatcgagatggtgaagccaggcaagttccccagcggcaagacagagatcccctttgagttccccctgcacctgaagggcaacaaggtgctgtatgagacctaccacggcgtgtttgtgaacatccagtacaccctgcgctgtgacatgaagaggagcctgctggccaaggacctgaccaagacctgtgagttcatcgtgcacagcgccccccagaagggcaagttcacccccagccctgtggacttcaccatcaccccagagaccctgcagaatgtgaaggagcgggccctgctgcccaagttcctgctgcggggccacctgaacagcaccaactgtgtgatcacccagcccctgaccggggagctggtggtggagagcagcgaggccgccatccgctctgtggagctgcagctggtgcgggtggagacctgtggctgtgccgagggctacgccagagatgccacagagatccagaacatccagattgctgatggagatgtgtgccggggcctgtctgtgcccatctacatggtgttccccaggctcttcacctgccccaccctggagaccaccaacttcaaggtggagtttgaggtgaacatcgtggtgctgctgcacccagaccacctgatcacagagaacttccccctgaagctgtgccgcatctag

SEQ ID NO: 150450 - DNA, 519 bp, synthetic construct
  misc_feature 1..519: note = Description of Artificial Sequence: Synthetic coding sequence
  source 1..519: mol_type = other DNA
atgggcacagccctggacatcaagatcaagagggccaacaaggtgtaccacgccggcccccagaagggcaagttcacccccagccctgtggacttcaccatcaccccagagaccctgcagaatgtgaaggagcgggccctgctgcccaagttcctgctgcggggccacctgaacagcaccaactgtgtgatcacccagcccctgactggagagctggtggtggagagcagcgaggccgccatccgctctgtggagctgcagctggtgcgggtggagacctgtggctgtgccgagggctacgccagagatgccacagagatccagaacatccagattgctgatggagatgtgtgccggggcctgtctgtgcccatctacatggtgttccccaggctcttcacctgccccaccctggagaccaccaacttcaaggtggagtttgaggtgaacatcgtggtgctgctgcacccagaccacctgatcacagagaacttccccctgaagctgtgccgcatctag

SEQ ID NO: 150451 - DNA, 813 bp, synthetic construct
  misc_feature 1..813: note = Description of Artificial Sequence: Synthetic coding sequence
  source 1..813: mol_type = other DNA
atgggcacagccctggacatcaagatcaagagggccaacaaggtgtaccacgccggggaggtgctgtctggagtggtggtgatcagcagcaaggacagcgtgcagcaccagggcgtgtccctgaccatggagggcaccgtgaacctgcagctgagcgccaagtctgtgggcgtgtttgaggccttctacaacagcgtgaagcccatccagatcatcaacagcaccatcgagatggtgaagccaggcaagttccccagcggcaagacagagatcccctttgagttccccctgcacctgaagggcaacaaggtgctgtatgagacctaccacggcgtgtttgtgaacatccagccccagaagggcaagttcacccccagccctgtggacttcaccatcaccccagagaccctgcagaatgtgaaggagcgggccctgctgcccaagttcctgctgcggggccacctgaacagcaccaactgtgtgatcacccagcccctgactggagagctggtggtggagagcagcgaggccgccatccgctctgtggagctgcagctggtgcgggtggagacctgtggctgtgccgagggctacgccagagatgccacagagatccagaacatccagattgctgatggagatgtgtgccggggcctgtctgtgcccatctacatggtgttccccaggctcttcacctgccccaccctggagaccaccaacttcaaggtggagtttgaggtgaacatcgtggtgctgctgcacccagaccacctgatcacagagaacttccccctgaagctgtgccgcatctag

SEQ ID NO: 150452 - DNA, 663 bp, synthetic construct
  misc_feature 1..663: note = Description of Artificial Sequence: Synthetic coding sequence
  source 1..663: mol_type = other DNA
atgggcacagccctggacatcaagatcaagagggccaacaaggtgtaccacgccggggaggtgctgtctggagtggtggtgatcagcagcaaggacagcgtgcagcaccagggcgtgtccctgaccatggagggcaccgtgaacctgcagctgagcgccaagtctgtgggcgtgtttgaggccttctacaacagcgtgaagccccagaagggcaagttcacccccagccctgtggacttcaccatcaccccagagaccctgcagaatgtgaaggagcgggccctgctgcccaagttcctgctgcggggccacctgaacagcaccaactgtgtgatcacccagcccctgactggagagctggtggtggagagcagcgaggccgccatccgctctgtggagctgcagctggtgcgggtggagacctgtggctgtgccgagggctacgccagagatgccacagagatccagaacatccagattgctgatggagatgtgtgccggggcctgtctgtgcccatctacatggtgttccccaggctcttcacctgccccaccctggagaccaccaacttcaaggtggagtttgaggtgaacatcgtggtgctgctgcacccagaccacctgatcacagagaacttccccctgaagctgtgccgcatctag

SEQ ID NO: 150453 - DNA, 357 bp, synthetic construct
  misc_feature 1..357: note = Description of Artificial Sequence: Synthetic coding sequence
  source 1..357: mol_type = other DNA
atgagcctcatcatcctgaccagagatgatgagccccgcatcttcaccccagacagtgatgctgccagccctgccctgcacagcaccagccccctgcctgaccctgccagcgccagccccctgcaccgggaggagaagatcctgcccaaggtgtgcaacatcgtgtcctgcctgtccttcagcctgcctgccagccccacagattctggcctggccagccccaccatcatcacccgggagggccagcagttctgggccaagtgcctgatctggaagtaccagctgtacctgcacggcctgcacaagaagagtgatggaagaagagacaagcagatcagcgccagccccagcacctag

SEQ ID NO: 150454 - DNA, 573 bp, synthetic construct
  misc_feature 1..573: note = Description of Artificial Sequence: Synthetic coding sequence
  source 1..573: mol_type = other DNA
atggagcctgaggccgctgctggggccaggaaggcccggggccggggctgccactgccctggagatgccccctggaggcctcctccaccccggggccctgagagccctgccccctggaggccctggatccagaccccaggagatgctgagctgaccaggacaggccggcccctggagcccagggctgaccagcacaccttcggcagcaagggggccttcggcttccagcaccctgtgcgggtgtacctgcccatgagcaagaggcaggagtacctgcggagcagtggagagcaggtgctggccagcttccctgtgcaggccaccatcgacttctatgatgatgagagcacagaaagtgccagcgaggccgaggagcctgaggagggccccccacccctgcacctgctgccccaggaggtgggcggccggcaggagaatggacctgggggcaagggccgggaccagggcatcaaccagggccagaggagcagcggcggcggggaccactggggcgagggccccctgccccagggcgtgagcagcagaggaggcaagtgcagcagcagcaagtag

SEQ ID NO: 150455 - DNA, 294 bp, synthetic construct
  misc_feature 1..294: note = Description of Artificial Sequence: Synthetic coding sequence
  source 1..294: mol_type = other DNA
atgaaggagcccggccccaactttgtgacagtgaggaagggcctgcacagcttcaagatggcctttgtgaagcacctgctgctcttcctgagcccccggctggagtgcagcggcagcatcacagaccactgcagcctgcacctgcctgtgcaggagatcctgatgagccagcccccagagcagctgggcctgcagaccaacctgggcaaccaggagagcagcggcatgatgaagctgttcatgccccggcccaaggtgctggcccagtatgagagcatccagttcatgccctag

SEQ ID NO: 150456 - DNA, 276 bp, synthetic construct
  misc_feature 1..276: note = Description of Artificial Sequence: Synthetic coding sequence
  source 1..276: mol_type = other DNA
atgaaggagcccggccccaactttgtgacagtgaggaagggcctgcacagcttcaagatggcctttgtgaagcacctgctgctggagtgcagcggcagcatcacagaccactgcagcctgcacctgcctgtgcaggagatcctgatgagccagcccccagagcagctgggcctgcagaccaacctgggcaaccaggagagcagcggcatgatgaagctgttcatgccccggcccaaggtgctggcccagtatgagagcatccagttcatgccctag

SEQ ID NO: 150457 - DNA, 531 bp, synthetic construct
  misc_feature 1..531: note = Description of Artificial Sequence: Synthetic coding sequence
  source 1..531: mol_type = other DNA
atggccagcagcagtggaaatgatgatgacctgaccatcccccgggccgccatcaacaagatgatcaaggagaccctgcccaacgtgcgggtggccaatgatgcccgggagctggtggtgaactgctgcacagagttcatccacctgatcagcagcgaggccaatgagatctgcaacaagtctgagaagaagaccatcagccctgagcacgtgatccaggccctggagagcctgggcttcggcagctacatcagcgaggtgaaggaggtgctgcaggagtgcaagacagtggccctgaagaggaggaaggccagcagccggctggagaacctgggcatccctgaggaggagctgctgcggcagcagcaggagctgtttgccaaggcccggcagcagcaggccgagctggcccagcaggagtggctgcagatgcagcaggccgcccagcaggcccagctggccgccgccagcgccagcgccagcaaccaggccggcagcagccaggatgaagaagatgatgatgacatctag

SEQ ID NO: 150458 - DNA, 531 bp, synthetic construct; identical to SEQ ID NO: 150457
  misc_feature 1..531: note = Description of Artificial Sequence: Synthetic coding sequence
  source 1..531: mol_type = other DNA

SEQ ID NO: 150459 - DNA, 1470 bp, synthetic construct
  misc_feature 1..1470: note = Description of Artificial Sequence: Synthetic coding sequence
  source 1..1470: mol_type = other DNA
atggagagcatgttcagcagccctgctgaggccgccctgcagcgggagactggagtgcccggcctgctgacccccctgcctgacctggatggagtgtatgagctggagcgggtggccggctttgtgcgggacctgggctgtgagcgggtggccctgcagttcccagaccagctgctgggagatgctgtggccgtggccgcccggctggaggagaccaccggcagcaagatgttcatcctgggggacacagcctacggcagctgctgcgtggatgtgctgggcgctgagcaggccggggcccaggccctgatccacttcggccctgcctgcctgagccccccagcccggcccctgcctgtggcctttgtgctgcggcagaggtctgtggccctggagctgtgtgtgaaggcctttgaggcccagaacccagaccccaaggcccctgtggtgctgctgtctgagcccgcctgtgcccacgccctggaggccctggccaccctgctgcggccccgctacctggacctgctggtgagcagccctgccttcccccagcctgtgggcagcctgagccctgagcccatgcccctggagagatttggaagacgcttccccctggcccctggaagaaggctggaggagtatggagccttctacgtgggcggcagcaaggccagcccagaccctgacctggaccctgacctgagccggctgctgctgggctgggcccctggccagcccttcagcagctgctgcccagacaccgggaagacccaggatgaaggagcccgggccggccgcctgcgggcccggcggcgctacctggtggagcgggccagagatgcccgggtggtgggcctgctggccggcaccctgggcgtggcccagcaccgggaggccctggcccacctgaggaacctgacccaggccgccggcaagaggagctatgtgctggccctgggccggcccaccccagccaagctggccaacttccctgaggtggatgtgtttgtgctgctggcctgccccctgggcgccctggccccccagctgagcggcagcttcttccagcccatcctggccccctgtgagctggaggccgcctgcaacccagcctggcccccacctggcctggccccccacctgacccactatgctgacctgctgcccggcagccccttccacgtggccctgcccccacctgagagcgagctgtgggagaccccagatgtgtccctcatcaccggggacctgcggcccccaccagcctggaagagcagcaatgaccacggcagcctggccctgaccccccggccccagctggagctggccgagagcagccctgctgccagcttcctgagcagccgctcctggcagggcctggagccccggctgggccagacccctgtgacagaggccgtgtctggccggcggggcatcgccatcgcctatgaagatgagggcagcggctag

SEQ ID NO: 150460 - DNA, 786 bp, synthetic construct
  misc_feature 1..786: note = Description of Artificial Sequence: Synthetic coding sequence
  source 1..786: mol_type = other DNA
atggagagcatgttcagcagccctgctgaggccgccctgcagcgggagactggagtgcccggcctgctgacccccctgcctgacctggatggagtgtatgagctggagcgggtggccggctttgtgcgggacctgggctgtgagcgggtggccctgcagttcccagaccagctgctgggagatgctgtggccgtggccgcccggctggaggagaccaccggcagcaagatgttcatcctgggggacacagcctacggcagctgctgcgtggatgtgctgggcgctgagcaggccggggcccaggccctgatccacttcggccctgcctgcctgagccccccagcccggcccctgcctgtggcctttgtgctgcggcagaggtctgtggccctggagctgtgtgtgaaggcctttgaggcccagaacccagaccccaaggcccctgtggtgctgctgtctgagcccgcctgtgcccacgccctgggcagccccttccacgtggccctgcccccacctgagagcgagctgtgggagaccccagatgtgtccctcatcaccggggacctgcggcccccaccagcctggaagagcagcaatgaccacggcagcctggccctgaccccccggccccagctggagctggccgagagcagccctgctgccagcttcctgagcagccgctcctggcagggcctggagccccggctgggccagacccctgtgacagaggccgtgtctggccggcggggcatcgccatcgcctatgaagatgagggcagcggctag

SEQ ID NO: 150461 - DNA, 1065 bp, synthetic construct
  misc_feature 1..1065: note = Description of Artificial Sequence: Synthetic coding sequence
  source 1..1065: mol_type = other DNA
atgctgtggctgtggctgcatgactggaggcggcggcagggccagcgctgcagcttctgggtgacccagcccacagctgaggccctggccaccctgctgcggccccgctacctggacctgctggtgagcagccctgccttcccccagcctgtgggcagcctgagccctgagcccatgcccctggagcgcttcggccgccgcttccccctggcccctggccggcggctggaggagtatggagccttctacgtgggcggcagcaaggccagcccagaccctgacctggaccctgacctgagccggctgctgctgggctgggcccctggccagcccttcagcagctgctgcccagacaccgggaagacccaggatgagggcgcccgggccggccgcctgcgggcccggcggcgctacctggtggagcgggccagagatgcccgggtggtgggcctgctggccggcaccctgggcgtggcccagcaccgggaggccctggcccacctgaggaacctgacccaggccgccggcaagaggagctatgtgctggccctgggccggcccaccccagccaagctggccaacttccctgaggtggatgtgtttgtgctgctggcctgccccctgggcgccctggccccccagctgagcggcagcttcttccagcccatcctggccccctgtgagctggaggccgcctgcaacccagcctggcccccacctggcctggccccccacctgacccactacgccgacctgctgcccggcagccccttccacgtggccctgcccccacctgagagcgagctgtgggagaccccagatgtgtccctcatcactggagacctgcggcccccaccagcctggaagagcagcaatgaccacggcagcctggccctgaccccccggccccagctggagctggccgagagcagccctgctgccagcttcctgagcagccgctcctggcagggcctggagccccggctgggccagacccctgtgacagaagctgtgtctggaagaagaggcatcgccatcgcctatgaagatgagggcagcggctag

SEQ ID NO: 150462 - DNA, 174 bp, synthetic construct
  misc_feature 1..174: note = Description of Artificial Sequence: Synthetic coding sequence
  source 1..174: mol_type = other DNA
atggctgtgttccatgatgaggtggagattgaggacttccagtatgatgaagattctgagacctacttctacccctgcccctgtggggacaacttcagcatcaccaaggaccagtttgtgtgtggggagaccgtgcctgcccccagcgccaacaaggagctggtgaagtgctag

SEQ ID NO: 150463 - DNA, 249 bp, synthetic construct
  misc_feature 1..249: note = Description of Artificial Sequence: Synthetic coding sequence
  source 1..249: mol_type = other DNA
atggctgtgttccatgatgaggtggagattgaggacttccagtatgatgaagattctgagacctacttctacccctgcccctgtggggacaacttcagcatcaccaaggaggacctggagaatggagaagatgtggccacctgccccagctgcagcctcatcatcaaggtgatctatgacaaggaccagtttgtgtgtggggagaccgtgcctgcccccagcgccaacaaggagctggtgaagtgctag

SEQ ID NO: 150464 - DNA, 855 bp, synthetic construct
  misc_feature 1..855: note = Description of Artificial Sequence: Synthetic coding sequence
  source 1..855: mol_type = other DNA
atgctgtacctgattggcctgggcctgggagatgccaaggacatcaccgtgaagggcctggaggtggtgcggcgctgcagccgggtgtacctggaggcctacacctctgtgctgactgtgggcaaggaggccctggaggagttctacggcaggaagctggtggtggccgaccgggaggaggtggagcaggaggccgacaacatcctgaaggatgctgacatcagtgatgtggccttcctggtggtgggggacccctttggagccaccacccacagcgacctggtgctgcgggccaccaagctgggcatcccctacagagtcatccacaatgccagcatcatgaatgctgtgggctgctgcggcctgcagctgtacaagtttggagagaccgtgtccatcgtgttctggacagacacctggaggcctgagagcttctttgacaaggtgaagaagaaccggcagaatggcatgcacaccctgtgcctgctggacatcaaggtgaaggagcagagcctggagaacctgatcaagggcaggaagatctatgagcccccacgctacatgtctgtgaaccaggccgcccagcagctgctggagatcgtgcagaaccagaggatccggggggaggagcctgtgacagaggagaccctgtgtgtgggcctggcccgggtgggcgcagatgaccagaagattgctgctggcaccctgcggcagatgtgcaccgtggacctgggggagcccctgcacagcctcatcatcaccggcggcagcatccaccccatggagatggagatgctgagcctcttcagcatccctgagaacagcagcgagagccagagcatcaatggcctgtag

SEQ ID NO: 150465 - DNA, 858 bp, synthetic construct
  misc_feature 1..858: note = Description of Artificial Sequence: Synthetic coding sequence
  source 1..858: mol_type = other DNA
atgctgtacctgattggcctgggcctgggagatgccaaggacatcaccgtgaagggcctggaggtggtgcggcgctgcagccgggtgtacctggaggcctacacctctgtgctgactgtgggcaaggaggccctggaggagttctacggcaggaagctggtggtggccgaccgggaggaggtggagcaggaggccgacaacatcctgaaggatgctgacatcagtgatgtggccttcctggtggtgggggacccctttggagccaccacccacagcgacctggtgctgcgggccaccaagctgggcatcccctacagagtcatccacaatgccagcatcatgaatgctgtgggctgctgcggcctgcagctgtacaagtttggagagaccgtgtccatcgtgttctggacagacacctggaggcctgagagcttctttgacaaggtgaagaagaaccggcagaatggcatgcacaccctgtgcctgctggacatcaaggtgaaggagcagagcctggagaacctgatcaagggcaggaagatctatgagcccccacgctacatgtctgtgaaccaggccgcccagcagctgctggagatcgtgcagaaccagaggatccggggggaggagcctgctgtgacagaggagaccctgtgtgtgggcctggcccgggtgggcgcagatgaccagaagattgctgctggcaccctgcggcagatgtgcaccgtggacctgggggagcccctgcacagcctcatcatcactggaggcagcatccaccccatggagatggagatgctgagcctcttcagcatccctgagaacagcagcgagagccagagcatcaatggcctgtag

SEQ ID NO: 150466 - DNA, 705 bp, synthetic construct
  misc_feature 1..705: note = Description of Artificial Sequence: Synthetic coding sequence
  source 1..705: mol_type = other DNA
atgctgtacctgattggcctgggcctgggagatgccaaggacatcaccgtgaagggcctggaggtggtgcggcgctgcagccgggtgtacctggaggcctacacctctgtgctgactgtgggcaaggaggccctggaggagttctacggcaggaagctggtggtggccgaccgggaggaggtggagcaggaggccgacaacatcctgaaggatgctgacatcagtgatgtggccttcctggtggtgggggaccccacagacacctggaggcctgagagcttctttgacaaggtgaagaagaaccggcagaatggcatgcacaccctgtgcctgctggacatcaaggtgaaggagcagagcctggagaacctgatcaagggcaggaagatctatgagcccccacgctacatgtctgtgaaccaggccgcccagcagctgctggagatcgtgcagaaccagaggatccggggggaggagcctgctgtgacagaggagaccctgtgtgtgggcctggcccgggtgggcgcagatgaccagaagattgctgctggcaccctgcggcagatgtgcaccgtggacctgggggagcccctgcacagcctcatcatcaccggcggcagcatccaccccatggagatggagatgctgagcctcttcagcatccctgagaacagcagcgagagccagagcatcaatggcctgtag

SEQ ID NO: 150467 - DNA, 141 bp, synthetic construct
  misc_feature 1..141: note = Description of Artificial Sequence: Synthetic coding sequence
  source 1..141: mol_type = other DNA
atgtgcaccgtggacctgggggagcccctgcacagcctcatcatcaccggcggcagcatccaccccatggagatggagatgctgagcctcttcagcatccctgagaacagcagcgagagccagagcatcaatggcctgtag

SEQ ID NO: 150468 - DNA, 855 bp, synthetic construct
  misc_feature 1..855: note = Description of Artificial Sequence: Synthetic coding sequence
  source 1..855: mol_type = other DNA
atgctgtacctgattggcctgggcctgggagatgccaaggacatcaccgtgaagggcctggaggtggtgcggcgctgcagccgggtgtacctggaggcctacacctctgtgctgactgtgggcaaggaggccctggaggagttctacggcaggaagctggtggtggccgaccgggaggaggtggagcaggaggccgacaacatcctgaaggatgctgacatcagtgatgtggccttcctggtggtgggggacccctttggagccaccacccacagcgacctggtgctgcgggccaccaagctgggcatcccctacagagtcatccacaatgccagcatcatgaatgctgtgggctgctgcggcctgcagtacatcagcctggagcggcagttcctgctcttcttcggccagaccctgggccctgagagcttctttgacaaggtgaagaagaaccggcagaatggcatgcacaccctgtgcctgctggacatcaaggtgaaggagcagagcctggagaacctgatcaagggcaggaagatctatgagcccccacgctacatgtctgtgaaccaggccgcccagcagctgctggagatcgtgcagaaccagaggatccggggggaggagcctgctgtgacagaggagaccctgtgtgtgggcctggcccgggtgggcgcagatgaccagaagattgctgctggcaccctgcggcagatgtgcaccgtggacctgggggagcccctgcacagcctcatcatcaccggcggcagcatccaccccatggagatggagatgctgagcctcttcagcatccctgagaacagcagcgagagccagagcatcaatggcctgtag

SEQ ID NO: 150469 - DNA, 858 bp, synthetic construct; identical to SEQ ID NO: 150465
  misc_feature 1..858: note = Description of Artificial Sequence: Synthetic coding sequence
  source 1..858: mol_type = other DNA

SEQ ID NO: 150470 - DNA, 2028 bp, synthetic construct
  misc_feature 1..2028: note = Description of Artificial Sequence: Synthetic coding sequence
  source 1..2028: mol_type = other DNA
atggagggccggcccccacctgagggccggcccccaccccggcccaggacaggccgggccccccggggcagaagaagagctgtgtttgctgctgtgctgcactggagccacatcacccacctgtttgaaaatgacagacacttcagccacctgagcaccctggagcgggagatggccttcagaacagagatgggcctgtactacagctacttcaagaccatcgtggaggcccccagcttcctgaatggagtgtggatgatcatgaatgacaagctgacagagtaccccctggtgatcaacaccctgaagcgcttcaacctgtacccagaggtgatcctggcctcctggtaccgcatctacaccaagatcatggacctgattggcatccagaccaagatctgctggacagtgaccagaggagagggcctgagccccatcgagagctgtgagggcctgggggaccctgcctgcttctacgtggccgtcatcttcatcctgaatggcctgatgatggccctcttcttcatctacggcacctacctgagcggcagccggctgggcggcctggtgacagtgctgtgcttcttcttcaaccacggagaatgtaccagggtgatgtggaccccacccctgcgggagagcttctcctaccccttcctggtgctgcagatgctgctggtgacccacatcctgcgggccaccaagctgtaccggggcagcctcatcgccctgtgcatcagcaatgtgttcttcatgctgccctggcagtttgcccagtttgtgctgctgacccagatcgccagcctgtttgctgtgtatgtggtgggctacatcgacatctgcaagctgaggaagatcatctacatccacatgatcagcctggccctgtgctttgtgctgatgtttggaaacagcatgctgctgaccagctactatgccagcagcctggtgatcatctggggcatcctggccatgaagccccacttcctgaagatcaacgtgtctgagctgagcctgtgggtgatccagggctgcttctggctgtttggaacagtcatcctgaagtacctgaccagcaagatcttcggcattgctgatgatgcccacatcggcaacctgctgaccagcaagttcttctcctacaaggactttgacaccctgctgtacacctgtgccgctgagtttgacttcatggagaaggagacccccctgcgctacaccaagaccctgctgctgcctgtggtgctggtggtgtttgtggccatcgtgaggaagatcatcagtgacatgtggggcgtgctggccaagcagcagacccacgtgaggaagcaccagtttgaccacggggagctggtgtaccacgccctgcagctgctggcctacacagccctgggcatcctgatcatgaggctgaagctgttcctgaccccccacatgtgtgtgatggccagcctcatctgcagccggcagctgtttggctggctgttctgcaaggtgcaccctggggccatcgtgtttgccatcctggccgccatgagcatccagggcagcgccaacctgcagacccagtggaacatcgtgggggagttcagcaacctgccccaggaggagctgattgagtggatcaagtacagcaccaagccagatgctgtgtttgctggggccatgcccaccatggcctctgtgaagctgagcgccctgcggcccatcgtgaaccacccccactatgaagatgctggcctgcgggcccggaccaagatcgtgtacagcatgtacagcaggaaggctgctgaggaggtgaagcgggagctgatcaagctgaaggtgaactactacatcctggaggagagctggtgtgtgagaagaagcaagccaggctgcagcatgcctgagatctgggatgtggaggaccctgccaatgccggcaagacccccctgtgcaacctgctggtgaaggacagcaagccccacttcaccaccgtcttccagaacagcgtgtacaaggtgctggaggtggtgaaggagtag

SEQ ID NO: 150471 - DNA, 258 bp, synthetic construct
  misc_feature 1..258: note = Description of Artificial Sequence: Synthetic coding sequence
  source 1..258: mol_type = other DNA
atgtacagcaggaaggctgctgaggaggtgaagcgggagctgatcaagctgaaggtgaactactacatcctggaggagagctggtgtgtgagaagaagcaagccaggctgcagcatgcctgagatctgggatgtggaggaccctgccaatgccggcaagacccccctgtgcaacctgctggtgaaggacagcaagccccacttcaccaccgtcttccagaacagcgtgtacaaggtgctggaggtggtgaaggagtag

SEQ ID NO: 150472 - DNA, 2277 bp, synthetic construct
  misc_feature 1..2277: note = Description of Artificial Sequence: Synthetic coding sequence
  source 1..2277: mol_type = other DNA
atgaggaagcagggcgtgagcagcaagaggctgcagagcagcggccgcagccagagcaagggccggcggggggccagcctggcccgggagcctgaggtggaggaggagatggagaagagcgccctgggcggcggcaagctgccccggggctcctggaggagcagccctggccgcatccagagcctgaaggagaggaagggcctggagctggaggtggtggccaagaccttcctgctgggccccttccagtttgtgaggaacagcctggcccagctgcgggagaaggtgcaggagctgcaggcccggcgcttcagcagcaggaccaccctgggcattgctgtgtttgtggccatcctgcactggctgcacctggtgaccctgtttgaaaatgacagacacttcagccacctgagcagcctggagcgggagatgaccttcagaacagagatgggcctgtactacagctacttcaagaccatcatcgaggcccccagcttcctggagggcctgtggatgatcatgaatgaccggctgacagagtaccccctcatcatcaatgccatcaagcgcttccacctgtacccagaggtgatcatcgcctcctggtactgcaccttcatgggcatcatgaacctgtttggcctggagaccaagacctgctggaatgtgacccgcatcgagcccctgaatgaggtgcagagctgtgagggcctgggggaccctgcctgcttctacgtgggcgtcatcttcatcctgaatggcctgatgatgggcctcttcttcatgtatggagcctacctgagcggcacccagctgggcggcctcatcaccgtgctgtgcttcttcttcaaccacggggaggccaccagggtgatgtggaccccacccctgcgggagagcttctcctaccccttcctggtgctgcagatgtgcatcctgaccctcatcctgcggaccagcagcaatgaccggcggcccttcatcgccctgtgcctgagcaatgtggccttcatgctgccctggcagtttgcccagttcatcctcttcacccagatcgccagcctcttccccatgtatgtggtgggctacatcgagcccagcaagttccagaagatcatctacatgaacatgatctctgtgaccctgtccttcatcctgatgtttggaaacagcatgtacctgagcagctactacagcagcagcctgctgatgacctgggccatcatcctgaagagaaatgagatccagaagctgggcgtgtccaagctgaacttctggctgatccagggcagcgcctggtggtgtggcaccatcatcctgaagttcctgaccagcaagatcctgggcgtgtctgaccacatccggctgagtgacctgattgctgcccgcatcctgcgctacacagactttgacaccctcatctacacctgtgcccctgagtttgacttcatggagaaggccacccccctgcgctacaccaagaccctgctgctgcctgtggtgatggtgatcacctgcttcatcttcaagaagacagtgcgggacatctcctatgtgctggccaccaacatctacctgaggaagcagctgctggagcacagcgagctggccttccacaccctgcagctgctggtgttcaccgccctggccatcctgatcatgaggctgaagatgttcctgaccccccacatgtgtgtgatggccagcctcatctgcagccggcagctgtttggctggctgttccggcgggtgcgctttgagaaggtgatcttcggcatcctgactgtgatgagcatccagggctacgccaacctgaggaaccagtggagcatcatcggggagttcaacaacctgccccaggaggagctgctgcagtggatcaagtacagcaccaccagtgatgctgtgtttgctggggccatgcccaccatggccagcatcaagctgagcaccctgcaccccatcgtgaaccacccccactatgaagatgctgacctgcgggcccggaccaagatcgtgtacagcacctacagcaggaagagcgccaaggaggtgcgggacaagctgctggagctgcacgtgaactactacgtgctggaggaggcctggtgtgtggtgaggaccaagccaggctgcagcatgctggagatctgggatgtggaggaccccagcaatgctgccaacccccccctgtgcagcgtgctgctggaggatgcccggccctacttcaccaccgtcttccagaacagcgtgtacagagtgctgaaggtgaactag

SEQ ID NO: 150473 - DNA, 618 bp, synthetic construct
  misc_feature 1..618: note = Description of Artificial Sequence: Synthetic coding sequence
  source 1..618: mol_type = other DNA
atgaggctgaagatgttcctgaccccccacatgtgtgtgatggccagcctcatctgcagccggcagctgtttggctggctgttcagaagagtgcgctttgagaaggtgatcttcggcatcctgactgtgatgagcatccagggctacgccaacctgaggaaccagtggagcatcattggagagttcaacaacctgccccaggaggagctgctgcagtggatcaagtacagcaccaccagtgatgctgtgtttgctggggccatgcccaccatggccagcatcaagctgagcaccctgcaccccatcgtgaaccacccccactatgaagatgctgacctgcgggcccggaccaagatcgtgtacagcacctacagcaggaagagcgccaaggaggtgcgggacaagctgctggagctgcacgtgaactactacgtgctggaggaggcctggtgtgtggtgaggaccaagccaggctgcagcatgctggagatctgggatgtggaggaccccagcaatgctgccaacccccccctgtgcagcgtgctgctggaggatgcccggccctacttcaccaccgtcttccagaacagcgtgtacagagtgctgaaggtgaactag

SEQ ID NO: 150474 - DNA, 273 bp, synthetic construct
  misc_feature 1..273: note = Description of Artificial Sequence: Synthetic coding sequence
  source 1..273: mol_type = other DNA
atgaggaagcagggcgtgagcagcaagaggctgcagagcagcggccgcagccagagcaagggccggcggggggccagcctggcccgggagcctgaggtggaggaggagatggagaagagcgccctgggcggcggcaagctgccccggggctcctggaggagcagccctggccgcatccagagcctgaaggagaggaagggcctggagctggaggtggtggccaagaccttcctgctgggccccttccagtttgtgaggaacagcctggcctag

SEQ ID NO: 150475 - DNA, 1629 bp, synthetic construct
  misc_feature 1..1629: note = Description of Artificial Sequence: Synthetic coding sequence
  source 1..1629: mol_type = other DNA
atgatgagcatccggcagaggcgggagatccgggccacagaggtgtctgaggacttccctgcccaggaggagaatgtgaagctggagaacaagctgcccagcggctgcaccagccggcggctgtggaagatcctgagcctgaccatcggcggcaccatcgccctgtgcatcggcctgctgacctctgtgtacctggccaccctgcatgaaaatgacctgtggttcagcaacatcaaggaggtggagcgggagatctccttcagaacagaatgtggcctgtactacagctactacaagcagatgctgcaggcccccaccctggtgcagggcttccacggcctcatctatgacaacaagacagagagcatgaagaccatcaacctgctgcagaggatgaacatctaccaggaggtgttcctgagcatcctgtacagagtgctgcccatccagaagtacctggagcctgtgtacttctacatctacaccctgtttggcctgcaggccatctacgtgacagccctgtacatcacctcctggctgctgagcggcacctggctgagcggcctgctggccgccttctggtacgtgaccaacagaattgacaccaccagggtggagttcaccatccccctgcgggagaactgggccctgcccttctttgccatccagattgctgccatcacctacttcctgcggcccaacctgcagcccctgtctgagcggctgaccctgctggccatcttcatcagcaccttcctgttcagcctgacctggcagttcaaccagttcatgatgctgatgcaggccctggtgctcttcaccctggacagcctggacatgctgcctgctgtgaaggccacctggctgtatggcatccagatcaccagcctgctgctggtgtgcatcctgcagttcttcaacagcatgatcctgggcagcctgctgatctccttcaacctgtctgtgttcatcgccaggaagctgcagaagaacctgaagacaggcagcttcctgaaccggctgggcaagctgctgctgcacctgttcatggtgctgtgcctgaccctcttcctgaacaacatcatcaagaagatcctgaacctgaagagtgatgagcacatcttcaagttcctgaaggccaagtttggcctgggcgccacccgggactttgatgccaacctgtacctgtgtgaggaggccttcggcctgctgcccttcaacaccttcggccgcctgagtgacaccctgctcttctacgcctacatctttgtgctgagcatcaccgtcatcgtggcctttgtggtggccttccacaacctgagtgacagcaccaaccagcagagcgtgggcaagatggagaagggcaccgtggacctgaagccagagacagcctacaacctgatccacaccatcctgtttggcttcctggccctgagcaccatgaggatgaagtacctgtggaccagccacatgtgtgtgtttgccagctttggcctgtgcagccctgagatctgggagctgctgctgaagtctgtgcacctgtacaaccccaagaggatctgcatcatgagatacagcgtgcccatcctgatcctgctgtacctgtgctacaagaaccagaagagctag

SEQ ID NO: 150476 - DNA, 2151 bp, synthetic construct
  misc_feature 1..2151: note = Description of Artificial Sequence: Synthetic coding sequence
  source 1..2151: mol_type = other DNA
atgatgagcatccggcagaggcgggagatccgggccacagaggtgtctgaggacttccctgcccaggaggagaatgtgaagctggagaacaagctgcccagcggctgcaccagccggcggctgtggaagatcctgagcctgaccatcggcggcaccatcgccctgtgcatcggcctgctgacctctgtgtacctggccaccctgcatgaaaatgacctgtggttcagcaacatcaaggaggtggagcgggagatctccttcagaacagaatgtggcctgtactacagctactacaagcagatgctgcaggcccccaccctggtgcagggcttccacggcctcatctatgacaacaagacagagagcatgaagaccatcaacctgctgcagaggatgaacatctaccaggaggtgttcctgagcatcctgtacagagtgctgcccatccagaagtacctggagcctgtgtacttctacatctacaccctgtttggcctgcaggccatctacgtgacagccctgtacatcacctcctggctgctgagcggcacctggctgagcggcctgctggccgccttctggtacgtgaccaacagaattgacaccaccagggtggagttcaccatccccctgcgggagaactgggccctgcccttctttgccatccagattgctgccatcacctacttcctgcggcccaacctgcagcccctgtctgagcggctgaccctgctggccatcttcatcagcaccttcctgttcagcctgacctggcagttcaaccagttcatgatgctgatgcaggccctggtgctcttcaccctggacagcctggacatgctgcctgctgtgaaggccacctggctgtatggcatccagatcaccagcctgctgctggtgtgcatcctgcagttcttcaacagcatgatcctgggcagcctgctgatctccttcaacctgtctgtgttcatcgccaggaagctgcagaagaacctgaagacaggcagcttcctgaaccggctgggcaagctgctgctgcacctgttcatggtgctgtgcctgaccctcttcctgaacaacatcatcaagaagatcctgaacctgaagagtgatgagcacatcttcaagttcctgaaggccaagtttggcctgggcgccacccgggactttgatgccaacctgtacctgtgtgaggaggccttcggcctgctgcccttcaacaccttcggccgcctgagtgacaccctgctcttctacgcctacatctttgtgctgagcatcaccgtcatcgtggcctttgtggtggccttccacaacctgagtgacagcaccaaccagcagagcgtgggcaagatggagaagggcaccgtggacctgaagccagagacagcctacaacctgatccacaccatcctgtttggcttcctggccctgagcaccatgaggatgaagtacctgtggaccagccacatgtgtgtgtttgccagctttggcctgtgcagccctgagatctgggagctgctgctgaagtctgtgcacctgtacaaccccaagaggatctgcatcatgagatacagcgtgcccatcctgatcctgctgtacctgtgctacaagttctggccaggcatgatggatgagctgtctgagctgcgggagttctatgaccctgacacagtggagctgatgaactggatcaacagcaacacccccaggaaggctgtgtttgctggctccatgcagctgctggccggcgtgaagctgtgcaccggccgcaccctgaccaaccacccccactatgaggacagcagcctgcgggagaggaccagggctgtgtaccagatctatgccaagagggcccctgaggaggtgcacgccctgctgcggagctttggaacagattatgtgatcctggaggacagcatctgctatgaaagaagacaccggcggggctgccgcctgcgggacctgctggacatcgccaacggccacatgatggatggccctggagaaaatgaccctgacctgaagccagctgaccacccccgcttctgtgaggagatcaagaggaacctgcccccctacgtggcctacttcaccagggtcttccagaacaagaccttccacgtgtacaagctgagcaggaacaagtag

SEQ ID NO: 150477 - DNA, 342 bp, synthetic construct
  misc_feature 1..342: note = Description of Artificial Sequence: Synthetic coding sequence
  source 1..342: mol_type = other DNA
atgatgagcatccggcagaggcgggagatccgggccacagaggtgtctgaggacttccctgcccaggaggagaatgtgaagctggagaacaagctgcccagcggctgcaccagccggcggctgtggaagatcctgagcctgaccatcggcggcaccctgccctttgccctggacttcctgcacctgagcaccctgccccgctacatgaagatgatctacggcttcctgatcctgaggaagtggagcgagaagagccacagcgagcagagcgtggcctgcatcacccccaccaccagccgctgctgccgcctgcagcccagctgcaaggtgttcatggcctag

SEQ ID NO: 150478 - DNA, 2151 bp, synthetic construct; identical to SEQ ID NO: 150476
  misc_feature 1..2151: note = Description of Artificial Sequence: Synthetic coding sequence
  source 1..2151: mol_type = other DNA

SEQ ID NO: 150479 - DNA, 2172 bp, synthetic construct
  misc_feature 1..2172: note = Description of Artificial Sequence: Synthetic coding sequence
  source 1..2172: mol_type = other DNA
atggccgaggaggagggcccccctgtggagctgcggcagaggaagaagcccaagagcagcgagaacaaggagagcgccaaggaggagaagatcagtgacatccccatccctgagcgggcccccaagcacgtgctcttccagagatttgccaagatcttcatcggctgcctggccgctgtgaccagcggcatgatgtatgccctgtacctgagcgcctaccacgagaggaagttctggttcagcaaccggcaggagctggagcgggagatcaccttccagggcgacagcgccatctactacagctactacaaggacatgctgaaggcccccagctttgagcggggcgtgtatgagctgacccacaacaacaagacagtgtccctgaagaccatcaatgctgtgcagcagatgagcctgtacccagagctgattgccagcatcctgtaccaggccaccggcagcaatgagatcatcgagcctgtgtacttctacatcggcatcgtgtttggcctgcagggcatctacgtgacagccctgtttgtgacctcctggctgatgagcggcacctggctggccggcatgctgactgtggcctggtttgtgatcaacagagtggacaccacccgcatcgagtacagcatccccctgcgggagaactgggccctgccctactttgcctgccagattgctgccctgaccggctacctgaagagcaacctgaacacctatggagagcgcttctgctacctgctgatgtctgccagcacctacaccttcatgatgatgtgggagtacagccactacctgctcttcctgcaggccatcagcctcttcctgctggacaccttctctgtggagcagagcgacaaggtgtatgaggtgtacaagatctacatcttcagcctcttcctgggctacctgctgcagtttgaaaatcctgccctgctggtgagccccctgctgagcctggtggccgccctgatgctggccaagtgcctgcagctgaatgtgaagaagggcagctttgtggccaagatcatcaaggtgatcaacttctacctggtgtgcaccctgaccatcaccctgaacatcatcatgaagatgtttgtgccccacaaggaaaatggccacatgctgaagttcctggaggtgaagtttggcctgaacatgaccaagaacttcaccatgaactggctgctgtgccaggagagcctgcaggcccccagccaggacttcttcctgcggctgacccagagcagcctgctgcccttctacatcctggtgctgatcatctgcttcctgtccatgctgcaggtgatcttccgccgcatcaatggcaagagcctgaaggagaccgtgaccctggaggatggccgcatcggggagaggcctgagatcatctaccacgtgatccacaccatcctgctgggcagcctggccatggtgattgagggcctgaagtacatctggatcccctacgtgtgcatgctggccgccttcggcgtgtgcagccctgagctgtggatgaccctcttcaagtggctgcggctgaggacagtgcaccccatcctgctggccctgatcctgtccatggctgtgcccaccatcatcggcctgagcctgtggaaggagttcttcccccggctgatgacagagctgatggagctgcaggagttctatgaccctgacacagtggagctgatgacctggatcaagaggcaggcccctgtggccgctgtgtttgctggcagcccccagctgatgggcgccatcaagctgtgcaccggctggatggtgaccagcctgcccctgtacaatgatgatgacctgctgaagagaaatgaaaacatctaccagatctacagcaagaggtctgctgaggacatctacaagatcctgaccagctacaaggccaactacctgattgtggaggatgccatctgcaatgaggtgggccccatgaggggctgccgggtgaaggacctgctggacatcgccaacggccacatggtgtgtgaggagggggacaagctgacctacagcaaatatggccgcttctgccacgaggtgaagatcaactacagcccctacgtgaactacttcaccagggtgtactggaacagaagctactttgtgtacaagatcaacacagtcatctccttccagagctag

SEQ ID NO: 150480 - DNA, 300 bp, synthetic construct
  misc_feature 1..300: note = Description of Artificial Sequence: Synthetic coding sequence
  source 1..300: mol_type = other DNA
atggagcctgagcagatgctggagggccagacccaggtggccgagaacccccacagtgaatatggcctgacagacaacgtggagcgcatcgtggagaatgagaagatcaatgctgagaagagcagcaagcagaaggtggacctgcagagcctgcccacccgggcctacctggaccagacagtggtgcccatcctgctgcagggcctggccgtgctggccaaggagaggcctcccaaccccatcgagttcctggccagctacctgctgaagaacaaggcccagtttgaggacaggaactag

SEQ ID NO: 150481 - DNA, 300 bp, synthetic construct; identical to SEQ ID NO: 150480
  misc_feature 1..300: note = Description of Artificial Sequence: Synthetic coding sequence
  source 1..300: mol_type = other DNA

SEQ ID NO: 150482 - DNA, 1956 bp, synthetic construct
  misc_feature 1..1956: note = Description of Artificial Sequence: Synthetic coding sequence
  source 1..1956: mol_type = other DNA
atggccggccacccctggcatggaacagctgccctggccagcagccaggcctggagagatggccgggagcggcaggccctggtgtcctgccgggccctgtacacctatgaagatggcagtgatgacctgaagctggccgccagcggggagggcggcctgcaggagctgagcggccactttgagaaccagaaggtgatgtatggcttctgcagcgtgaaggacagccaggccgccctgcccaagtatgtgctgatcaactgggtgggggaggatgtgcctgatgccaggaaatgtgcctgtgccagccacgtggccaaggtggccgagttcttccagggcgtggatgtgattgtgaatgccagctctgtggaggacattgatgctggggccatcggccagaggctgagcaatggcctggcccggctgagcagccctgtgctgcaccggctgcggctgcgggaggatgaaaatgctgagcctgtgggcaccacctaccagaagacagatgctgctgtggagatgaagaggatcaaccgggagcagttctgggagcaggccaagaaggaggaggagctgaggaaggaggaggagaggaagaaggccctggatgagcggctgcgctttgagcaggagaggatggagcaggagcggcaggagcaggaggagcgggagcggcgctaccgggagcgggagcagcagatcgaggagcacaggaggaagcagcagaccctggaggccgaggaggccaagaggcggctgaaggagcagagcatctttggagaccacagagatgaggaggaggagacccacatgaagaagtctgagagcgaggtggaggaggccgccgccatcatcgcccagaggccagacaacccccgggagttcttcaagcagcaggagcgggtggccagcgccagcgctggcagctgtgatgtgcccagccccttcaaccaccggcccggcagccacctggacagccacaggaggatggcccccacccccatccccaccaggagccccagcgacagcagcacagccagcacccctgtggccgagcagatcgagcgggccctggatgaggtgaccagcagccagcccccacccctgcccccacctcctcctccagcccaggagacccaggagcccagccccatcctggacagcgaggagaccagggctgctgccccccaggcctgggccggccccatggaggagcccccccaggcccaggccccaccccggggccctggcagccctgctgaggacctgatgttcatggagagcgctgagcaggccgtgctggccgcccctgtggagcccgccacagcagatgccacagagatccatgatgctgctgacaccattgaaacagacacagccacagctgacaccaccgtggccaacaacgtgcccccagctgccaccagcctgattgacctgtggccaggaaatggagagggcgccagcaccctgcagggcgagccccgggcccccaccccacccagcggcacagaggtgaccctggccgaggtgcccctgctggatgaggtggcccctgagcccctgctgcctgctggggagggctgtgccaccctgctgaactttgatgagctgcctgagcccccagccaccttctgtgaccctgaggaggtggagggggagagcctggccgccccccagacccccaccctgcccagcgccctggaggagctggagcaggagcaggagcctgagccccacctgctgaccaacggggagaccacccagaaggagggcacccaggccagcgagggctacttcagccagagccaggaggaggagtttgcccagagcgaggagctgtgtgccaaggcccctcctcctgtgttctacaacaagcccccagaaattgacatcacctgctgggatgctgaccctgtgcctgaggaggaggagggctttgaaggaggagactag

SEQ ID NO: 150483 - DNA, 1950 bp, synthetic construct
  misc_feature 1..1950: note = Description of Artificial Sequence: Synthetic coding sequence
  source 1..1950: mol_type = other DNA
atggccggcgtgtccttcagcggccaccggctggagctgctggccgcctatgaggaggtgatccgggaggagagcgctgctgactgggccctgtacacctatgaagatggcagtgatgacctgaagctggccgccagcggggagggcggcctgcaggagctgagcggccactttgagaaccagaaggtgatgtatggcttctgcagcgtgaaggacagccaggccgccctgcccaagtatgtgctgatcaactgggtgggggaggatgtgcctgatgccaggaaatgtgcctgtgccagccacgtggccaaggtggccgagttcttccagggcgtggatgtgattgtgaatgccagctctgtggaggacattgatgctggggccatcggccagaggctgagcaatggcctggcccggctgagcagccctgtgctgcaccggctgcggctgcgggaggatgaaaatgctgagcctgtgggcaccacctaccagaagacagatgctgctgtggagatgaagaggatcaaccgggagcagttctgggagcaggccaagaaggaggaggagctgaggaaggaggaggagaggaagaaggccctggatgagcggctgcgctttgagcaggagaggatggagcaggagcggcaggagcaggaggagcgggagcggcgctaccgggagcgggagcagcagatcgaggagcacaggaggaagcagcagaccctggaggccgaggaggccaagaggcggctgaaggagcagagcatctttggagaccacagagatgaggaggaggagacccacatgaagaagtctgagagcgaggtggaggaggccgccgccatcatcgcccagaggccagacaacccccgggagttcttcaagcagcaggagcgggtggccagcgccagcgctggcagctgtgatgtgcccagccccttcaaccaccggcccggcagccacctggacagccacaggaggatggcccccacccccatccccaccaggagccccagcgacagcagcacagccagcacccctgtggccgagcagatcgagcgggccctggatgaggtgaccagcagccagcccccacccctgcccccacctcctcctccagcccaggagacccaggagcccagccccatcctggacagcgaggagaccagggctgctgccccccaggcctgggccggccccatggaggagcccccccaggcccaggccccaccccggggccctggcagccctgctgaggacctgatgttcatggagagcgctgagcaggccgtgctggccgcccctgtggagcccgccacagcagatgccacagagatccatgatgctgctgacaccattgaaacagacacagccacagctgacaccaccgtggccaacaacgtgcccccagctgccaccagcctgattgacctgtggccaggaaatggagagggcgccagcaccctgcagggcgagccccgggcccccaccccacccagcggcacagaggtgaccctggccgaggtgcccctgctggatgaggtggcccctgagcccctgctgcctgctggggagggctgtgccaccctgctgaactttgatgagctgcctgagcccccagccaccttctgtgaccctgaggaggtggagggggagagcctggccgccccccagacccccaccctgcccagcgccctggaggagctggagcaggagcaggagcctgagccccacctgctgaccaacggggagaccacccagaaggagggcacccaggccagcgagggctacttcagccagagccaggaggaggagtttgcccagagcgaggagctgtgtgccaaggcccctcctcctgtgttctacaacaagcccccagaaattgacatcacctgctgggatgctgaccctgtgcctgaggaggaggagggctttgaaggaggagactag

SEQ ID NO: 150484 - DNA, 1146 bp, synthetic construct
  misc_feature 1..1146: note = Description of Artificial Sequence: Synthetic coding sequence
  source 1..1146: mol_type = other DNA
atgaagaagtctgagagcgaggtggaggaggccgccgccatcatcgcccagaggccagacaacccccgggagttcttcaagcagcaggagcgggtggccagcgccagcgctggcagctgtgatgtgcccagccccttcaaccaccggcccggcagccacctggacagccacaggaggatggcccccacccccatccccaccaggagccccagcgacagcagcacagccagcacccctgtggccgagcagatcgagcgggccctggatgaggtgaccagcagccagcccccacccctgcccccacctcctcctccagcccaggagacccaggagcccagccccatcctggacagcgaggagaccagggctgctgccccccaggcctgggccggccccatggaggagcccccccaggcccaggccccaccccggggccctggcagccctgctgaggacctgatgttcatggagagcgctgagcaggccgtgctggccgcccctgtggagcccgccacagcagatgccacagagatccatgatgctgctgacaccattgaaacagacacagccacagctgacaccaccgtggccaacaacgtgcccccagctgccaccagcctgattgacctgtggccaggaaatggagagggcgccagcaccctgcagggcgagccccgggcccccaccccacccagcggcacagaggtgaccctggccgaggtgcccctgctggatgaggtggcccctgagcccctgctgcctgctggggagggctgtgccaccctgctgaactttgatgagctgcctgagcccccagccaccttctgtgaccctgaggaggtggagggggagagcctggccgccccccagacccccaccctgcccagcgccctggaggagctggagcaggagcaggagcctgagccccacctgctgaccaacggggagaccacccagaaggagggcacccaggccagcgagggctacttcagccagagccaggaggaggagtttgcccagagcgaggagctgtgtgccaaggcccctcctcctgtgttctacaacaagcccccagaaattgacatcacctgctgggatgctgaccctgtgcctgaggaggaggagggctttgaaggaggagactag

SEQ ID NO: 150485 - DNA, 954 bp, synthetic construct
  misc_feature 1..954: note = Description of Artificial Sequence: Synthetic coding sequence
  source 1..954: mol_type = other DNA
atggccggcgtgtccttcagcggccaccggctggagctgctggccgcctatgaggaggtgatccgggaggagagcgctgctgactgggccctgtacacctatgaagatggcagtgatgacctgaagctggccgccagcggcggcggcctgcaggagctgagcggccactttgagaaccagaaggtgatgtatggcttctgcagcgtgaaggacagccaggccgccctgcccaagtatgtgctgatcaactgggtgggagaagatgtgcctgatgccaggaaatgtgcctgtgccagccacgtggccaaggtggccgagttcttccagggcgtggatgtgattgtgaatgccagctctgtggaggacattgatgctggggccatcggccagaggctgagcaatggcctggcccggctgagcagccctgtgctgcaccggctgcggctgagagaagatgaaaatgctgagcctgtgggcaccacctaccagaagacagatgctgctgtggagatgaagaggatcaaccgggagcagttctgggagcaggccaagaaggaggaggagctgaggaaggaggaggagaggaagaaggccctggatgagcggctgcgctttgagcaggagaggatggagcaggagcggcaggagcaggaggagcgggagcggcgctaccgggagcgggagcagcagatcgaggagcacaggaggaagcagcagaccctggaggccgaggaggccaagaggcggctgaaggagcagagcatctttggagaccacagagatgaggaggaggagacccacatgaagaagtctgagagcgaggtggaggaggccgccgccatcatcgcccagaggccagacaacccccgggagttcttcaagcagcaggagcgggtggccagcgccagcgctggcagctgtgatgtgcccagccccttcaaccaccggccctag

SEQ ID NO: 150486 - DNA, 375 bp, synthetic construct
  misc_feature 1..375: note = Description of Artificial Sequence: Synthetic coding sequence
  source 1..375: mol_type = other DNA
atggccggcgtgtccttcagcggccaccggctggagctgctggccgcctatgaggaggtgatccgggaggagagcgctgctgactgggccctgtacacctatgaagatggcagtgatgacctgaagctggccgccagcggggagggcggcctgcaggagctgagcggccactttgagaaccagaaggtgatgtatggcttctgcagcgtgaaggacagccaggccgccctgcccaagtatgtgctgatcaactgggtgggggaggatgtgcctgatgccaggaaatgtgcctgtgccagccacgtggccaaggtggccgagttcttccagggcgtggatgtgattgtgaatgccagctctgtggaggacatctag

SEQ ID NO: 150487 - DNA, 3900 bp, synthetic construct
  misc_feature 1..3900: note = Description of Artificial Sequence: Synthetic coding sequence
  source 1..3900: mol_type = other DNA
cacaggatgtccttccaccctggccggggctgcccccggggccggggcggccacggggcccggcccagcgcccccagcttccggccccagaacctgcggctgctgcacccccagcagccccctgtgcagtaccagtatgagccccccagcgcccccagcaccaccttcagcaacagccctgcccccaacttcctgccccccaggccagactttgtgcccttccccccacccatgcctccttctgcccagggccccctgcccccctgccccatccggccccccttccccaaccaccagatgaggcaccccttccctgtgcccccctgcttcccccccatgcccccacccatgccctgccccaacaacccccctgtgcctggggcccctcctggccagggcaccttccccttcatgatgcctcctccttccatgccccaccccccacctcctcctgtgatgccccagcaggtgaactaccagtacccacctggctacagccaccacaacttccccccacccagcttcaacagcttccagaacaaccccagcagcttcctgcccagcgccaacaacagcagcagcccccacttccgccacctgcccccctaccccctgcccaaggcccccagcgagcggcgcagccctgagcggctgaagcactatgatgaccaccgccaccgggaccacagccacggccgcggggagcggcacaggagcctggaccggcgggagcggggccgcagcccagacagaagacggcaggacagccgctacagaagtgactatgaccggggccgcacccccagccgccacaggagctatgaaagaagcagccgcagccccagccgggagaagaagagggcccgctgggaggaggagaaggaccgctggagcgacaaccagagcagcggcaaggacaagaactacaccagcatcaaggagaaggagcctgaggagaccatgccagacaagaatgaggaggaggaggaggagctgctgaagcctgtgtggatccgctgcacccacagcgagaactactacagcagtgaccccatggaccaggtgggggacagcacagtggtgggcaccagccggctgcgggacctgtatgacaagtttgaggaggagctgggcagccggcaggagaaggccaaggccgcccggcccccctgggagccccccaagaccaagctggatgaggacctggagagcagcagcgagagtgaatgtgagagtgatgaggacagcacctgcagcagcagcagtgacagcgaggtgtttgatgtgattgctgagatcaagaggaagaaggcccacccagaccggctgcatgatgagctgtggtacaatgaccccggccagatgaatgatggccccctgtgcaagtgcagcgccaaggcccggaggacaggcatccgccacagcatctacccaggagaggaggccatcaagccctgccggcccatgaccaacaatgccggccgcctcttccactaccgcatcaccgtgtccccacccaccaacttcctgacagaccggcccaccgtgattgaatatgatgaccacgagtacatctttgagggcttctccatgtttgcccacgcccccctgaccaacatccccctgtgcaaggtgatccgcttcaacatcgactacaccatccacttcatcgaggagatgatgcctgagaacttctgtgtgaagggcctggagctgttcagcctcttcctgttccgggacatcctggagctgtatgactggaacctgaagggccccctgtttgaggacagccccccctgctgcccccgcttccacttcatgcccaggtttgtgcgcttcctgcctgatggcggcaaggaggtgctgtccatgcaccagatcctgctgtacctgctgcgctgcagcaaggccctggtgcctgaggaggagatcgccaacatgctgcagtgggaggagctggagtggcagaagtatgcagaagaatgtaaaggcatgattgtgaccaaccctggcaccaagcccagctctgtgagaattgaccagctggaccgggagcagttcaacccagatgtgatcaccttccccatcatcgtgcacttcggcatccggcctgcccagctgtcctatgctggggacccccagtaccagaagctgtggaagagctatgtgaagctgcggcacctgctggccaacagccccaaggtgaagcagacagacaagcagaagctggcccagcgggaggaggccctgcagaagatccggcagaagaacaccatgaggcgggaggtgacagtggagctgagcagccagggcttctggaagacaggcatccgcagtgatgtgtgccagcacgccatgatgctgcctgtgctgacccaccacatccgctaccaccagtgcctgatgcacctggacaagctgattggctacaccttccaggaccgctgcctgctgcagctggccatgacccaccccagccaccacctgaactttggcatgaacccagaccacgccaggaacagcctgagcaactgtggcatccggcagcccaagtacggggacaggaaggtgcaccacatgcacatgaggaagaagggcatcaacaccctcatcaacatcatgagccggctgggccaggatgaccccacccccagccgcatcaaccacaatgaaaggctggagttcctgggagatgctgtggtggagttcctgacctctgtgcacctgtactacctgttccccagcctggaggagggcggcctggccacctacagaacagccatcgtgcagaaccagcacctggccatgctggccaagaagctggagctggaccgcttcatgctgtatgcccacggccctgacctgtgccgggagagtgacctgcggcatgccatggccaactgctttgaggccctgattggagctgtgtacctggagggcagcctggaggaggccaagcagctgtttggccgcctgctcttcaatgaccctgacctgcgggaggtgtggctgaactaccccctgcaccccctgcagctgcaggagcccaacacagaccggcagctgattgagaccagccctgtgctgcagaagctgacagaatttgaggaggccatcggggtcatcttcacccacgtgcggctgctggcccgggccttcaccctgaggacagtgggcttcaaccacctgaccctgggccacaaccagaggatggagttcctgggggacagcatcatgcagctggtggccacagagtacctgttcatccacttcccagaccaccacgagggccacctgaccctgctgcggagcagcctggtgaacaacagaacccaggccaaggtggccgaggagctgggcatgcaggagtatgccatcaccaatgacaagaccaagaggcctgtggccctgcggaccaagaccctggccgacctgctggagagcttcatcgccgccctgtacatcgacaaggacctggagtatgtgcacaccttcatgaatgtgtgcttcttcccccggctgaaggagttcatcctgaaccaggactggaatgaccccaagagccagctgcagcagtgctgcctgaccctgaggacagagggcaaggagccagacatccccctgtacaagaccctgcagacagtgggccccagccacgcccggacctacacagtggccgtgtacttcaagggggagcgcatcggctgtgggaagggccccagcatccagcaggccgagatgggcgccgccatggatgccctggagaagtacaacttcccccagatggcccaccagaagcgcttcattgaaaggaagtaccggcaggagctgaaggagatgcgctgggagcgggagcaccaggagcgggagccagatgaaacagaggacatcaagaagtag

SEQ ID NO: 150488 - DNA, 4125 bp, synthetic construct
  misc_feature 1..4125: note = Description of Artificial Sequence: Synthetic coding sequence
  source 1..4125: mol_type = other DNA
atgatgcagggcaacacctgccacaggatgtccttccaccctggccggggctgcccccggggccggggcggccatggagcccggcccagcgcccccagcttccggccccagaacctgcggctgctgcacccccagcagccccctgtgcagtaccagtatgagcccccatctgcccccagcaccaccttcagcaacagccctgcccccaacttcctgccccccaggccagactttgtgcccttccccccacccatgccacccagcgcccagggccccctgcccccctgccccatccggccccccttccccaaccaccagatgaggcaccccttccctgtgcccccctgcttcccccccatgcccccacccatgccctgccccaacaacccccctgtgcctggggcccctcctggccagggcaccttccccttcatgatgcccccacccagcatgccccaccccccacctcctcctgtgatgccccagcaggtgaactaccagtacccacctggctacagccaccacaacttccccccacccagcttcaacagcttccagaacaaccccagcagcttcctgcccagcgccaacaacagcagcagcccccacttccgccacctgcccccctaccccctgcccaaggcccccagcgagaggaggagccctgagcggctgaagcactatgatgaccaccgccaccgggaccacagccacggccgcggggagcggcacaggagcctggacagaagagagcggggccgcagcccagacagaagacggcaggacagccgctacagaagtgactatgaccggggccgcacccccagccgccacaggagctatgaaagaagccgggagcgggagcgggagcggcaccgccaccgggacaacagaagaagccccagcctggagaggagctacaagaaggagtacaagaggagcggccgctcctatggcctgtctgtggtgcctgagcctgctggctgcaccccagagctgcccggggagatcatcaagaacacagacagctgggccccacccctggagatcgtgaaccacaggagccccagccgggagaagaagagggcccgctgggaggaggagaaggaccgctggagcgacaaccagagcagcggcaaggacaagaactacaccagcatcaaggagaaggagcctgaggagaccatgccagacaagaatgaggaggaggaggaggagctgctgaagcctgtgtggatccgctgcacccacagcgagaactactacagcagtgaccccatggaccaggtgggggacagcacagtggtgggcaccagccggctgcgggacctgtatgacaagtttgaggaggagctgggcagccggcaggagaaggccaaggccgcccggcccccctgggagccccccaagaccaagctggatgaggacctggagagcagcagcgagagtgaatgtgagagtgatgaggacagcacctgcagcagcagcagtgacagcgaggtgtttgatgtgattgctgagatcaagaggaagaaggcccacccagaccggctgcatgatgagctgtggtacaatgaccccggccagatgaatgatggccccctgtgcaagtgcagcgccaaggccaggagaacaggcatccgccacagcatctacccaggagaggaggccatcaagccctgccggcccatgaccaacaatgccggccgcctcttccactaccgcatcaccgtgagcccccccaccaacttcctgacagaccggcccaccgtcatcgagtatgatgaccacgagtacatctttgagggcttctccatgtttgcccacgcccccctgaccaacatccccctgtgcaaggtgatccgcttcaacatcgactacaccatccacttcatcgaggagatgatgcctgagaacttctgtgtgaagggcctggagctgttcagcctcttcctgttccgggacatcctggagctgtatgactggaacctgaagggccccctgtttgaggacagccccccctgctgcccccgcttccacttcatgcccaggtttgtgcgcttcctgcctgatggcggcaaggaggtgctgtccatgcaccagatcctgctgtacctgctgcgctgcagcaaggccctggtgcctgaggaggagatcgccaacatgctgcagtgggaggagctggagtggcagaagtatgcagaggagtgcaagggcatgattgtgaccaaccctggcaccaagcccagctctgtgagaattgaccagctggaccgggagcagttcaacccagatgtgatcaccttccccatcatcgtgcacttcggcatccggcctgcccagctgtcctatgctggggacccccagtaccagaagctgtggaagagctatgtgaagctgcggcacctgctggccaacagccccaaggtgaagcagacagacaagcagaagctggcccagcgggaggaggccctgcagaagatccggcagaagaacaccatgagaagagaggtgacagtggagctgagcagccagggcttctggaagacaggcatccgcagtgatgtgtgccagcacgccatgatgctgcctgtgctgacccaccacatccgctaccaccagtgcctgatgcacctggacaagctgattggctacaccttccaggaccgctgcctgctgcagctggccatgacccaccccagccaccacctgaactttggcatgaacccagaccacgccaggaacagcctgagcaactgtggcatccggcagcccaagtatggagacaggaaggtgcaccacatgcacatgaggaagaagggcatcaacaccctcatcaacatcatgagccggctgggccaggatgaccccacccccagccgcatcaaccacaatgaaaggctggagttcctgggagatgctgtggtggagttcctgacctctgtgcacctgtactacctgttccccagcctggaggagggcggcctggccacctacagaacagccatcgtgcagaaccagcacctggccatgctggccaagaagctggagctggaccgcttcatgctgtatgcccacggccctgacctgtgccgggagagtgacctgcggcatgccatggccaactgctttgaggccctgattggagctgtgtacctggagggcagcctggaggaggccaagcagctgtttggccgcctgctcttcaatgaccctgacctgcgggaggtgtggctgaactaccccctgcaccccctgcagctgcaggagcccaacacagaccggcagctgattgagaccagccctgtgctgcagaagctgacagaatttgaggaggccatcggggtcatcttcacccacgtgcggctgctggcccgggccttcaccctgaggacagtgggcttcaaccacctgaccctgggccacaaccagaggatggagttcctgggggacagcatcatgcagctggtggccacagagtacctgttcatccacttcccagaccaccacgagggccacctgaccctgctgcggagcagcctggtgaacaacagaacccaggccaaggtggccgaggagctgggcatgcaggagtatgccatcaccaatgacaagaccaagaggcctgtggccctgcggaccaagaccctggccgacctgctggagagcttcatcgccgccctgtacatcgacaaggacctggagtatgtgcacaccttcatgaatgtgtgcttcttcccccggctgaaggagttcatcctgaaccaggactggaatgaccccaagagccagctgcagcagtgctgcctgaccctgaggacagagggcaaggagccagacatccccctgtacaagaccctgcagacagtgggccccagccacgcccggacctacacagtggccgtgtacttcaagggggagagaattggctgtgggaagggccccagcatccagcaggccgagatgggcgccgccatggatgccctggagaagtacaacttcccccagatggcccaccagaagcgcttcatcgagaggaagtaccggcaggagctgaaggagatgcgctgggagcgggagcaccaggagcgggagccagatgaaacagaggacatcaagaagtag

SEQ ID NO: 150489 - DNA, 3558 bp, synthetic construct
  misc_feature 1..3558: note = Description of Artificial Sequence: Synthetic coding sequence
  source 1..3558: mol_type = other DNA
cacaggatgtccttccaccctggccggggctgcccccggggccggggcggccacggggcccggcccagcgcccccagcttccggccccagaacctgcggctgctgcacccccagcagccccctgtgcagtaccagtatgagccccccagcgcccccagcaccaccttcagcaacagccctgcccccaacttcctgccccccaggccagactttgtgcccttccccccacccatgcctccttctgcccagggccccctgcccccctgccccatccggccccccttccccaaccaccagatgaggcaccccttccctgtgcccccctgcttcccccccatgcccccacccatgccctgccccaacaacccccctgtgcctggggcccctcctggccagggcaccttccccttcatgatgcctcctccttccatgccccaccccccacctcctcctgtgatgccccagcaggtgaactaccagtacccacctggctacagccaccacaacttccccccacccagcttcaacagcttccagaacaaccccagcagcttcctgcccagcgccaacaacagcagcagcccccacttccgccacctgcccccctaccccctgcccaaggcccccagcgagcggcgcagccctgagcggctgaagcactatgatgaccaccgccaccgggaccacagccacggccgcggggagcggcacaggagcctggaccggcgggagcggggccgcagcccagacagaagacggcaggacagccgctacagaagtgactatgaccggggccgcacccccagccgccacaggagctatgaaagaagccgggagcgggagcgggagcggcaccgccaccgggacaacagaagaagccccagcctggagaggagctacaagaaggagtacaagaggagcggcagccgcagccccagccgggagaagaagagggcccgctgggaggaggagaaggaccgctggagcgacaaccagagcagcggcaaggacaagaactacaccagcatcaaggagaaggagcctgaggagaccatgccagacaagaatgaggaggaggaggaggagctgctgaagcctgtgtggatccgctgcacccacagcgagaactactacagcagtgaccccatggaccaggtgggggacagcacagtggtgggcaccagccggctgcgggacctgtatgacaagtttgaggaggagctgggcagccggcaggagaaggccaaggccgcccggcccccctgggagccccccaagaccaagctggatgaggacctggagagcagcagcgagagtgaatgtgagagtgatgaggacagcacctgcagcagcagcagtgacagcgaggtgtttgatgtgattgctgagatcaagaggaagaaggcccacccagaccggctgcatgatgagctgtggtacaatgaccccggccagatgaatgatggccccctgtgcaagtgcagcgccaaggccaggagaacaggcatccgccacagcatctacccaggagaggaggccatcaagccctgccggcccatgaccaacaatgccggccgcctcttccactaccgcatcaccgtgagcccccccaccaacttcctgacagaccggcccaccgtcatcgagtatgatgaccacgagtacatctttgagggcttctccatgtttgcccacgcccccctgaccaacatccccctgtgcaaggtgatccgcttcaacatcgactacaccatccacttcatcgaggagatgatgcctgagaacttctgtgtgaagggcctggagctgttcagcctcttcctgttccgggacatcctggagctgtatgactggaacctgaagggccccctgtttgaggacagccccccctgctgcccccgcttccacttcatgcccaggtttgtgcgcttcctgcctgatggcggcaaggaggtgctgtccatgcaccagatcctgctgtacctgctgcgctgcagcaaggccctggtgcctgaggaggagatcgccaacatgctgcagtgggaggagctggagtggcagaagtatgcagaggagtgcaagggcatgattgtgaccaaccctggcaccaagcccagctctgtgagaattgaccagctggaccgggagcagttcaacccagatgtgatcaccttccccatcatcgtgcacttcggcatccggcctgcccagctgtcctatgctggggacccccagtaccagaagctgtggaagagctatgtgaagctgcggcacctgctggccaacagccccaaggtgaagcagacagacaagcagaagctggcccagcgggaggaggccctgcagaagatccggcagaagaacaccatgagaagagaggtgacagtggagctgagcagccagggcttctggaagacaggcatccgcagtgatgtgtgccagcacgccatgatgctgcctgtgctgacccaccacatccgctaccaccagtgcctgatgcacctggacaagctgattggctacaccttccaggaccgctgcctgctgcagctggccatgacccaccccagccaccacctgaactttggcatgaacccagaccacgccaggaacagcctgagcaactgtggcatccggcagcccaagtatggagacaggaaggtgcaccacatgcacatgaggaagaagggcatcaacaccctcatcaacatcatgagccggctgggccaggatgaccccacccccagccgcatcaaccacaatgaaaggctggagttcctgggagatgctgtggtggagttcctgacctctgtgcacctgtactacctgttccccagcctggaggagggcggcctggccacctacagaacagccatcgtgcagaaccagcacctggccatgctggccaagaagctggagctggaccgcttcatgctgtatgcccacggccctgacctgtgccgggagagtgacctgcggcatgccatggccaactgctttgaggccctgattggagctgtgtacctggagggcagcctggaggaggccaagcagctgtttggccgcctgctcttcaatgaccctgacctgcgggaggtgtggctgaactaccccctgcaccccctgcagctgcaggagcccaacacagaccggcagctgattgagaccagccctgtgctgcagaagctgacagaatttgaggaggccatcggggtcatcttcacccacgtgcggctgctggcccgggccttcaccctgaggacagtgggcttcaaccacctgaccctgggccacaaccagaggatggagttcctgggggacagcatcatgcagctggtggccacagagtacctgttcatccacttcccagaccaccacgagggccacctgaccctgctgcggagcagcctggtgaacaacagaacccaggccaaggtggccgaggagctgggcatgcaggagtggagcatctacctgctgagcaactgtgactgctgcctgctgcggcccagcctggtgttcctgcagaccatgaatgaggtgtgcagcctgaagtag

SEQ ID NO: 150490 - DNA, 4014 bp, synthetic construct
  misc_feature 1..4014: note = Description of Artificial Sequence: Synthetic coding sequence
  source 1..4014: mol_type = other DNA
atgatgcagggcaacacctgccacaggatgtccttccaccctggccggggctgcccccggggccggggcggccatggagcccggcccagcgcccccagcttccggccccagaacctgcggctgctgcacccccagcagccccctgtgcagtaccagtatgagcccccatctgcccccagcaccaccttcagcaacagccctgcccccaacttcctgccccccaggccagactttgtgcccttccccccacccatgccacccagcgcccagggccccctgcccccctgccccatccggccccccttccccaaccaccagatgaggcaccccttccctgtgcccccctgcttcccccccatgcccccacccatgccctgccccaacaacccccctgtgcctggggcccctcctggccagggcaccttccccttcatgatgcccccacccagcatgccccaccccccacctcctcctgtgatgccccagcaggtgaactaccagtacccacctggctacagccaccacaacttccccccacccagcttcaacagcttccagaacaaccccagcagcttcctgcccagcgccaacaacagcagcagcccccacttccgccacctgcccccctaccccctgcccaaggcccccagcgagaggaggagccctgagcggctgaagcactatgatgaccaccgccaccgggaccacagccacggccgcggggagcggcacaggagcctggacagaagagagcggggccgcagcccagacagaagacggcaggacagccgctacagaagtgactatgaccggggccgcacccccagccgccacaggagctatgaaagaagccgggagcgggagcgggagcggcaccgccaccgggacaacagaagaagccccagcctggagaggagctacaagaaggagtacaagaggagcggcagccgcagccccagccgggagaagaagagggcccgctgggaggaggagaaggaccgctggagcgacaaccagagcagcggcaaggacaagaactacaccagcatcaaggagaaggagcctgaggagaccatgccagacaagaatgaggaggaggaggaggagctgctgaagcctgtgtggatccgctgcacccacagcgagaactactacagcagtgaccccatggaccaggtgggggacagcacagtggtgggcaccagccggctgcgggacctgtatgacaagtttgaggaggagctgggcagccggcaggagaaggccaaggccgcccggcccccctgggagccccccaagaccaagctggatgaggacctggagagcagcagcgagagtgaatgtgagagtgatgaggacagcacctgcagcagcagcagtgacagcgaggtgtttgatgtgattgctgagatcaagaggaagaaggcccacccagaccggctgcatgatgagctgtggtacaatgaccccggccagatgaatgatggccccctgtgcaagtgcagcgccaaggcccggaggacaggcatccgccacagcatctacccaggagaggaggccatcaagccctgccggcccatgaccaacaatgccggccgcctcttccactaccgcatcaccgtgtccccacccaccaacttcctgacagaccggcccaccgtgattgaatatgatgaccacgagtacatctttgagggcttctccatgtttgcccacgcccccctgaccaacatccccctgtgcaaggtgatccgcttcaacatcgactacaccatccacttcatcgaggagatgatgcctgagaacttctgtgtgaagggcctggagctgttcagcctcttcctgttccgggacatcctggagctgtatgactggaacctgaagggccccctgtttgaggacagccccccctgctgcccccgcttccacttcatgcccaggtttgtgcgcttcctgcctgatggcggcaaggaggtgctgtccatgcaccagatcctgctgtacctgctgcgctgcagcaaggccctggtgcctgaggaggagatcgccaacatgctgcagtgggaggagctggagtggcagaagtatgcagaagaatgtaaaggcatgattgtgaccaaccctggcaccaagcccagctctgtgagaattgaccagctggaccgggagcagttcaacccagatgtgatcaccttccccatcatcgtgcacttcggcatccggcctgcccagctgtcctatgctggggacccccagtaccagaagctgtggaagagctatgtgaagctgcggcacctgctggccaacagccccaaggtgaagcagacagacaagcagaagctggcccagcgggaggaggccctgcagaagatccggcagaagaacaccatgaggcgggaggtgacagtggagctgagcagccagggcttctggaagacaggcatccgcagtgatgtgtgccagcacgccatgatgctgcctgtgctgacccaccacatccgctaccaccagtgcctgatgcacctggacaagctgattggctacaccttccaggaccgctgcctgctgcagctggccatgacccaccccagccaccacctgaactttggcatgaacccagaccacgccaggaacagcctgagcaactgtggcatccggcagcccaagtacggggacaggaaggtgcaccacatgcacatgaggaagaagggcatcaacaccctcatcaacatcatgagccggctgggccaggatgaccccacccccagccgcatcaaccacaatgaaaggctggagttcctgggagatgctgtggtggagttcctgacctctgtgcacctgtactacctgttccccagcctggaggagggcggcctggccacctacagaacagccatcgtgcagaaccagcacctggccatgctggccaagaagctggagctggaccgcttcatgctgtatgcccacggccctgacctgtgccgggagagtgacctgcggcatgccatggccaactgctttgaggccctgattggagctgtgtacctggagggcagcctggaggaggccaagcagctgtttggccgcctgctcttcaatgaccctgacctgcgggaggtgtggctgaactaccccctgcaccccctgcagctgcaggagcccaacacagaccggcagctgattgagaccagccctgtgctgcagaagctgacagaatttgaggaggccatcggggtcatcttcacccacgtgcggctgctggcccgggccttcaccctgaggacagtgggcttcaaccacctgaccctgggccacaaccagaggatggagttcctgggggacagcatcatgcagctggtggccacagagtacctgttcatccacttcccagaccaccacgagggccacctgaccctgctgcggagcagcctggtgaacaacagaacccaggccaaggtggccgaggagctgggcatgcaggagtatgccatcaccaatgacaagaccaagaggcctgtggccctgcggaccaagaccctggccgacctgctggagagcttcatcgccgccctgtacatcgacaaggacctggagtatgtgcacaccttcatgaatgtgtgcttcttcccccggctgaaggagttcatcctgaaccaggactggaatgaccccaagagccagctgcagcagtgctgcctgaccctgaggacagagggcaaggagccagacatccccctgtacaagaccctgcagacagtgggccccagccacgcccggacctacacagtggccgtgtacttcaagggggagcgcatcggctgtgggaagggccccagcatccagcaggccgagatgggcgccgccatggatgccctggagaagtacaacttcccccagatggcccaccagaagcgcttcattgaaaggaagtaccggcaggagctgaaggagatgcgctgggagcgggagcaccaggagcgggagccagatgaaacagaggacatcaagaagtag

SEQ ID NO: 150491 - DNA, 606 bp, synthetic construct
  misc_feature 1..606: note = Description of Artificial Sequence: Synthetic coding sequence
  source 1..606: mol_type = other DNA
atgatgcagggcaacacctgccacaggatgtccttccaccctggccggggctgcccccggggccggggcggccatggagcccggcccagcgcccccagcttccggccccagaacctgcggctgctgcacccccagcagccccctgtgcagtaccagtatgagcccccatctgcccccagcaccaccttcagcaacagccctgcccccaacttcctgccccccaggccagactttgtgcccttccccccacccatgccacccagcgcccagggccccctgcccccctgccccatccggccccccttccccaaccaccagatgaggcaccccttccctgtgcccccctgcttcccccccatgcccccacccatgccctgccccaacaacccccctgtgcctggggcccctcctggccagggcaccttccccttcatgatgcccccacccagcatgccccaccccccacctcctcctgtgatgccccagcaggtgaactaccagtacccacctggctacagccaccacaacttccccccacccagcttcaacagcttccagaacaaccccagcagcttcctgcccagcgccaacaacagcagcagctag

SEQ ID NO: 150492 - DNA, 4125 bp, synthetic construct; identical to SEQ ID NO: 150488
  misc_feature 1..4125: note = Description of Artificial Sequence: Synthetic coding sequence
  source 1..4125: mol_type = other DNA

SEQ ID NO: 150493 - DNA, 630 bp, synthetic construct
  misc_feature 1..630: note = Description of Artificial Sequence: Synthetic coding sequence
  source 1..630: mol_type = other DNA
atgaaggctgtggtgcagagggtgacccgggcctctgtgacagtgggcggggagcagatcagcgccatcggccggggcatctgtgtgctgctgggcatcagcctggaggacacccagaaggagctggagcacatggtgaggaagatcctgaacctgcgggtgtttgaagatgaaagtggcaagcactggagcaagtctgtgatggacaagcagtatgagatcctgtgtgtgtcccagttcaccctgcagtgtgtgctgaagggcaacaagccagacttccacctggccatgcccacagagcaggccgagggcttctacaacagcttcctggagcagctgaggaagacctacagacctgagctgatcaaggatggcaagtttggagcctacatgcaggtgcacatccagaatgatggccctgtgaccatcgagctggagagccctgcccctggaacagccaccagtgaccccaagcagctgagcaagctggagaagcagcagcagaggaaggagaagacccgggccaagggccccagcgagagcagcaaggagaggaacacccccaggaaagaagatagaagtgccagcagtggagcagaaggagatgtgtcctctgagcgggagccctag

SEQ ID NO: 150494 - DNA, 843 bp, synthetic construct
  misc_feature 1..843: note = Description of Artificial Sequence: Synthetic coding sequence
  source 1..843: mol_type = other DNA
atgggccgggcagagctgctggagggcaagatgagcacccaggaccccagcgacctgtggagcagaagtgatggagaggccgagctgctgcaggacctgggctggtaccacggcaacctgaccaggcatgctgctgaggccctgctgctgagcaatggctgtgatggcagctacctgctgcgggacagcaatgagaccaccggcctgtacagcctgtctgtgcgggccaaggacagcgtgaagcacttccacgtggagtacacaggctacagcttcaagtttggcttcaatgagttcagcagcctgaaggactttgtgaagcactttgccaaccagcccctgattggcagcgagaccggcaccctgatggtgctgaagcacccctaccccaggaaggtggaggagcccagcatctatgaatctgtgcgggtgcacacagccatgcagacaggccgcacagaagatgacctggtgcccacagcccccagcctgggcaccaaggagggctacctgaccaagcagggcggcctggtgaagacctggaagacccgctggttcaccctgcacagaaatgagctgaagtacttcaaggaccagatgagccctgagcccatccgcatcctggacctgacagagtgcagcgctgtgcagtttgactacagccaggagcgggtgaactgcttctgcctggtgttccccttccgcaccttctacctgtgtgccaagacaggagtggaggctgatgagtggatcaagatcctgcgctggaagctgagccagatcaggaagcagctgaaccagggcgagggcaccatccgcagccgctccttcatcttcaagtag

SEQ ID NO: 150495 - DNA, 4656 bp, synthetic construct
  misc_feature 1..4656: note = Description of Artificial Sequence: Synthetic coding sequence
  source 1..4656: mol_type = other DNA
atgggcttctgcctggccctggcctggaccctgctggtgggcgcctggacccccctgggcgcccagaaccccatctcctgggaggtgcagagatttgatggctggtacaacaacctgatggagcaccgctggggcagcaagggcagccggctgcagaggctggtgcctgccagctatgcagatggagtgtaccagcccctgggggagccccacctgcccaacccccgggacctgagcaacaccatcagccggggccctgctggcctggccagcctgaggaacagaacagtgctgggcgtcttcttcggctaccacgtgctgagtgacctggtgtctgtggagaccccaggctgcccagctgagttcctgaacatccgcatccccccaggggaccccatgtttgatcctgaccagagaggagatgtggtgctgcccttccagaggagccgctgggaccctgagaccggccgcagccccagcaacccccgggaccctgccaaccaggtgacaggctggctggatggcagcgccatctacggcagcagccacagctggagcgatgccctgcgctccttcagccggggccagctggccagcggccctgaccctgccttcccccgggacagccagaaccccctgctgatgtgggccgccccagaccctgccaccggccagaatggcccccggggcctgtatgccttcggggctgagcggggcaaccgggagcccttcctgcaggccctgggcctgctgtggttccgctaccacaacctgtgggcccagaggctggcccggcagcacccagactgggaggatgaggagctgttccagcacgccaggaagagggtcatcgccacctaccagaacattgctgtgtatgagtggctgcccagcttcctgcagaagaccctgcctgagtacacaggctaccggcccttcctggaccccagcatcagcagcgagtttgtggccgccagcgagcagttcctgagcaccatggtgcccccaggagtgtacatgagaaatgccagctgccacttccagggcgtcatcaacagaaacagctctgtgtcccgggccctgcgggtgtgcaacagctactggagccgggagcaccccagcctgcagagcgcagaagatgtggatgccctgctgctgggcatggccagccagattgctgagcgggaggaccacgtgctggtggaggatgtgcgggacttctggccaggccccctgaagttcagcaggacagaccacctggccagctgcctgcagaggggccgggacctgggcctgcccagctacaccaaggcccgggccgccctgggcctgagccccatcacccgctggcaggacatcaacccagccctgagccgcagcaatgacacagtgctggaggccacagctgccctgtacaaccaggacctgtcctggctggagctgctgcccggcggcctgctggagagccaccgggaccccggccccctcttcagcaccatcgtgctggagcagtttgtgcggctgagagatggagaccgctactggtttgagaacaccagaaatggcctcttcagcaagaaggagattgaggagatccggaacaccaccctgcaggatgtgctggtggccgtcatcaacatcgaccccagcgccctgcagcccaacgtgtttgtgtggcacaagggggacccctgcccccagccccggcagctgagcacagagggcctgcctgcctgtgcccccagcgtggtgcgggactactttgagggcagcggctttggatttggagtgaccatcggcaccctgtgctgcttccccctggtgtccctgctgagcgcctggatcgtggcccggctgaggatgaggaacttcaagaggctgcagggccaggaccggcagagcatcgtgtctgagaagctggtgggcggcatggaggccctggagtggcagggccacaaggagccctgcaggcctgtgctggtgtacctgcagcccggccagatccgggtggtggatggccgcctgactgtgctgcggaccatccagctgcagcccccccagaaggtgaactttgtgctgagcagcaacagaggaagaaggaccctgctgctgaagatccccaaggagtatgacctggtgctgctcttcaacctggaggaggagcggcaggccctggtggagaacctgcggggggccctgaaggagagcggcctgagcatccaggagtgggagctgcgggagcaggagctgatgagagctgctgtgacccgggagcagaggaggcacctgctggagaccttcttccgccacctgttcagccaggtgctggacatcaaccaggctgatgctggcaccctgcccctggacagcagccagaaggtgcgggaggccctgacctgtgagctgagcagagctgagtttgctgagagcctgggcctgaagccccaggacatgtttgtggagagcatgttcagcctggccgacaaggatggaaatggctacctgtccttccgggagttcctggacatcctggtggtgttcatgaagggcagccctgaggagaagagccggctgatgttcaggatgtatgactttgatggaaatggcctcatcagcaaggatgagttcatccgcatgctgcggagcttcatcgagatcagcaacaactgcctgagcaaggcccagctggccgaggtggtggagagcatgttccgggagagcggcttccaggacaaggaggagctgacctgggaggacttccacttcatgctgcgggaccacaacagcgagctgcgcttcacccagctgtgtgtgaagggcgtggaggtgcctgaggtgatcaaggacctgtgccggcgggccagctacatcagccaggacatgatctgccccagcccccgggtgtctgcccgctgcagcagaagtgacattgaaacagagctgaccccccagaggctgcagtgccccatggacacagaccccccccaggagatcagaagaagatttgggaagaaggtgaccagcttccagcccctgctcttcacagaggcccaccgggagaagttccagaggagctgcctgcaccagacagtgcagcagttcaagcgcttcatcgagaactaccgccgccacatcggctgtgtggccgtgttctacgccatcgccggcggcctcttcctggagcgggcctactactatgcctttgctgcccaccacacaggcatcacagacaccaccagggtgggcatcatcctgagccggggcacagctgccagcatctccttcatgttctcctacatcctgctgaccatgtgcaggaacctgatcaccttcctgcgggagaccttcctgaaccgctacgtgccctttgatgctgctgtggacttccaccggctgattgccagcacagccatcgtgctgactgtgctgcacagcgtgggccacgtggtgaatgtgtacctgttcagcatcagccccctgtctgtgctgagctgcctcttccctggcctcttccatgatgatggcagcgagctgccccagaagtactactggtggttcttccagacagtgcccggcctgactggagtggtgctgctgctgatcctggccatcatgtatgtgtttgccagccaccacttcagaagaagaagcttccggggcttctggctgacccaccacctgtacatcctgctgtatgtgctgctgatcatccacggcagctttgccctgatccagctgccccgcttccacatcttcttcctggtgcctgccatcatctacggcggggacaagctggtgtccctgagcaggaagaaggtggagatctctgtggtgaaggccgagctgctgcccagcggcgtgacccacctgcgcttccagaggccccagggctttgagtacaagagcggccagtgggtgcgcatcgcctgcctggccctgggcaccacagagtaccaccccttcaccctgaccagcgcccctcatgaggacaccctgagcctgcacatccgggctgctggcccctggaccacccggctgcgggagatctacagcgcccccaccggggacagatgtgcccgctaccccaagctgtacctggatggcccctttggagagggccaccaggagtggcacaagtttgaggtgtctgtgctggtgggcggcggcatcggcgtgaccccatttgccagcatcctgaaggacctggtgttcaagagctctgtgtcctgccaggtgttctgcaagaagatctacttcatctgggtgaccaggacccagaggcagtttgagtggctggccgacatcatccgggaggtggaggagaatgaccaccaggacctggtgtctgtgcacatctacatcacccagctggccgagaagtttgacctgcggaccaccatgctgtacatctgtgagcggcacttccagaaggtgctgaacagaagcctcttcaccggcctgcggagcatcacccacttcggccggcccccatttgagcccttcttcaacagcctgcaggaggtgcacccccaggtgaggaagattggagtcttcagctgtggccccccaggcatgaccaagaatgtggagaaggcctgccagctgatcaaccggcaggacaggacccacttcagccaccactatgagaacttctag

SEQ ID NO: 150496 - DNA, 4656 bp, synthetic construct; identical to SEQ ID NO: 150495
  misc_feature 1..4656: note = Description of Artificial Sequence: Synthetic coding sequence
  source 1..4656: mol_type = other DNA

SEQ ID NO: 150497 - DNA, 4656 bp, synthetic construct; identical to SEQ ID NO: 150495
  misc_feature 1..4656: note = Description of Artificial Sequence: Synthetic coding sequence
  source 1..4656: mol_type = other DNA

SEQ ID NO: 150498 - DNA, 132 bp, synthetic construct
  misc_feature 1..132: note = Description of Artificial Sequence: Synthetic coding sequence
  source 1..132: mol_type = other DNA
atgggcttctgcctggccctggcctggaccctgctggtgggcgcctggacccccctgggcgcccagaaccccatctcctgggaggtgcagagatttgatggctggtacaacaacctgatggagcacaggtag

SEQ ID NO: 150499 - DNA, 3594 bp, synthetic construct
  misc_feature 1..3594: note = Description of Artificial Sequence: Synthetic coding sequence
  source 1..3594: mol_type = other DNA
atgtggatgcactgctgctgggcctggccacccaggagccagagcgagaggaccatgtgctggctgaagatgtgtggggtgtccctgcggctgagcctgcaggtggtgaacagctggcccctgggccggggcagcgctggcctgcctgagccagacttctggccaggccccctgaagttcagcaggacagaccacctggccagctgcctgcagaggggccgggacctgggcctgcccagctacaccaaggcccgggccgccctgggcctgagccccatcacccgctggcaggacatcaacccagccctgagccgcagcaatgacacagtgctggaggccacagctgccctgtacaaccaggacctgtcctggctggagctgctgcccggcggcctgctggagagccaccgggaccccggccccctcttcagcaccatcgtgctggagcagtttgtgcggctgagagatggagaccgctactggtttgagaacaccagaaatggcctcttcagcaagaaggagattgaggagatccggaacaccaccctgcaggatgtgctggtggccgtcatcaacatcgaccccagcgccctgcagcccaacgtgtttgtgtggcacaagggggacccctgcccccagccccggcagctgagcacagagggcctgcctgcctgtgcccccagcgtggtgcgggactactttgagggcagcggctttggatttggagtgaccatcggcaccctgtgctgcttccccctggtgtccctgctgagcgcctggatcgtggcccggctgaggatgaggaacttcaagaggctgcagggccaggaccggcagagcatcgtgtctgagaagctggtgggcggcatggaggccctggagtggcagggccacaaggagccctgcaggcctgtgctggtgtacctgcagcccggccagatccgggtggtggatggccgcctgactgtgctgcggaccatccagctgcagcccccccagaaggtgaactttgtgctgagcagcaacagaggaagaaggaccctgctgctgaagatccccaaggagtatgacctggtgctgctcttcaacctggaggaggagcggcaggccctggtggagaacctgcggggggccctgaaggagagcggcctgagcatccaggagtgggagctgcgggagcaggagctgatgagagctgctgtgacccgggagcagaggaggcacctgctggagaccttcttccgccacctgttcagccaggtgctggacatcaaccaggctgatgctggcaccctgcccctggacagcagccagaaggtgcgggaggccctgacctgtgagctgagcagagctgagtttgctgagagcctgggcctgaagccccaggacatgtttgtggagagcatgttcagcctggccgacaaggatggaaatggctacctgtccttccgggagttcctggacatcctggtggtgttcatgaagggcagccctgaggagaagagccggctgatgttcaggatgtatgactttgatggaaatggcctcatcagcaaggatgagttcatccgcatgctgcggagcttcatcgagatcagcaacaactgcctgagcaaggcccagctggccgaggtggtggagagcatgttccgggagagcggcttccaggacaaggaggagctgacctgggaggacttccacttcatgctgcgggaccacaacagcgagctgcgcttcacccagctgtgtgtgaagggcgtggaggtgcctgaggtgatcaaggacctgtgccggcgggccagctacatcagccaggacatgatctgccccagcccccgggtgtctgcccgctgcagcagaagtgacattgaaacagagctgaccccccagaggctgcagtgccccatggacacagaccccccccaggagatcagaagaagatttgggaagaaggtgaccagcttccagcccctgctcttcacagaggcccaccgggagaagttccagaggagctgcctgcaccagacagtgcagcagttcaagcgcttcatcgagaactaccgccgccacatcggctgtgtggccgtgttctacgccatcgccggcggcctcttcctggagcgggcctactactatgcctttgctgcccaccacacaggcatcacagacaccaccagggtgggcatcatcctgagccggggcacagctgccagcatctccttcatgttctcctacatcctgctgaccatgtgcaggaacctgatcaccttcctgcgggagaccttcctgaaccgctacgtgccctttgatgctgctgtggacttccaccggctgattgccagcacagccatcgtgctgactgtgctgcacagcgtgggccacgtggtgaatgtgtacctgttcagcatcagccccctgtctgtgctgagctgcctcttccctggcctcttccatgatgatggcagcgagctgccccagaagtactactggtggttcttccagacagtgcccggcctgactggagtggtgctgctgctgatcctggccatcatgtatgtgtttgccagccaccacttcagaagaagaagcttccggggcttctggctgacccaccacctgtacatcctgctgtatgtgctgctgatcatccacggcagctttgccctgatccagctgccccgcttccacatcttcttcctggtgcctgccatcatctacggcggggacaagctggtgtccctgagcaggaagaaggtggagatctctgtggtgaaggccgagctgctgcccagcggcgtgacccacctgcgcttccagaggccccagggctttgagtacaagagcggccagtgggtgcgcatcgcctgcctggccctgggcaccacagagtaccaccccttcaccctgaccagcgcccctcatgaggacaccctgagcctgcacatccgggctgctggcccctggaccacccggctgcgggagatctacagcgcccccaccggggacagatgtgcccgctaccccaagctgtacctggatggcccctttggagagggccaccaggagtggcacaagtttgaggtgtctgtgctggtgggcggcggcatcggcgtgaccccatttgccagcatcctgaaggacctggtgttcaagagctctgtgtcctgccaggtgttctgcaagaagatctacttcatctgggtgaccaggacccagaggcagtttgagtggctggccgacatcatccgggaggtggaggagaatgaccaccaggacctggtgtctgtgcacatctacatcacccagctggccgagaagtttgacctgcggaccaccatgctgtacatctgtgagcggcacttccagaaggtgctgaacagaagcctcttcaccggcctgcggagcatcacccacttcggccggcccccatttgagcccttcttcaacagcctgcaggaggtgcacccccaggtgaggaagattggagtcttcagctgtggccccccaggcatgaccaagaatgtggagaaggcctgccagctgatcaaccggcaggacaggacccacttcagccaccactatgagaacttctag

SEQ ID NO: 150500 - DNA, 4647 bp, synthetic construct
  misc_feature 1..4647: note = Description of Artificial Sequence: Synthetic coding sequence
  source 1..4647: mol_type = other DNA
atgctgcgggcccggcctgaggccctgatgctgctgggcgccctgctgaccggcagcctgggccccagcggcaaccaggatgccctgagcctgccctgggaggtgcagagatatgatggctggttcaacaacctgcggcaccacgagagaggagctgtgggctgccgcctgcagaggagagtgcctgccaactatgcagatggagtgtaccaggccctggaggagccccagctgcccaacccccggcggctgagcaatgctgccacccggggcattgctggcctgcccagcctgcacaacagaacagtgctgggcgtcttcttcggctaccacgtgctgagtgatgtggtgtctgtggagaccccaggctgcccagctgagttcctgaacatccgcatccccccaggggaccctgtgtttgatcctgaccagagaggagatgtggtgctgcccttccagaggagccgctgggaccctgagaccggccgcagccccagcaacccccgggacctggccaaccaggtgacaggctggctggatggcagcgccatctacggcagcagccacagctggagcgatgccctgcgctccttcagcggcggccagctggccagcggccctgaccctgccttcccccgggacagccagaaccccctgctgatgtgggccgccccagaccctgccaccggccagaatggcccccggggcctgtatgccttcggggctgagcggggcaaccgggagcccttcctgcaggccctgggcctgctgtggttccgctaccacaacctgtgggcccagaggctggcccggcagcacccagactgggaggatgaggagctgttccagcacgccaggaagagggtcatcgccacctaccagaacattgctgtgtatgagtggctgcccagcttcctgcagaagaccctgcctgagtacacaggctaccggcccttcctggaccccagcatcagccctgagtttgtggtggccagcgagcagttcttcagcaccatggtgcccccaggagtgtacatgagaaatgccagctgccacttcaggaaggtgctgaacaagggcttccagagcagccaggccctgcgggtgtgcaacaactactggatccgggagaaccccaacctgaacagcacccaggaggtgaatgagctgctgctgggcatggccagccagatcagcgagctggaggacaacatcgtggtggaggacctgcgggactactggccaggccctgggaagttcagcaggacagattatgtggccagcagcatccagaggggccgggacatgggcctgcccagctacagccaggccctgctggccttcggcctggacatccccaggaactggagcgacctgaaccccaacgtggacccccaggtgctggaggccacagctgccctgtacaaccaggacctgagccagctggagctgctgctgggcggcctgctggagagccatggagaccccggccccctcttcagcgccatcgtgctggaccagtttgtgcggctgagagatggagaccgctactggtttgagaacaccagaaatggcctcttcagcaagaaggagattgaggacatccggaacaccaccctgagagatgtgctggtggccgtcatcaacatcgaccccagcgccctgcagcccaacgtgtttgtgtggcacaagggggccccctgcccccagcccaagcagctgaccacagatggcctgccccagtgtgcccccctgactgtgctggacttctttgagggcagcagccctggctttgccatcaccatcatcgccctgtgctgcctgcccctggtgtccctgctgctgagcggcgtggtggcctacttccggggccgggagcacaagaagctgcagaagaagctgaaggagagcgtgaagaaggaggccgccaaggatggagtgcctgccatggagtggccaggccccaaggagaggagcagccccatcatcatccagctgctgagtgaccgctgcctgcaggtgctgaacagacacctgactgtgctgcgggtggtgcagctgcagcccctgcagcaggtgaacctgatcctgagcaacaacagaggctgcaggaccctgctgctgaagatccccaaggagtatgacctggtgctgctcttcagcagcgaggaggagcggggggcctttgtgcagcagctgtgggacttctgtgtgcgctgggccctgggcctgcacgtggccgagatgtctgagaaggagctgttcaggaaggctgtgaccaagcagcagcgggagcgcatcctggagatcttcttccgccacctgtttgcccaggtgctggacatcaaccaggctgatgctggcaccctgcccctggacagcagccagaaggtgcgggaggccctgacctgtgagctgagcagagctgagtttgctgagagcctgggcctgaagccccaggacatgtttgtggagagcatgttcagcctggccgacaaggatggaaatggctacctgtccttccgggagttcctggacatcctggtggtgttcatgaagggcagccctgaggacaagagccggctgatgttcaccatgtatgacctggatgaaaatggcttcctgagcaaggatgagttcttcaccatgatgaggagcttcatcgagatcagcaacaactgcctgagcaaggcccagctggccgaggtggtggagagcatgttccgggagagcggcttccaggacaaggaggagctgacctgggaggacttccacttcatgctgcgggaccatgattctgagctgcgcttcacccagctgtgtgtgaagggcggcggcggcggcggcaatggcatccgggacatcttcaagcagaacatcagctgccgggtgtccttcatcaccaggaccccaggagagaggagccacccccagggcctgggccccccagcccctgaggcccctgagctgggcggccctggcctgaagaagagatttgggaagaaggctgctgtgcccaccccccggctgtacacagaggccctgcaggagaagatgcagaggggcttcctggcccagaagctgcagcagtacaagagatttgtggagaactacagaagacacatcgtgtgtgtggccatcttcagcgccatctgtgtgggcgtgtttgctgaccgggcctactactacggctttgccagcccccccagcgacatcgcccagaccaccctggtgggcatcatcctgagccggggcacagctgcctctgtgtccttcatgttctcctacatcctgctgaccatgtgcaggaacctgatcaccttcctgcgggagaccttcctgaacagatatgtgccctttgatgctgctgtggacttccaccgctggatcgccatggctgctgtggtgctggccatcctgcacagcgctggccatgctgtgaatgtgtacatcttctctgtgagccccctgagcctgctggcctgcatcttccccaacgtgtttgtgaatgatggcagcaagctgccccagaagttctactggtggttcttccagacagtgcccggcatgactggagtgctgctgctgctggtgctggccatcatgtatgtgtttgccagccaccacttcagaagaagaagcttccggggcttctggctgacccaccacctgtacatcctgctgtatgccctgctgatcatccacggcagctatgccctgatccagctgcccaccttccacatctacttcctggtgcctgccatcatctatggaggagacaagctggtgtccctgagcaggaagaaggtggagatctctgtggtgaaggccgagctgctgcccagcggcgtgacctacctgcagttccagaggccccagggctttgagtacaagagcggccagtgggtgagaattgcctgcctggccctgggcaccacagagtaccaccccttcaccctgaccagcgcccctcatgaggacaccctgagcctgcacatccgggctgtgggcccctggaccacccggctgcgggagatctacagcagccccaagggaaatggctgtgccggctaccccaagctgtacctggatggcccctttggagagggccaccaggagtggcacaagtttgaggtgtctgtgctggtgggcggcggcattggagtgaccccatttgccagcatcctgaaggacctggtgttcaagagcagcctgggcagccagatgctgtgcaagaagatctacttcatctgggtgaccaggacccagaggcagtttgagtggctggccgacatcatccaggaggtggaggagaatgaccaccaggacctggtgtctgtgcacatctacgtgacccagctggccgagaagtttgacctgcggaccaccatgctgtacatctgtgagcggcacttccagaaggtgctgaacagaagcctcttcaccggcctgcggagcatcacccacttcggccggcccccatttgagcccttcttcaacagcctgcaggaggtgcacccccaggtgaggaagattggagtcttcagctgtggccccccaggcatgaccaagaatgtggagaaggcctgccagctggtgaaccggcaggaccgggcccacttcatgcaccactatgagaacttctag

SEQ ID NO: 150501 - DNA, 1452 bp, synthetic construct
  misc_feature 1..1452: note = Description of Artificial Sequence: Synthetic coding sequence
  source 1..1452: mol_type = other DNA
atggccaccctgggccacaccttccccttctacgccggccccaagcccaccttccccatggacaccaccctggccagcatcatcatgatcttcctgacagccctggccaccttcatcgtcatcctgcccggcatccggggcaagaccaggctcttctggctgctgcgggtggtgaccagcctcttcatcggggccgccatcctggccgtgaacttcagcagcgagtggagcgtgggccaggtgtccaccaacaccagctacaaggccttcagcagcgagtggatctctgctgacatcggcctgcaggtgggcctgggcggcgtgaacatcaccctgaccggcacccctgtgcagcagctgaatgagaccatcaactacaatgaggagttcacctggaggctgggggagaactatgcagaggagtatgccaaggccctggagaagggcctgcctgaccctgtgctgtacctggccgagaagttcacccccaggagcccctgtggcctgtaccggcagtaccgcctggccggccactacaccagcgccatgctgtgggtggccttcctgtgctggctgctggccaacgtgatgctgtccatgcctgtgctggtgtatggaggctacatgctgctggccaccggcatcttccagctgctggccctgctcttcttctccatggccaccagcctgaccagcccctgccccctgcacctgggcgcctctgtgctgcacacccaccacggccctgccttctggatcaccctgaccaccggcctgctgtgtgtgctgctgggcctggccatggctgtggcccacaggatgcagccccaccggctgaaggccttcttcaaccagagcgtggatgaggaccccatgctggagtggagccctgaggagggcggcctgctgagcccccgctaccgctccatggctgacagccccaagagccaggacatccccctgtctgaggccagcagcaccaaggcctactaccggccccggcggctgagcctggtgcctgcagatgtgcggggcctggccccagctgccctgagcgccctgcccggggccctgctggcccaggcctggagggccctgctgcccggcctgcgctgccccaaggccggcaaggagagccggctgggccccccccacagcccctggaggtttggacctgagggctgtgaggagcgctgggccgagcacactggagacagcccccggcccctgcggggccggggcaccggccgcctgtggcgctggggcagcaaggagcggcgggcctgtggggtgcgggccatgctgccccggctggtgagcaacagcggcctgaagaggcccagctgcctggacctgcccaagtgctgggactacagaagagatgcccgggccttcttccacctgctggagcccaccccctgtgtgaccagccgccacacccccctcatctag

SEQ ID NO: 150502 - DNA, 1317 bp, synthetic construct
  misc_feature 1..1317: note = Description of Artificial Sequence: Synthetic coding sequence
  source 1..1317: mol_type = other DNA
atggccaccctgggccacaccttccccttctacgccggccccaagcccaccttccccatggacaccaccctggccagcatcatcatgatcttcctgacagccctggccaccttcatcgtcatcctgcccggcatccggggcaagaccaggctcttctggctgctgcgggtggtgaccagcctcttcatcggggccgccatcctgggcacccctgtgcagcagctgaatgagaccatcaactacaatgaggagttcacctggaggctgggagaaaattatgcagaggagtatgccaaggccctggagaagggcctgcctgaccctgtgctgtacctggccgagaagttcacccccaggagcccctgtggcctgtaccggcagtaccgcctggccggccactacaccagcgccatgctgtgggtggccttcctgtgctggctgctggccaacgtgatgctgtccatgcctgtgctggtgtatggaggctacatgctgctggccaccggcatcttccagctgctggccctgctcttcttctccatggccaccagcctgaccagcccctgccccctgcacctgggcgcctctgtgctgcacacccaccacggccctgccttctggatcaccctgaccaccggcctgctgtgtgtgctgctgggcctggccatggctgtggcccacaggatgcagccccaccggctgaaggccttcttcaaccagagcgtggatgaggaccccatgctggagtggagccctgaggagggcggcctgctgagcccccgctaccgctccatggctgacagccccaagagccaggacatccccctgtctgaggccagcagcaccaaggcctactaccggccccggcggctgagcctggtgcctgcagatgtgcggggcctggccccagctgccctgagcgccctgcccggggccctgctggcccaggcctggagggccctgctgcccggcctgcgctgccccaaggccggcaaggagagccggctgggccccccccacagcccctggaggtttggacctgagggctgtgaggagcgctgggccgagcacactggagacagcccccggcccctgcggggccggggcaccggccgcctgtggcgctggggcagcaaggagcggcgggcctgtggggtgcgggccatgctgccccggctggtgagcaacagcggcctgaagaggcccagctgcctggacctgcccaagtgctgggactacagaagagatgcccgggccttcttccacctgctggagcccaccccctgtgtgaccagccgccacacccccctcatctag

SEQ ID NO: 150503 - DNA, 234 bp, synthetic construct
  misc_feature 1..234: note = Description of Artificial Sequence: Synthetic coding sequence
  source 1..234: mol_type = other DNA
atggccaccctgggccacaccttccccttctacgccggccccaagcccaccttccccatggacaccaccctggccagcatcatcatgatcttcctgacagccctggccaccttcatcgtcatcctgcccggcatccggggcaagaccaggctcttctggctgctgcgggtggtgaccagcctcttcatcggggccgccatcctgggcacccctgtgcagcagctgaatgaatag

SEQ ID NO: 150504 - DNA, 219 bp, synthetic construct
  misc_feature 1..219: note = Description of Artificial Sequence: Synthetic coding sequence
  source 1..219: mol_type = other DNA
atggccaccctgggccacaccttccccttctacgccggccccaagcccaccttccccatggacaccaccctggccagcatcatcatgatcttcctgacagccctggccaccttcatcgtcatcctgcccggcatccggggcaagaccaggctcttctggctgctgcgggtggtgaccagcctcttcatcggggccgccatcctggccgtgaacttctag

SEQ ID NO: 150505 - DNA, 897 bp, synthetic construct
  misc_feature 1..897: note = Description of Artificial Sequence: Synthetic coding sequence
  source 1..897: mol_type = other DNA
atggccaccctgggccacaccttccccttctacgccggccccaagcccaccttccccatggacaccaccctggccagcatcatcatgatcttcctgacagccctggccaccttcatcgtcatcctgcccggcatccggggcaagaccaggctcttctggctgctgcgggtggtgaccagcctcttcatcggggccgccatcctgggcacccctgtgcagcagctgaatgagaccatcaactacaatgaggagttcacctggaggctgggagaaaattatgcagaggagtatgccaaggccctggagaagggcctgcctgaccctgtgctgtacctggccgagaagttcacccccaggagcccctgtggcctgtaccggcagtaccgcctggccggccactacaccagcgccatgctgtgggtggccttcctgtgctggctgctggccaacgtgatgctgtccatgcctgtgctggtgtatggaggctacatgctgctggccaccggcatcttccagctgctggccctgctcttcttctccatggccaccagcctgaccagcccctgccccctgcacctgggcgcctctgtgctgcacacccaccacggccctgccttctggatcaccctgaccaccggcctgctgtgtgtgctgctgggcctggccatggctgtggcccacaggatgcagccccaccggctgaaggccttcttcaaccagagcgtggatgaggaccccatgctggagtggagccctgaggagggcggcctgctgagcccccgctaccgctccatggctgacagccccaagagccaggacatccccctgtctgaggccagcagcaccaaggcctactgcaaggaggcccaccccaaggaccctgactgtgccctgtag

SEQ ID NO: 150506 - DNA, 42 bp, synthetic construct; identical to SEQ ID NO: 79710
  misc_feature 1..42: note = Description of Artificial Sequence: Synthetic coding sequence
  source 1..42: mol_type = other DNA

SEQ ID NO: 150507 - DNA, 897 bp, synthetic construct; identical to SEQ ID NO: 150505
  misc_feature 1..897: note = Description of Artificial Sequence: Synthetic coding sequence
  source 1..897: mol_type = other DNA

SEQ ID NO: 150508 - DNA, 1452 bp, synthetic construct; identical to SEQ ID NO: 150501
  misc_feature 1..1452: note = Description of Artificial Sequence: Synthetic coding sequence
  source 1..1452: mol_type = other DNA

SEQ ID NO: 150509 - DNA, 219 bp, synthetic construct
  misc_feature 1..219: note = Description of Artificial Sequence: Synthetic coding sequence
  source 1..219: mol_type = other DNA
atggccaccctgggccacaccttccccttctacgccggccccaagcccaccttccccatggacaccaccctggccagcatcatcatgatcttcctgacagccctggccaccttcatcgtcatcctgcccggcatccggggcaagaccaggctcttctggctgctgcgggtggtgaccagcctcttcatcggggccgccatcctgggcacccctgtgtag

SEQ ID NO: 150510 - DNA, 51 bp, synthetic construct; identical to SEQ ID NO: 79714
  misc_feature 1..51: note = Description of Artificial Sequence: Synthetic coding sequence
  source 1..51: mol_type = other DNA

SEQ ID NO: 150511 - DNA, 366 bp, synthetic construct
  misc_feature 1..366: note = Description of Artificial Sequence: Synthetic coding sequence
  source 1..366: mol_type = other DNA
atggccaccctgggccacaccttccccttctacgccggccccaagcccaccttccccatggacaccaccctggccagcatcatcatgatcttcctgacagccctggccaccttcatcgtcatcctgcccggcatccggggcaagaccaggctcttctggctgctgcgggtggtgaccagcctcttcatcggggccgccatcctggccgtgaacttcagcagcgagtggagcgtgggccaggtgtccaccaacaccagctacaaggccttcagcagcgagtggatctctgctgacatcggcctgcaggtgggcctgggcggcgtgaacatcaccctgaccggcacccctgtgcagcagctgaactag

SEQ ID NO: 150512 - DNA, 1032 bp, synthetic construct
  misc_feature 1..1032: note = Description of Artificial Sequence: Synthetic coding sequence
  source 1..1032: mol_type = other DNA
atggccaccctgggccacaccttccccttctacgccggccccaagcccaccttccccatggacaccaccctggccagcatcatcatgatcttcctgacagccctggccaccttcatcgtcatcctgcccggcatccggggcaagaccaggctcttctggctgctgcgggtggtgaccagcctcttcatcggggccgccatcctggccgtgaacttcagcagcgagtggagcgtgggccaggtgtccaccaacaccagctacaaggccttcagcagcgagtggatctctgctgacatcggcctgcaggtgggcctgggcggcgtgaacatcaccctgaccggcacccctgtgcagcagctgaatgagaccatcaactacaatgaggagttcacctggaggctgggggagaactatgcagaggagtatgccaaggccctggagaagggcctgcctgaccctgtgctgtacctggccgagaagttcacccccaggagcccctgtggcctgtaccggcagtaccgcctggccggccactacaccagcgccatgctgtgggtggccttcctgtgctggctgctggccaacgtgatgctgtccatgcctgtgctggtgtatggaggctacatgctgctggccaccggcatcttccagctgctggccctgctcttcttctccatggccaccagcctgaccagcccctgccccctgcacctgggcgcctctgtgctgcacacccaccacggccctgccttctggatcaccctgaccaccggcctgctgtgtgtgctgctgggcctggccatggctgtggcccacaggatgcagccccaccggctgaaggccttcttcaaccagagcgtggatgaggaccccatgctggagtggagccctgaggagggcggcctgctgagcccccgctaccgctccatggctgacagccccaagagccaggacatccccctgtctgaggccagcagcaccaaggcctactgcaaggaggcccaccccaaggaccctgactgtgccctgtag

SEQ ID NO: 150513 - DNA, 963 bp, synthetic construct
  misc_feature 1..963: note = Description of Artificial Sequence: Synthetic coding sequence
  source 1..963: mol_type = other DNA
atgaccctgtggaatggagtgctgcccttctacccccagcccaggcatgctgctggcttctctgtgcccctgctgattgtcatcctggtgttcctggccctggccgccagcttcctgctgatcctgcccggcatccggggccacagccgctggttctggctggtgcgggtgctgctgagcctcttcatcggggctgagatcgtggccgtgcacttctctgctgagtggtttgtgggcaccgtgaacaccaacaccagctacaaggccttctctgctgcccgggtgacagcccgggtgcggctgctggtgggcctggagggcatcaacatcaccctgaccggcacccctgtgcaccagctgaatgagaccatcgactacaatgagcagttcacctggaggctgaaggagaactatgctgctgaatatgccaatgccctggagaagggcctgcctgaccctgtgctgtacctggccgagaagttcacccccagcagcccctgtggcctgtaccaccagtaccacctggccggccactacgccagcgccaccctgtgggtggccttctgcttctggctgctgagcaatgtgctgctgagcaccccagcccccctgtatggaggcctggccctgctgaccactggagcctttgccctgtttggagtgtttgccctggccagcatcagctctgtgcccctgtgccccctgcggctgggcagcagcgccctgaccacccagtacggggccgccttctgggtgaccctggccaccggggtgctgtgcctcttcctgggcggcgctgtggtgtccctgcagtatgtgcggcccagcgccctgcggaccctgctggaccagagcgccaaggactgcagccaggagcggggcggcagccccctcatcctgggggaccccctgcacaagcaggccgccctgcctgacctgaagtgcatcaccaccaacctgtag

SEQ ID NO: 150514 - DNA, 1767 bp, synthetic construct
  misc_feature 1..1767: note = Description of Artificial Sequence: Synthetic coding sequence
  source 1..1767: mol_type = other DNA
atggagggagatggagtgccctggggcagcgagcctgtgtctggccctggccctgggggcggcggcatgatccgggagctgtgccggggcttcggccgctaccgccgctacctgggccgcctgcggcagaacctgcgggagacccagaagttcttccgggacatcaagtgcagccacaaccacacctgcctgagcagcctgaccggcggcggcggcgctgagcggggccctgctggagatgtggccgagaccggcctgcaggccggccagctgagctgcatctccttcccccccaaggaggagaagtacctgcagcagatcgtggactgcctgccctgcatcctgatcctgggccaggactgcaatgtgaagtgccagctgctgaacctgctgctgggcgtgcaggtgctgcccaccaccaagctgggcagcgaggagagctgcaagctgcggcggctgcgcttcacctacggcacccagaccagggtgtccctggccctgcccggccagtatgagctggtgcacaccctggtggcccaccagggcaactgggagaccatccctgaggaggacctggaggtgcaggagaacaatgaagatgctgcccacgtgctggccgagctggaggtgaccatgcaccacgccctgctgcaggaggtggatgtggtggtggccccctgccagggcctgcggcccaccgtggatgtgctgggggacctggtgaatgacttcctgcccgtcatcacctacgccctgcacaaggatgagctgtctgaaagagatgagcaggagctgcaggagatcaggaagtacttctccttccctgtgttcttcttcaaggtgcccaagctgggcagcgagatcatcgacagcagcaccaggaggatggagagcgagaggagccccctgtaccggcagctgattgacctgggctacctgagcagcagccactggaactgtggggcccctggccaggacaccaaggcccagagcatgctggtggagcagagcgagaagctgcggcacctgagcaccttcagccaccaggtgctgcagacccggctggtggatgctgccaaggccctgaacctggtgcactgccactgcctggacatcttcatcaaccaggcctttgacatgcagagggacctgcagatcacccccaagaggctggagtacaccaggaagaaggaaaatgagctgtatgagagcctgatgaacatcgccaacaggaagcaggaggagatgaaggacatgattgtggagaccctgaacaccatgaaggaggagctgctggatgatgccaccaacatggagttcaaggatgtgattgtgcctgaaaatggagagcccatcacagacctgggcttctgcaagccagaggccatgatgagcggcagcatcgtgggcacccccatccacatggcccctgagctgttcaccgggaagtatgacaacagcgtggatgtgtatgccttcggcatcctcttctggtacatctgcagcggctctgtgaagctgcctgaggcctttgagcgctgtgccagcaaggaccacctgtggaacaacgtgagaagaggagcccggcctgagcggctgcctgtgtttgatgaggagtgctggcagctgatggaggcctgctgggatggagaccccctgaagaggcccctgctgggcatcgtgcagcccatgctgcagggcatcatgaaccggctgtgcaagagcaacagcgagcagcccaacagaggcctggatgacagcacctag

SEQ ID NO: 150515 - DNA, 2655 bp, synthetic construct
  misc_feature 1..2655: note = Description of Artificial Sequence: Synthetic coding sequence
  source 1..2655: mol_type = other DNA
atggagggagatggagtgccctggggcagcgagcctgtgtctggccctggccctgggggcggcggcatgatccgggagctgtgccggggcttcggccgctaccgccgctacctgggccgcctgcggcagaacctgcgggagacccagaagttcttccgggacatcaagtgcagccacaaccacacctgcctgagcagcctgaccggcggcggcggcgctgagcggggccctgctggagatgtggccgagaccggcctgcaggccggccagctgagctgcatctccttcccccccaaggaggagaagtacctgcagcagatcgtggactgcctgccctgcatcctgatcctgggccaggactgcaatgtgaagtgccagctgctgaacctgctgctgggcgtgcaggtgctgcccaccaccaagctgggcagcgaggagagctgcaagctgcggcggctgcgcttcacctacggcacccagaccagggtgtccctggccctgcccggccagtatgagctggtgcacaccctggtggcccaccagggcaactgggagaccatccctgaggaggacctggaggtgcaggagaacaatgaagatgctgcccacgtgctggccgagctggaggtgaccatgcaccacgccctgctgcaggaggtggatgtggtggtggccccctgccagggcctgcggcccaccgtggatgtgctgggggacctggtgaatgacttcctgcccgtcatcacctacgccctgcacaaggatgagctgtctgaaagagatgagcaggagctgcaggagatcaggaagtacttctccttccctgtgttcttcttcaaggtgcccaagctgggcagcgagatcatcgacagcagcaccaggaggatggagagcgagaggagccccctgtaccggcagctgattgacctgggctacctgagcagcagccactggaactgtggggcccctggccaggacaccaaggcccagagcatgctggtggagcagagcgagaagctgcggcacctgagcaccttcagccaccaggtgctgcagacccggctggtggatgctgccaaggccctgaacctggtgcactgccactgcctggacatcttcatcaaccaggcctttgacatgcagagggacctgcagatcacccccaagaggctggagtacaccaggaagaaggaaaatgagctgtatgagagcctgatgaacatcgccaacaggaagcaggaggagatgaaggacatgattgtggagaccctgaacaccatgaaggaggagctgctggatgatgccaccaacatggagttcaaggatgtgattgtgcctgaaaatggagagcctgtgggcacccgggagatcaagtgctgcatccggcagatccaggagctgatcatcagccggctgaaccaggccgtggccaacaagctgatcagctctgtggactacctgcgggagagctttgtgggcaccctggagcgctgcctgcagagcctggagaagagccaggatgtgtctgtgcacatcaccagcaactacctgaagcagatcctgaatgctgcctaccacgtggaggtgaccttccacagcggcagctctgtgaccaggatgctgtgggagcagatcaagcagatcatccagaggatcacctgggtgtccccaccagccatcaccctggagtggaagaggaaggtggcccaggaggccatcgagagcctgagcgccagcaagctggccaagagcatctgcagccagttccgcacccggctgaacagcagccatgaggcctttgctgccagcctgcggcagctggaggccggccacagcggccgcctggagaagacagaggacctgtggctgcgggtgaggaaggaccacgccccccggctggcccggctgagcctggagagctgcagcctgcaggatgtgctgctgcacaggaagcccaagctgggccaggagctgggccggggccagtatggagtggtgtacctgtgtgacaactggggcggccacttcccctgtgccctgaagtctgtggtgcccccagatgagaagcactggaatgacctggccctggagttccactacatgaggagcctgcccaagcatgagcggctggtggacctgcacggcagcgtcatcgactacaactacggcggcggcagcagcattgctgtgctgctgatcatggagcggctgcaccgggacctgtacacaggcctgaaggccggcctgaccctggagacccggctgcagatcgccctggatgtggtggagggcatccgcttcctgcacagccagggcctggtgcaccgggacatcaagctgaagaatgtgctgctggacaagcagaacagagccaagatcacagacctgggcttctgcaagccagaggccatgatgagcggcagcatcgtgggcacccccatccacatggcccctgagctgttcaccggggcccggcctgagcggctgcctgtgtttgatgaggagtgctggcagctgatggaggcctgctgggatggagaccccctgaagaggcccctgctgggcatcgtgcagcccatgctgcagggcatcatgaaccggctgtgcaagagcaacagcgagcagcccaacagaggcctggatgacagcacctag

SEQ ID NO: 150516 - DNA, 2790 bp, synthetic construct
  misc_feature 1..2790: note = Description of Artificial Sequence: Synthetic coding sequence
  source 1..2790: mol_type = other DNA
atggagggagatggagtgccctggggcagcgagcctgtgtctggccctggccctgggggcggcggcatgatccgggagctgtgccggggcttcggccgctaccgccgctacctgggccgcctgcggcagaacctgcgggagacccagaagttcttccgggacatcaagtgcagccacaaccacacctgcctgagcagcctgaccggcggcggcggcgctgagcggggccctgctggagatgtggccgagaccggcctgcaggccggccagctgagctgcatctccttcccccccaaggaggagaagtacctgcagcagatcgtggactgcctgccctgcatcctgatcctgggccaggactgcaatgtgaagtgccagctgctgaacctgctgctgggcgtgcaggtgctgcccaccaccaagctgggcagcgaggagagctgcaagctgcggcggctgcgcttcacctacggcacccagaccagggtgtccctggccctgcccggccagtatgagctggtgcacaccctggtggcccaccagggcaactgggagaccatccctgaggaggacctggaggtgcaggagaacaatgaagatgctgcccacgtgctggccgagctggaggtgaccatgcaccacgccctgctgcaggaggtggatgtggtggtggccccctgccagggcctgcggcccaccgtggatgtgctgggggacctggtgaatgacttcctgcccgtcatcacctacgccctgcacaaggatgagctgtctgaaagagatgagcaggagctgcaggagatcaggaagtacttctccttccctgtgttcttcttcaaggtgcccaagctgggcagcgagatcatcgacagcagcaccaggaggatggagagcgagaggagccccctgtaccggcagctgattgacctgggctacctgagcagcagccactggaactgtggggcccctggccaggacaccaaggcccagagcatgctggtggagcagagcgagaagctgcggcacctgagcaccttcagccaccaggtgctgcagacccggctggtggatgctgccaaggccctgaacctggtgcactgccactgcctggacatcttcatcaaccaggcctttgacatgcagagggacctgcagatcacccccaagaggctggagtacaccaggaagaaggaaaatgagctgtatgagagcctgatgaacatcgccaacaggaagcaggaggagatgaaggacatgattgtggagaccctgaacaccatgaaggaggagctgctggatgatgccaccaacatggagttcaaggatgtgattgtgcctgaaaatggagagcctgtgggcacccgggagatcaagtgctgcatccggcagatccaggagctgatcatcagccggctgaaccaggccgtggccaacaagctgatcagctctgtggactacctgcgggagagctttgtgggcaccctggagcgctgcctgcagagcctggagaagagccaggatgtgtctgtgcacatcaccagcaactacctgaagcagatcctgaatgctgcctaccacgtggaggtgaccttccacagcggcagctctgtgaccaggatgctgtgggagcagatcaagcagatcatccagaggatcacctgggtgtccccaccagccatcaccctggagtggaagaggaaggtggcccaggaggccatcgagagcctgagcgccagcaagctggccaagagcatctgcagccagttccgcacccggctgaacagcagccatgaggcctttgctgccagcctgcggcagctggaggccggccacagcggccgcctggagaagacagaggacctgtggctgcgggtgaggaaggaccacgccccccggctggcccggctgagcctggagagctgcagcctgcaggatgtgctgctgcacaggaagcccaagctgggccaggagctgggccggggccagtatggagtggtgtacctgtgtgacaactggggcggccacttcccctgtgccctgaagtctgtggtgcccccagatgagaagcactggaatgacctggccctggagttccactacatgaggagcctgcccaagcatgagcggctggtggacctgcacggcagcgtcatcgactacaactacggcggcggcagcagcattgctgtgctgctgatcatggagcggctgcaccgggacctgtacacaggcctgaaggccggcctgaccctggagacccggctgcagatcgccctggatgtggtggagggcatccgcttcctgcacagccagggcctggtgcaccgggacatcaagctgaagaatgtgctgctggacaagcagaacagagccaagatcacagacctgggcttctgcaagccagaggccatgatgagcggcagcatcgtgggcacccccatccacatggcccctgagctgttcaccgggaagtatgacaacagcgtggatgtgtatgccttcggcatcctcttctggtacatctgcagcggctctgtgaagctgcctgaggcctttgagcgctgtgccagcaaggaccacctgtggaacaacgtgcggcggggggcccggcctgagcggctgcctgtgtttgatgaggagtgctggcagctgatggaggcctgctgggatggagaccccctgaagaggcccctgctgggcatcgtgcagcccatgctgcagggcatcatgaaccggctgtgcaagagcaacagcgagcagcccaacagaggcctggatgacagcacctag

SEQ ID NO: 150517 - DNA, 1104 bp, synthetic construct
  misc_feature 1..1104: note = Description of Artificial Sequence: Synthetic coding sequence
  source 1..1104: mol_type = other DNA
atggtgatggaggtgggcaccctggatgctgggggcctgcgggccctgctgggggagagagctgcccagtgcctgctgctggactgccgctccttctttgccttcaatgccggccacatcgccggctctgtgaatgtgcgcttcagcaccatcgtgagaagaagagccaagggggccatgggcctggagcacatcgtgcccaatgctgagctgcggggccgcctgctggccggggcctaccacgctgtggtgctgctggatgagaggtctgctgccctggatggagccaagagagatggcaccctggccctggccgccggggccctgtgccgggaggcccgggccgcccaggtgttcttcctgaagggcggctatgaggccttcagcgccagctgcccagagctgtgcagcaagcagagcacccccatgggcctgagcctgcccctgagcacctctgtgcctgacagcgctgagagcggctgcagcagctgcagcacccccctgtatgaccagggcggccctgtggagatcctgcccttcctgtacctgggcagcgcctaccacgccagcaggaaggacatgctggatgccctgggcatcacagccctgatcaacgtgtctgccaactgccccaaccactttgagggccactaccagtacaagagcatccctgtggaggacaaccacaaggctgacatcagctcctggttcaatgaggccatcgacttcatcgacagcatcaagaatgctgggggccgggtgtttgtgcactgccaggccggcatcagccgcagcgccaccatctgcctggcctacctgatgaggaccaacagagtgaagctggatgaggcctttgaatttgtgaagcagaggaggagcatcatcagccccaacttctccttcatgggccagctgctgcagtttgagagccaggtgctggccccccactgcagcgctgaggccggcagccctgccatggctgtgctggaccggggcaccagcaccaccaccgtcttcaacttccctgtgtccatccctgtgcacagcaccaacagcgccctgagctacctgcagagccccatcaccaccagccccagctgctag

SEQ ID NO: 150518 - DNA, 909 bp, synthetic construct
  misc_feature 1..909: note = Description of Artificial Sequence: Synthetic coding sequence
  source 1..909: mol_type = other DNA
atggtgatggaggtgggcaccctggatgctgggggcctgcgggccctgctgggggagagagctgcccagtgcctgctgctggactgccgctccttctttgccttcaatgccggccacatcgccggctctgtgaatgtgcgcttctctgctgcccaggtgttcttcctgaagggcggctatgaggccttcagcgccagctgcccagagctgtgcagcaagcagagcacccccatgggcctgagcctgcccctgagcacctctgtgcctgattctgctgagagcggctgcagcagctgcagcacccccctgtatgaccagggcggccctgtggagatcctgcccttcctgtacctgggcagcgcctaccacgccagcaggaaggacatgctggatgccctgggcatcacagccctgatcaacgtgtctgccaactgccccaaccactttgagggccactaccagtacaagagcatccctgtggaggacaaccacaaggctgacatcagctcctggttcaatgaggccatcgacttcatcgacagcatcaagaatgccggcggccgggtgtttgtgcactgccaggccggcatcagccgcagcgccaccatctgcctggcctacctgatgaggaccaacagagtgaagctggatgaggcctttgaatttgtgaagcagaggaggagcatcatcagccccaacttctccttcatgggccagctgctgcagtttgagagccaggtgctggccccccactgcagcgctgaggccggcagccctgccatggctgtgctggaccggggcaccagcaccaccaccgtcttcaacttccctgtgtccatccctgtgcacagcaccaacagcgccctgagctacctgcagagccccatcaccaccagccccagctgctag

SEQ ID NO: 150519 - DNA, 1023 bp, synthetic construct
  misc_feature 1..1023: note = Description of Artificial Sequence: Synthetic coding sequence
  source 1..1023: mol_type = other DNA
atggtgatggaggtgggcaccctggatgctgggggcctgcgggccctgctgggggagagagctgcccagtgcctgctgctggactgccgctccttctttgccttcaatgccggccacatcgccggctctgtgaatgtgcgcttcagcaccatcgtgagaagaagagccaagggggccatgggcctggagcacatcgtgcccaatgccaagagagatggcaccctggccctggccgccggggccctgtgccgggaggcccgggccgcccaggtgttcttcctgaagggcggctatgaggccttcagcgccagctgcccagagctgtgcagcaagcagagcacccccatgggcctgagcctgcccctgagcacctctgtgcctgattctgctgagagcggctgcagcagctgcagcacccccctgtatgaccagggcggccctgtggagatcctgcccttcctgtacctgggcagcgcctaccacgccagcaggaaggacatgctggatgccctgggcatcacagccctgatcaacgtgtctgccaactgccccaaccactttgagggccactaccagtacaagagcatccctgtggaggacaaccacaaggctgacatcagctcctggttcaatgaggccatcgacttcatcgacagcatcaagaatgccggcggccgggtgtttgtgcactgccaggccggcatcagccgcagcgccaccatctgcctggcctacctgatgaggaccaacagagtgaagctggatgaggcctttgaatttgtgaagcagaggaggagcatcatcagccccaacttctccttcatgggccagctgctgcagtttgagagccaggtgctggccccccactgcagcgctgaggccggcagccctgccatggctgtgctggaccggggcaccagcaccaccaccgtcttcaacttccctgtgtccatccctgtgcacagcaccaacagcgccctgagctacctgcagagccccatcaccaccagccccagctgctag

SEQ ID NO: 150520 - DNA, 1134 bp, synthetic construct
  misc_feature 1..1134: note = Description of Artificial Sequence: Synthetic coding sequence
  source 1..1134: mol_type = other DNA
atgaggaacagcgagaccctggagcggggcgtgggcggctgcagggtcttcagctgcctgggcagctacccaggcatcgagggcgccggcctggccctgctggccgacctggccctgggcggccgcctgctgggcacccacatgagccagtggcaccaccccaggagcggctggggcagaagaagagacttcagcggccgcagcagcgccaagaagaagggcggcaaccacatccctgagcgctggaaggactacctgcctgtgggccagaggatgcctggcacccgcttcatcgccttcaaggtgcccctgcagaagagctttgagaagaagctggcccctgaggagtgcttcagccccctggacctcttcaacaagatccgggagcagaatgaggagctgggcctcatcatcgacctgacctacacccagcgctactacaagccagaggacctgcctgagaccgtgccctacctgaagatcttcaccgtgggccaccaggtgcctgatgatgagaccatcttcaagttcaagcatgctgtgaatggcttcctgaaggagaacaaggacaatgacaagctgattggagtgcactgcacccacggcctgaacagaacaggctacctgatctgccgctacctgattgatgtggagggcgtgcggccagatgatgccatcgagctgttcaaccgctgccggggccactgcctggagcggcagaactacatcgaggacctgcagaatggccccatcaggaagaactggaacagctctgtgcccaggagcagtgactttgaggacagcgcccacctgatgcagcctgtgcacaacaagcctgtgaagcagggcccccgctacaacctgcaccagatccagggccacagcgcccccaggcacttccacacccagacccagagcctgcagcagagcgtgaggaagttcagcgagaacccccacgtgtaccagaggcaccacctgcccccacctggccccccaggagaggactacagccaccggcgctacagctggaatgtgaagcccaatgccagccgggccgcccaggacagaagacgctggtacccctacaactacagccggctgagctacccagcctgctgggagtggacccagtag

SEQ ID NO: 150521 - DNA, 681 bp, synthetic construct
  misc_feature 1..681: note = Description of Artificial Sequence: Synthetic coding sequence
  source 1..681: mol_type = other DNA
atgagccagtggcaccaccccaggagcggctggggcagaagaagagacttcagcggccgcagcagcgccaagaagaagggcggcaaccacatccctgagcgctggaaggactacctgcctgtgggccagaggatgcctggcacccgcttcatcgccttcaaggtgcccctgcagaagagctttgagaagaagctggcccctgaggagtgcttcagccccctggacctcttcaacaagatccgggagcagaatgaggagctgggcctcatcatcgacctgacctacacccagcgctactacaagccagaggacctgcctgagaccgtgccctacctgaagatcttcaccgtgggccaccaggtgcctgatgatgagaccatcttcaagttcaagcatgctgtgaatggcttcctgaaggagaacaaggacaatgacaagctgattggagtgcactgcacccacggcctgaacagaacaggctacctgatctgcagaagaagcctggccctgagcccccggctggagtgcagcggcaccatcagcacccacagcaagttctgcttccctggcagccgccgcagccctgccagcgccagccaggtggccggcaccactggagcccggcaccacgcccggctcatcttctgcatcttcagcagagatgtggtgagcccctgctag

SEQ ID NO: 150522 - DNA, 822 bp, synthetic construct
  misc_feature 1..822: note = Description of Artificial Sequence: Synthetic coding sequence
  source 1..822: mol_type = other DNA
atgaggaacagcgagaccctggagcggggcgtgggcggctgcagggtcttcagctgcctgggcagctacccaggcatcgagggcgccggcctggccctgctggccgacctggccctgggcggccgcctgctgggcacccacatgagccagtggcaccaccccaggagcggctggggcagaagaagagacttcagcggccgcagcagcgccaagaagaagggcggcaaccacatccctgagcgctggaaggactacctgcctgtgggccagaggatgcctggcacccgcttcatcgccttcaaggtgcccctgcagaagagctttgagaagaagctggcccctgaggagtgcttcagccccctggacctcttcaacaagatccgggagcagaatgaggagctgggcctcatcatcgacctgacctacacccagcgctactacaagccagaggacctgcctgagaccgtgccctacctgaagatcttcaccgtgggccaccaggtgcctgatgatgagaccatcttcaagttcaagcatgctgtgaatggcttcctgaaggagaacaaggacaatgacaagctgattggagtgcactgcacccacggcctgaacagaacaggctacctgatctgccgccgcagcctggccctgagcccccggctggagtgcagcggcaccatcagcacccacagcaagttctgcttccctggcagcagaagaagccctgccagcgccagccaggtggccggcaccaccggggcccggcaccacgcccggctcatcttctgcatcttcagcagagatgtggtgagcccctgctag

SEQ ID NO: 150523 - DNA, 597 bp, synthetic construct
  misc_feature 1..597: note = Description of Artificial Sequence: Synthetic coding sequence
  source 1..597: mol_type = other DNA
atggacagcctgcagaagcaggacctgcggcggcccaagatccatggagctgtgcaggccagcccctaccagccccccaccctggccagcctgcagaggctgctgtgggtgcggcaggccgccaccctgaaccacattgatgaggtgtggcccagcctcttcctgggagatgcctatgctgcccgggacaagagcaagctgatccagctgggcatcacccacgtggtgaatgctgctgctgggaagttccaggtggacacaggagccaagttctaccggggcatgagcctggagtactacggcatcgaggctgatgacaaccccttctttgacctgtctgtgtacttcctgcctgtggcccgctacatccgggccgccctgtctgtgccccagggccgggtgctggtgcactgtgccatgggcgtgagccgcagcgccaccctggtgctggccttcctgatgatctgtgagaacatgaccctggtggaggccatccagacagtgcaggcccacaggaacatctgccccaacagcggcttcctgcggcagctgcaggtgctggacaaccggctgggccgggagaccggccgcttctag

SEQ ID NO: 150524 - DNA, 747 bp, synthetic construct
  misc_feature 1..747: note = Description of Artificial Sequence: Synthetic coding sequence
  source 1..747: mol_type = other DNA
atggccgagaccagcctgcctgagctgggcggggaggacaaggccaccccctgccccagcatcctggagctggaggagctgctgcgggccggcaagagcagctgcagccgggtggatgaggtgtggcccaacctcttcatcggagatgccatggacagcctgcagaagcaggacctgcggcggcccaagatccatggagctgtgcaggccagcccctaccagccccccaccctggccagcctgcagaggctgctgtgggtgcggcaggccgccaccctgaaccacattgatgaggtgtggcccagcctcttcctgggagatgcctatgctgcccgggacaagagcaagctgatccagctgggcatcacccacgtggtgaatgctgctgctgggaagttccaggtggacacaggagccaagttctaccggggcatgagcctggagtactacggcatcgaggctgatgacaaccccttctttgacctgtctgtgtacttcctgcctgtggcccgctacatccgggccgccctgtctgtgccccagggccgggtgctggtgcactgtgccatgggcgtgagccgcagcgccaccctggtgctggccttcctgatgatctgtgagaacatgaccctggtggaggccatccagacagtgcaggcccacaggaacatctgccccaacagcggcttcctgcggcagctgcaggtgctggacaaccggctgggccgggagaccggccgcttctag

SEQ ID NO: 150525 - DNA, 567 bp, synthetic construct
  misc_feature 1..567: note = Description of Artificial Sequence: Synthetic coding sequence
  source 1..567: mol_type = other DNA
atggccgagaccagcctgcctgagctgggcggggaggacaaggccaccccctgccccagcatcctggagctggaggagctgctgcgggccggcaagagcagctgcagccgggtggatgaggtgtggcccaacctcttcatcggagatgctgccacagccaacaacagatttgagctgtggaagctgggcatcacccacgtgctgaatgctgcccacaagggcctgtactgccagggcggccctgacttctacggcagctctgtgtcctacctgggcgtgcctgcccatgacctgcctgactttgacatcagcgcctacttcagcagcgctgctgacttcatccaccgggccctgaacacccctggggccaaggtgctggtgcactgtgtggtgggcgtgagccgcagcgccaccctggtgctggcctacctgatgctgcaccagaggctgagcctgcggcaggccgtcatcaccgtgcggcagcaccgctgggtgttccccaacagaggcttcctgcaccagctgtgccgcctggaccagcagctgcggggagctggccagagctag

SEQ ID NO: 150526 - DNA, 876 bp, synthetic construct
  misc_feature 1..876: note = Description of Artificial Sequence: Synthetic coding sequence
  source 1..876: mol_type = other DNA
atgggcctgtgccactttgccaccctggccctgatcctgctggtgctgctggaggccctggcccaggccgacacccagaagatggtggaggcccagaggggcgtgggcccccgggcctgctacagcatctggctgctgctggcccccaccccacccctgagccactgcctgcagagcccccagaagcagcaccaggtgtgtggggaccggcggctgaaggccagcagcaccaactgccccagcgagaagtgcacagcctgggcccgctacagccacaggatggacagcctgcagaagcaggacctgcggcggcccaagatccacggggctgtgcaggccagcccctaccagccccccaccctggccagcctgcagaggctgctgtgggtgcggcaggccgccaccctgaaccacattgatgaggtgtggcccagcctcttcctgggagatgcctatgctgcccgggacaagagcaagctgatccagctgggcatcacccacgtggtgaatgctgctgctgggaagttccaggtggacaccggggccaagttctaccggggcatgagcctggagtactatggaattgaagcagatgacaaccccttctttgacctgtctgtgtacttcctgcctgtggcccgctacatccgggccgccctgtctgtgccccagggccgggtgctggtgcactgtgccatgggcgtgagccgcagcgccaccctggtgctggccttcctgatgatctgtgagaacatgaccctggtggaggccatccagacagtgcaggcccacaggaacatctgccccaacagcggcttcctgcggcagctgcaggtgctggacaaccggctgggccgggagaccggccgcttctag

SEQ ID NO: 150527 - DNA, 597 bp, synthetic construct; identical to SEQ ID NO: 150523
  misc_feature 1..597: note = Description of Artificial Sequence: Synthetic coding sequence
  source 1..597: mol_type = other DNA

SEQ ID NO: 150528 - DNA, 984 bp, synthetic construct
  misc_feature 1..984: note = Description of Artificial Sequence: Synthetic coding sequence
  source 1..984: mol_type = other DNA
atgggcctgccccagccccggctgcctgccccagccctgcaggccggccctgccacagctggctgcaggcctgagctgcggggccagagctggagcctgctgcctgccatgggcctgtgccactttgccaccctggccctgatcctgctggtgctgctggaggccctggcccaggccgacacccagaagatggtggaggcccagaggggcgtgggcccccgggcctgctacagcatctggctgctgctggcccccaccccacccctgagccactgcctgcagagcccccagaagcagcaccaggtgtgtggggaccggcggctgaaggccagcagcaccaactgccccagcgagaagtgcacagcctgggcccgctacagccacaggatggacagcctgcagaagcaggacctgcggcggcccaagatccacggggctgtgcaggccagcccctaccagccccccaccctggccagcctgcagaggctgctgtgggtgcggcaggccgccaccctgaaccacattgatgaggtgtggcccagcctcttcctgggagatgcctatgctgcccgggacaagagcaagctgatccagctgggcatcacccacgtggtgaatgctgctgctgggaagttccaggtggacaccggggccaagttctaccggggcatgagcctggagtactatggaattgaagcagatgacaaccccttctttgacctgtctgtgtacttcctgcctgtggcccgctacatccgggccgccctgtctgtgccccagggccgggtgctggtgcactgtgccatgggcgtgagccgcagcgccaccctggtgctggccttcctgatgatctgtgagaacatgaccctggtggaggccatccagacagtgcaggcccacaggaacatctgccccaacagcggcttcctgcggcagctgcaggtgctggacaaccggctgggccgggagaccggccgcttctag

SEQ ID NO: 150529 - DNA, 597 bp, synthetic construct
  misc_feature 1..597: note = Description of Artificial Sequence: Synthetic coding sequence
  source 1..597: mol_type = other DNA
atgagcagccggggccacagcaccctgcccaggaccctgatggcccccaggatgatcagcgagggggacatcggcggcatcgcccagatcaccagcagcctcttcctgggccggggctctgtggccagcaacagacacctgctgcaggcccggggcatcacctgcatcgtgaatgccaccatcgagatccccaacttcaactggccccagtttgaatatgtgaaggtgcccctggccgacatgcctcatgcccccatcggcctgtactttgacacagtggccgacaagatccacagcgtgtccaggaagcacggggccaccctggtgcactgtgccgccggcgtgagccgcagcgccaccctgtgcatcgcctacctgatgaagttccacaacgtgtgcctgctggaggcctacaactgggtgaaggcccggcggcctgtgatccggcccaacgtgggcttctggaggcagctgattgattatgagcggcagctgtttgggaagagcacagtgaagatggtgcagaccccctacggcatcgtgcctgatgtgtatgagaaggagagccgccacctgatgccctactggggcatctag

SEQ ID NO: 150530 - DNA, 597 bp, synthetic construct; identical to SEQ ID NO: 150529
  misc_feature 1..597: note = Description of Artificial Sequence: Synthetic coding sequence
  source 1..597: mol_type = other DNA

SEQ ID NO: 150531 - DNA, 945 bp, synthetic construct
  misc_feature 1..945: note = Description of Artificial Sequence: Synthetic coding sequence
  source 1..945: mol_type = other DNA
atgggcctggaggccgcccgggagctggagtgtgccgccctgggcaccctgctgcgggacccccgggaggccgagaggaccctgctgctggactgccggcccttcctggccttctgccgccgccacgtgcgggccgcccggcctgtgccctggaatgccctgctgcggcggcgggcccggggccccccagctgctgtgctggcctgcctgctgcctgaccgggccctgcggacccggctggtgcggggggagctggcccgggctgtggtgctggatgagggcagcgcctctgtggccgagctgcggccagacagccctgcccacgtgctgctggccgccctgctgcacgagacccgggccggccccacagctgtgtacttcctgcggggcggctttgatggcttccagggctgctgcccagacctgtgcagcgaggccccagccccagccctgccccccaccggggacaagaccagcagaagtgacagccgggcccctgtgtatgaccagggcggccctgtggagatcctgccctacctgttcctgggcagctgcagccacagcagtgacctgcagggcctgcaggcctgtggcatcacagctgtgctgaatgtgtctgccagctgccccaaccactttgagggcctcttccgctacaagagcatccctgtggaggacaaccagatggtggagatcagcgcctggttccaggaggccatcggcttcatcgactgggtgaagaacagcggcggccgggtgctggtgcactgccaggccggcatcagccgcagcgccaccatctgcctggcctacctgatgcagagccggcgggtgcggctggatgaggcctttgattttgtgaagcagaggcggggcgtcatcagccccaacttctccttcatgggccagctgctgcagtttgagacccaggtgctgtgccactag

SEQ ID NO: 150532 - DNA, 288 bp, synthetic construct
  misc_feature 1..288: note = Description of Artificial Sequence: Synthetic coding sequence
  source 1..288: mol_type = other DNA
atggctgctgcccggctgtgcctgagcctgctgctgctgagcacctgtgtggccctgctgctgcagcccctgctgggcgcccagggcgcccccctggagcctgtgtacccaggggacaatgccaccccagagcagatggcccagtatgctgctgacctgcggcgctacatcaacatgctgacccggcccaggtatggcaagaggcacaaggaggacaccctggccttcagcgagtggggcagcccccacgccgctgtgccccgggagctgagccccctggacctgtag

SEQ ID NO: 150533 - DNA, 435 bp, synthetic construct
  misc_feature 1..435: note = Description of Artificial Sequence: Synthetic coding sequence
  source 1..435: mol_type = other DNA
atgtctgtggcccaggacatccccaagctgcagaagctgggcatcacccacgtgctgaatgctgctgagggccgctccttcatgcacgtgaacaccaatgccaacttctacaaggacagcggcatcacctacctgggcatcaaggccaatgacacccaggagttcaacctgagcgcctactttgaaagagctgctgacttcatcgaccaggccctggcccagaagaatggccgggtgctggtgcactgccgggagggctacagccgcagccccaccctggtgattgcctacctgatgatgaggcagaagatggatgtgaagagcgccctgagcatcgtgcggcagaaccgggagatcggccccaatgatggcttcctggcccagctgtgccagctgaatgaccggctggccaaggagggcaagctgaagccctag

SEQ ID NO: 150534 - DNA, 1185 bp, synthetic construct
  misc_feature 1..1185: note = Description of Artificial Sequence: Synthetic coding sequence
  source 1..1185: mol_type = other DNA
atggtgaccatggaggagctgcgggagatggactgcagcgtgctgaagaggctgatgaacagagatgaaaatggaggaggagctgggggcagcggcagccacggcaccctgggcctgcccagcggcggcaagtgcctgctgctggactgccggcccttcctggcccacagcgctggctacatcctgggctctgtgaatgtgcgctgcaacaccatcgtgagaagaagagccaagggctctgtgtccctggagcagatcctgcctgctgaggaggaggtgcgggcccggctgcggagcggcctgtacagcgctgtgattgtgtatgatgagaggagccccagggctgagagcctgcgggaggacagcacagtgtccctggtggtgcaggccctgcggagaaatgctgagaggacagacatctgcctgctgaagggcggctatgagcgcttcagcagcgagtacccagagttctgcagcaagaccaaggccctggccgccatccccccacctgtgccccccagcgccacagagcccctggacctgggctgcagcagctgtggcacccccctgcatgaccagggcggccctgtggagatcctgcccttcctgtacctgggcagcgcctaccacgccgcccggcgggacatgctggatgccctgggcatcacagccctgctgaatgtgtccagtgactgccccaaccactttgagggccactaccagtacaagtgcatccctgtggaggacaaccacaaggctgacatcagctcctggttcatggaggccatcgagtacattgatgctgtgaaggactgccggggccgggtgctggtgcactgccaggccggcatcagccgcagcgccaccatctgcctggcctacctgatgatgaagaagagggtgcggctggaggaggcctttgaatttgtgaagcagaggaggagcatcatcagccccaacttctccttcatgggccagctgctgcagtttgagagccaggtgctggccaccagctgtgccgctgaggccgccagccccagcggccccctgcgggagcggggcaagaccccagccacccccaccagccagtttgtgttctccttccctgtgtctgtgggcgtgcacagcgcccccagcagcctgccctacctgcacagccccatcaccaccagccccagctgctag

SEQ ID NO: 150535 - DNA, 912 bp, synthetic construct
  misc_feature 1..912: note = Description of Artificial Sequence: Synthetic coding sequence
  source 1..912: mol_type = other DNA
atgggcaggaaggtgcacagcaatggcagccagtttgctgagcacagccgcagccccaggagaacaggccgggactgcaagcctgtgcgggcccccagcatggccctgggcgtgtcccagctggccggccgcagccgctgcctgtgcagcgagagccagggcggctatgagcgcttcagcagcgagtacccagagttctgcagcaagaccaaggccctggccgccatccccccacctgtgcccccatctgccacagagcccctggacctgggctgcagcagctgtggcacccccctgcatgaccagggcggccctgtggagatcctgcccttcctgtacctgggcagcgcctaccacgccgcccggcgggacatgctggatgccctgggcatcacagccctgctgaatgtgtccagtgactgccccaaccactttgagggccactaccagtacaagtgcatccctgtggaggacaaccacaaggctgacatcagctcctggttcatggaggccatcgagtacattgatgctgtgaaggactgccggggccgggtgctggtgcactgccaggccggcatcagccgcagcgccaccatctgcctggcctacctgatgatgaagaagagggtgcggctggaggaggcctttgaatttgtgaagcagaggaggagcatcatcagccccaacttctccttcatgggccagctgctgcagtttgagagccaggtgctggccaccagctgtgccgctgaggccgccagccccagcggccccctgcgggagcggggcaagaccccagccacccccaccagccagtttgtgttctccttccctgtgtctgtgggcgtgcacagcgcccccagcagcctgccctacctgcacagccccatcaccaccagccccagctgctag

SEQ ID NO: 150536 - DNA, 1155 bp, synthetic construct
  misc_feature 1..1155: note = Description of Artificial Sequence: Synthetic coding sequence
  source 1..1155: mol_type = other DNA
atgaaggtgaccagcctggatggccggcagctgaggaagatgctgaggaaggaggccgccgcccgctgtgtggtgctggactgccggccctacctggcctttgctgccagcaatgtgcggggcagcctgaatgtgaacctgaacagcgtggtgctgcggcgggcccggggcggcgctgtgtctgcccgctacgtgctgcctgatgaggccgcccgggcccggctgctgcaggagggcggcggcggcgtggccgctgtggtggtgctggaccagggcagccgccactggcagaagctgcgggaggagagcgctgcccgggtggtgctgaccagcctgctggcctgcctgcctgctggcccccgggtgtacttcctgaagggcggctatgagaccttctacagcgagtacccagagtgctgcgtggatgtgaagcccatcagccaggagaagattgaaagtgagcgggccctgatcagccagtgtgggaagcctgtggtgaatgtgtcctacagacctgcctatgaccagggcggccctgtggagatcctgcccttcctgtacctgggcagcgcctaccacgccagcaaatgtgagttcctggccaacctgcacatcacagccctgctgaatgtgtccaggaggaccagcgaggcctgtgccacccacctgcactacaagtggatccctgtggaggacagccacacagctgacatcagcagccacttccaggaggccatcgacttcatcgactgtgtgcgggagaagggcggcaaggtgctggtgcactgtgaggccggcatcagccgcagccccaccatctgcatggcctacctgatgaagaccaagcagttccggctgaaggaggcctttgactacatcaagcagaggaggtccatggtgagccccaactttggcttcatgggccagctgctgcagtatgaaagtgagatcctgcccagcacccccaacccccagccccccagctgccagggcgaggccgccggcagcagcctgattggccacctgcagaccctgagcccagacatgcagggcgcctactgcaccttccctgcctctgtgctggcccctgtgcccacccacagcacagtgtctgagctgagccgcagccctgtggccacagccaccagctgctag

SEQ ID NO: 150537 - DNA, 1107 bp, synthetic construct
  misc_feature 1..1107: note = Description of Artificial Sequence: Synthetic coding sequence
  source 1..1107: mol_type = other DNA
atgccctgcaagtctgctgagtggctgcaggaggagctggaggcccggggcggggccagcctgctgctgctggactgccggccccatgagctgtttgagagcagccacattgaaacagccatcaacctggccatccctggcctgatgctgcggcggctgaggaaaggaaacctgcccatccgcagcatcatccccaaccacgccgacaaggagagatttgccacccgctgcaaggccgccaccgtgctgctgtatgatgaggccacagctgagtggcagcctgagcccggggccccagcctctgtgctgggcctgctgctgcagaagctgagagatgatggctgccaggcctactacctgcagggcggcttcaacaagttccagacagagtacagcgagcactgtgagaccaacgtggacagcagcagcagccccagcagcagcccccccacctctgtgctgggcctgggcggcctgcgcatcagcagtgactgcagtgatggagagagtgaccgggagctgcccagcagcgccacagaaagtgatggcagccctgtgcccagcagccagcctgccttccctgtgcagatcctgccctacctgtacctgggctgtgccaaggacagcaccaacctggatgtgctgggcaagtatggcatcaagtacatcctgaatgtgacccccaacctgcccaatgcctttgagcacggcggggagttcacctacaagcagatccccatcagtgaccactggagccagaacctgagccagttcttccctgaggccatctccttcattgatgaggcccggagcaagaagtgtggggtgctggtgcactgcctggccggcatcagccgctctgtgacagtgacagtggcctacctgatgcagaagatgaacctgagcctgaatgatgcctatgactttgtgaagaggaagaagagcaacatcagccccaacttcaacttcatgggccagctgctggactttgagaggaccctgggcctgagcagcccctgtgacaaccacgccagcagcgagcagctgtacttcagcacccccaccaaccacaacctcttccccctgaacaccctggagagcacctag

SEQ ID NO: 150538 - DNA, 1260 bp, synthetic construct
  misc_feature 1..1260: note = Description of Artificial Sequence: Synthetic coding sequence
  source 1..1260: mol_type = other DNA
atgaagaaccagctgcggggccccccagcccgggcccacatgagcaccagcggggctgctgctgctgggggcaccagggctggcagcgagcctggagctggcagcggcagcggggccggcactggagctggagctgccactggagctggggccatgccctgcaagtctgctgagtggctgcaggaggagctggaggcccggggcggggccagcctgctgctgctggactgccggccccatgagctgtttgagagcagccacatcgagacagccatcaacctggccatccctggcctgatgctgcggcggctgaggaagggcaacctgcccatccgcagcatcatccccaaccacgccgacaaggagagatttgccacccgctgcaaggccgccaccgtgctgctgtatgatgaggccacagctgagtggcagcctgagcccggggccccagcctctgtgctgggcctgctgctgcagaagctgagagatgatggctgccaggcctactacctgcagggcggcttcaacaagttccagacagagtacagcgagcactgtgagaccaacgtggacagcagcagcagccccagcagcagcccccccacctctgtgctgggcctgggcggcctgcgcatcagcagtgactgcagtgatggagagagtgaccgggagctgcccagcagcgccacagaaagtgatggcagccctgtgcccagcagccagcctgccttccctgtgcagatcctgccctacctgtacctgggctgtgccaaggacagcaccaacctggatgtgctgggcaagtatggcatcaagtacatcctgaatgtgacccccaacctgcccaatgcctttgaacatggaggagagttcacctacaagcagatccccatcagtgaccactggagccagaacctgagccagttcttccctgaggccatctccttcattgatgaggcccggagcaagaagtgtggggtgctggtgcactgcctggccggcatcagccgctctgtgacagtgacagtggcctacctgatgcagaagatgaacctgagcctgaatgatgcctatgactttgtgaagaggaagaagagcaacatcagccccaacttcaacttcatgggccagctgctggactttgagaggaccctgggcctgagcagcccctgtgacaaccacgccagcagcgagcagctgtacttcagcacccccaccaaccacaacctcttccccctgaacaccctggagagcacctag

SEQ ID NO: 150539 - DNA, 1878 bp, synthetic construct
  misc_feature 1..1878: note = Description of Artificial Sequence: Synthetic coding sequence
  source 1..1878: mol_type = other DNA
atggccggggaccggctgcccaggaaggtgatggatgccaagaagctggccagcctgctgcggggcggccctgggggccccctggtgattgacagccgcagctttgtggagtacaacagctggcacgtgctgagctctgtgaacatctgctgcagcaagctggtgaagaggcggctgcagcagggcaaggtgaccatcgccgagctgatccagcctgctgcccggagccaggtggaggccacagagccccaggatgtggtggtgtatgaccagagcaccagagatgcctctgtgctggccgctgacagcttcctgagcatcctgctgagcaagctggatggctgctttgacagcgtggccatcctgactggaggctttgccaccttcagcagctgcttccctggcctgtgtgagggcaagccagctgccctgctgcccatgagcctgagccagccctgcctgcctgtgcccagcgtgggcctgacccgcatcctgccccacctgtacctgggcagccagaaggatgtgctgaacaaggacctgatgacccagaatggcatctcctatgtgctgaatgccagcaacagctgccccaagccagacttcatctgtgagagccgcttcatgagggtgcccatcaatgacaactactgtgagaagctgctgccctggctggacaagagcattgagttcatcgacaaggccaagctgagcagctgccaggtgattgtgcactgcctggccggcatcagccgcagcgccaccatcgccatcgcctacatcatgaagaccatgggcatgagcagtgatgatgcctacagatttgtgaaggacagaagacccagcatcagccccaacttcaacttcctgggccagctgctggagtatgaaagaagcctgaagctgctggccgccctgcagggcgaccccggcacccccagcggcaccccagagcccccacccagccctgctgctggggcccccctgccccggctgcccccacccaccagcgagagcgctgccactggaaatgctgctgcccgggagggcggcctgtctgctggaggagagcccccagccccacccaccccaccagccaccagcgccctgcagcagggcctgcggggcctgcacctgagcagtgaccggctgcaggacaccaaccggctgaagaggagcttcagcctggacatcaagagcgcctatgcccccagccggcggccagatggccctggccccccagaccccggggaggcccccaagctgtgcaagctggacagccccagcggggccgccctgggcctgagcagccccagcccagacagcccagatgctgcccctgaggcccggccccggcccaggagaagacccaggcctcctgctggcagccctgcccggagccctgcccacagcctgggcctgaactttggagatgctgcccggcagacccccaggcatggcctgagcgccctgagcgcccctggcctgcccggccctggccagcctgctggccctggggcctgggccccacccctggacagccctggcacccccagcccagatggcccctggtgcttcagccctgagggcgcccagggcgctgggggcgtgctgtttgcccccttcggccgggccggggcccctggccctgggggcggcagtgacctgcggcggcgggaggccgcccgggcagagcccagagatgccaggacaggctggccagaggagcccgcccctgagacccagttcaagagaagaagctgccagatggagtttgaggagggcatggtggagggccgggcccggggggaggagctggccgccctgggcaagcaggccagcttcagcggctctgtggaggtgattgaggtgtcctag

SEQ ID NO: 150540 - DNA, 1878 bp, synthetic construct; identical to SEQ ID NO: 150539
  misc_feature 1..1878: note = Description of Artificial Sequence: Synthetic coding sequence
  source 1..1878: mol_type = other DNA

SEQ ID NO: 150541 - DNA, 1626 bp, synthetic construct
  misc_feature 1..1626: note = Description of Artificial Sequence: Synthetic coding sequence
  source 1..1626: mol_type = other DNA
atgcacactggaggagagaccagcgcctgcaagcccagctctgtgcggctggcccccagcttctccttccacgccgccggcctgcagatggccggccagatgccccacagccaccagtacagcgaccggcggcagcccaacatcagtgaccagcaggtgtctgccctgagctacagcgaccagatccagcagcccctgaccaaccaggtgatgccagacatcgtgatgctgcagaggaggatgccccagaccttccgggaccctgccacagcccccctgaggaagctgtctgtggacctgatcaagacctacaagcacatcaatgaggtgtactatgccaagaagaagagaagacaccagcagggccagggagatgacagcagccacaagaaggagaggaaggtgtacaatgatggctatgatgatgacaactatgactacatcgtgaagaatggagagaagtggatggacagatatgaaattgacagcctgattggcaagggcagctttggccaggtggtgaaggcctatgacagagtggagcaggagtgggtggccatcaagatcatcaagaacaagaaggccttcctgaaccaggcccagatcgaggtgcggctgctggagctgatgaacaagcatgacacagagatgaagtactacatcgtgcacctgaagaggcacttcatgttcaggaaccacctgtgcctggtgtttgagatgctgagctacaacctgtatgacctgctgaggaacaccaacttccggggcgtgtccctgaacctgaccaggaagtttgcccagcagatgtgcacagccctgctcttcctggccaccccagagctgagcatcatccactgtgacctgaagccagagaacatcctgctgtgcaaccccaagaggtctgccatcaagatcgtggactttggcagcagctgccagctgggccagaggatctaccagtacatccagagccgcttctaccgcagccctgaggtgctgctgggcatgccctatgacctggccatcgacatgtggagcctgggctgcatcctggtggagatgcacactggagagcccctcttcagcggggccaatgaggtggaccagatgaacaagatcgtggaggtgctgggcatccccccagcccacatcctggaccaggcccccaaggccaggaagttctttgagaagctgcctgatggcacctggaacctgaagaagaccaaggatggcaagcgggagtacaagcccccaggcaccaggaagctgcacaacatcctgggcgtggagactggaggccctgggggcagaagagctggggagagcggccacacagtggccgactacctgaagttcaaggacctgatcctgaggatgctggactatgaccccaagacccgcatccagccctactatgccctgcagcacagcttcttcaagaagacagcagatgagggcaccaacaccagcaacagcgtgtccaccagccctgccatggagcagagccagagcagcggcaccaccagcagcaccagcagcagctctgtggtggagcagcactggatgcctggggccttcaggatgacagtgtccttcaccctggaggtgcatgatgtgcctgtgtag

SEQ ID NO: 150542 - DNA, 1755 bp, synthetic construct
  misc_feature 1..1755: note = Description of Artificial Sequence: Synthetic coding sequence
  source 1..1755: mol_type = other DNA
atgcacactggaggagagaccagcgcctgcaagcccagctctgtgcggctggcccccagcttctccttccacgccgccggcctgcagatggccggccagatgccccacagccaccagtacagcgaccggcggcagcccaacatcagtgaccagcaggtgtctgccctgagctacagcgaccagatccagcagcccctgaccaaccaggtgatgccagacatcgtgatgctgcagaggaggatgccccagaccttccgggaccctgccacagcccccctgaggaagctgtctgtggacctgatcaagacctacaagcacatcaatgaggtgtactatgccaagaagaagagaagacaccagcagggccagggagatgacagcagccacaagaaggagaggaaggtgtacaatgatggctatgatgatgacaactatgactacatcgtgaagaatggagagaagtggatggacagatatgaaattgacagcctgattggcaagggcagctttggccaggtggtgaaggcctatgacagagtggagcaggagtgggtggccatcaagatcatcaagaacaagaaggccttcctgaaccaggcccagatcgaggtgcggctgctggagctgatgaacaagcatgacacagagatgaagtactacatcgtgcacctgaagaggcacttcatgttcaggaaccacctgtgcctggtgtttgagatgctgagctacaacctgtatgacctgctgaggaacaccaacttccggggcgtgtccctgaacctgaccaggaagtttgcccagcagatgtgcacagccctgctcttcctggccaccccagagctgagcatcatccactgtgacctgaagccagagaacatcctgctgtgcaaccccaagaggtctgccatcaagatcgtggactttggcagcagctgccagctgggccagaggatctaccagtacatccagagccgcttctaccgcagccctgaggtgctgctgggcatgccctatgacctggccatcgacatgtggagcctgggctgcatcctggtggagatgcacactggagagcccctcttcagcggggccaatgaggtggaccagatgaacaagatcgtggaggtgctgggcatccccccagcccacatcctggaccaggcccccaaggccaggaagttctttgagaagctgcctgatggcacctggaacctgaagaagaccaaggatggcaagcgggagtacaagcccccaggcaccaggaagctgcacaacatcctgggcgtggagactggaggccctgggggcagaagagctggggagagcggccacacagtggccgactacctgaagttcaaggacctgatcctgaggatgctggactatgaccccaagacccgcatccagccctactatgccctgcagcacagcttcttcaagaagacagcagatgagggcaccaacaccagcaacagcgtgtccaccagccctgccatggagcagagccagagcagcggcaccaccagcagcaccagcagcagcagcggcggcagcagcggcaccagcaacagcggccgggcccggagtgaccccacccaccagcaccgccacagcggcggccacttcaccgctgctgtgcaggccatggactgtgagacccacagcccccaggtgagcagccacgtggtgcacctgctggtgtccccagccatcctgcgctggagcagcacaggctgccaggtgcccctggagtag

SEQ ID NO: 150543 - DNA, 2265 bp, synthetic construct
  misc_feature 1..2265: note = Description of Artificial Sequence: Synthetic coding sequence
  source 1..2265: mol_type = other DNA
atgcacactggaggagagaccagcgcctgcaagcccagctctgtgcggctggcccccagcttctccttccacgccgccggcctgcagatggccggccagatgccccacagccaccagtacagcgaccggcggcagcccaacatcagtgaccagcaggtgtctgccctgagctacagcgaccagatccagcagcccctgaccaaccagaggaggatgccccagaccttccgggaccctgccacagcccccctgaggaagctgtctgtggacctgatcaagacctacaagcacatcaatgaggtgtactatgccaagaagaagaggaggcaccagcagggccagggagatgacagcagccacaagaaggagaggaaggtgtacaatgatggctatgatgatgacaactatgactacatcgtgaagaatggagagaagtggatggacagatatgaaattgacagcctcatcggcaagggcagctttggccaggtggtgaaggcctatgacagagtggagcaggagtgggtggccatcaagatcatcaagaacaagaaggccttcctgaaccaggcccagatcgaggtgcggctgctggagctgatgaacaagcatgacacagagatgaagtactacatcgtgcacctgaagaggcacttcatgttcaggaaccacctgtgcctggtgtttgagatgctgagctacaacctgtatgacctgctgaggaacaccaacttccggggcgtgtccctgaacctgaccaggaagtttgcccagcagatgtgcacagccctgctcttcctggccaccccagagctgagcatcatccactgtgacctgaagccagagaacatcctgctgtgcaaccccaagaggtctgccatcaagatcgtggactttggcagcagctgccagctgggccagaggatctaccagtacatccagagccgcttctaccgcagccctgaggtgctgctgggcatgccctatgacctggccatcgacatgtggagcctgggctgcatcctggtggagatgcacactggagagcccctcttcagcggggccaatgaggtggaccagatgaacaagatcgtggaggtgctgggcatccccccagcccacatcctggaccaggcccccaaggccaggaagttctttgagaagctgcctgatggcacctggaacctgaagaagaccaaggatggcaagcgggagtacaagcccccaggcaccaggaagctgcacaacatcctgggcgtggagaccggcggccctgggggccggcgggccggggagagcggccacacagtggccgactacctgaagttcaaggacctgatcctgaggatgctggactatgaccccaagacccgcatccagccctactatgccctgcagcacagcttcttcaagaagacagcagatgagggcaccaacaccagcaacagcgtgtccaccagccctgccatggagcagagccagagcagcggcaccaccagcagcaccagcagcagcagcggcggcagcagcggcaccagcaacagcggccgggcccggagtgaccccacccaccagcaccgccacagcggcggccacttcaccgctgctgtgcaggccatggactgtgagacccacagcccccaggtgcggcagcagtttcctgcccccctgggctggagcggcacagaggcccccacccaggtgacagtggagacccaccctgtgcaggagaccaccttccacgtggccccccagcagaatgccctgcaccaccaccacggcaacagcagccaccaccaccaccaccaccaccaccaccaccaccaccacggccagcaggccctgggcaacagaacccggccccgggtgtacaacagccccaccaacagcagcagcacccaggacagcatggaggtgggccacagccaccacagcatgaccagcctgagcagcagcaccaccagcagcagcaccagcagcagcagcactggaaaccagggcaaccaggcctaccagaacagacctgtggccgccaacaccctggactttggccagaatggagccatggatgtgaacctgactgtgtacagcaacccccggcaggagactggaattgctggccaccccacctaccagttcagcgccaacacaggccctgcccactacatgacagagggccacctgaccatgaggcagggcgctgaccgggaggagagccccatgactggagtgtgtgtgcagcagagccctgtggccagcagctag

SEQ ID NO: 150544 - DNA, 1590 bp, synthetic construct
  misc_feature 1..1590: note = Description of Artificial Sequence: Synthetic coding sequence
  source 1..1590: mol_type = other DNA
atgcacactggaggagagaccagcgcctgcaagcccagctctgtgcggctggcccccagcttctccttccacgccgccggcctgcagatggccggccagatgccccacagccaccagtacagcgaccggcggcagcccaacatcagtgaccagcaggtgtctgccctgagctacagcgaccagatccagcagcccctgaccaaccaggtgatgccagacatcgtgatgctgcagaggaggatgccccagaccttccgggaccctgccacagcccccctgaggaagctgtctgtggacctgatcaagacctacaagcacatcaatgaggtgtactatgccaagaagaagagaagacaccagcagggccagggagatgacagcagccacaagaaggagaggaaggtgtacaatgatggctatgatgatgacaactatgactacatcgtgaagaatggagagaagtggatggacagatatgaaattgacagcctgattggcaagggcagctttggccaggtggtgaaggcctatgacagagtggagcaggagtgggtggccatcaagatcatcaagaacaagaaggccttcctgaaccaggcccagatcgaggtgcggctgctggagctgatgaacaagcatgacacagagatgaagtactacatcgtgcacctgaagaggcacttcatgttcaggaaccacctgtgcctggtgtttgagatgctgagctacaacctgtatgacctgctgaggaacaccaacttccggggcgtgtccctgaacctgaccaggaagtttgcccagcagatgtgcacagccctgctcttcctggccaccccagagctgagcatcatccactgtgacctgaagccagagaacatcctgctgtgcaaccccaagaggtctgccatcaagatcgtggactttggcagcagctgccagctgggccagaggatctaccagtacatccagagccgcttctaccgcagccctgaggtgctgctgggcatgccctatgacctggccatcgacatgtggagcctgggctgcatcctggtggagatgcacactggagagcccctcttcagcggggccaatgaggtggaccagatgaacaagatcgtggaggtgctgggcatccccccagcccacatcctggaccaggcccccaaggccaggaagttctttgagaagctgcctgatggcacctggaacctgaagaagaccaaggatggcaagcgggagtacaagcccccaggcaccaggaagctgcacaacatcctgggcgtggagactggaggccctgggggcagaagagctggggagagcggccacacagtggccgactacctgaagttcaaggacctgatcctgaggatgctggactatgaccccaagacccgcatccagccctactatgccctgcagcacagcttcttcaagaagacagcagatgagggcaccaacaccagcaacagcgtgtccaccagccctgccatggagcagagccagagcagcggcaccaccagcagcaccagcagcagcagcggggccagcgccatcagctgcagctcctggctggtgcgccactag

SEQ ID NO: 150545 - DNA, 2292 bp, synthetic construct
  misc_feature 1..2292: note = Description of Artificial Sequence: Synthetic coding sequence
  source 1..2292: mol_type = other DNA
atgcacactggaggagagaccagcgcctgcaagcccagctctgtgcggctggcccccagcttctccttccacgccgccggcctgcagatggccggccagatgccccacagccaccagtacagcgaccggcggcagcccaacatcagtgaccagcaggtgtctgccctgagctacagcgaccagatccagcagcccctgaccaaccaggtgatgccagacatcgtgatgctgcagaggaggatgccccagaccttccgggaccctgccacagcccccctgaggaagctgtctgtggacctgatcaagacctacaagcacatcaatgaggtgtactatgccaagaagaagagaagacaccagcagggccagggagatgacagcagccacaagaaggagaggaaggtgtacaatgatggctatgatgatgacaactatgactacatcgtgaagaatggagagaagtggatggacagatatgaaattgacagcctgattggcaagggcagctttggccaggtggtgaaggcctatgacagagtggagcaggagtgggtggccatcaagatcatcaagaacaagaaggccttcctgaaccaggcccagatcgaggtgcggctgctggagctgatgaacaagcatgacacagagatgaagtactacatcgtgcacctgaagaggcacttcatgttcaggaaccacctgtgcctggtgtttgagatgctgagctacaacctgtatgacctgctgaggaacaccaacttccggggcgtgtccctgaacctgaccaggaagtttgcccagcagatgtgcacagccctgctcttcctggccaccccagagctgagcatcatccactgtgacctgaagccagagaacatcctgctgtgcaaccccaagaggtctgccatcaagatcgtggactttggcagcagctgccagctgggccagaggatctaccagtacatccagagccgcttctaccgcagccctgaggtgctgctgggcatgccctatgacctggccatcgacatgtggagcctgggctgcatcctggtggagatgcacactggagagcccctcttcagcggggccaatgaggtggaccagatgaacaagatcgtggaggtgctgggcatccccccagcccacatcctggaccaggcccccaaggccaggaagttctttgagaagctgcctgatggcacctggaacctgaagaagaccaaggatggcaagcgggagtacaagcccccaggcaccaggaagctgcacaacatcctgggcgtggagactggaggccctgggggcagaagagctggggagagcggccacacagtggccgactacctgaagttcaaggacctgatcctgaggatgctggactatgaccccaagacccgcatccagccctactatgccctgcagcacagcttcttcaagaagacagcagatgagggcaccaacaccagcaacagcgtgtccaccagccctgccatggagcagagccagagcagcggcaccaccagcagcaccagcagcagcagcggcggcagcagcggcaccagcaacagcggccgggcccggagtgaccccacccaccagcaccgccacagcggcggccacttcaccgctgctgtgcaggccatggactgtgagacccacagcccccaggtgcggcagcagtttcctgcccccctgggctggagcggcacagaggcccccacccaggtgacagtggagacccaccctgtgcaggagaccaccttccacgtggccccccagcagaatgccctgcaccaccaccacggcaacagcagccaccaccaccaccaccaccaccaccaccaccaccaccacggccagcaggccctgggcaacagaacccggccccgggtgtacaacagccccaccaacagcagcagcacccaggacagcatggaggtgggccacagccaccacagcatgaccagcctgagcagcagcaccaccagcagcagcaccagcagcagcagcacaggcaaccagggcaaccaggcctaccagaacagacctgtggccgccaacaccctggactttggccagaatggagccatggatgtgaacctgactgtgtacagcaacccccggcaggagaccggcattgctggccaccccacctaccagttcagcgccaacacaggccctgcccactacatgacagagggccacctgaccatgaggcagggcgctgaccgggaggagagccccatgactggagtgtgtgtgcagcagagccctgtggccagcagctag

SEQ ID NO: 150546 - DNA, 396 bp, synthetic construct
  misc_feature 1..396: note = Description of Artificial Sequence: Synthetic coding sequence
  source 1..396: mol_type = other DNA
atgcacactggaggagagaccagcgcctgcaagcccagctctgtgcggctggcccccagcttctccttccacgccgccggcctgcagatggccggccagatgccccacagccaccagtacagcgaccggcggcagcccaacatcagtgaccagcaggtgtctgccctgagctacagcgaccagatccagcagcccctgaccaaccaggtgatgccagacatcgtgatgctgcagaggaggatgccccagaccttccgggaccctgccacagcccccctgaggaagctgtctgtggacctgatcaagacctacaagcacatcaatgaggtgtactatgccaagaagaagagaagacaccagcagggccagggagatgacagcagccacaagaagtag

SEQ ID NO: 150547 - DNA, 1755 bp, synthetic construct; identical to SEQ ID NO: 150542
  misc_feature 1..1755: note = Description of Artificial Sequence: Synthetic coding sequence
  source 1..1755: mol_type = other DNA

SEQ ID NO: 150548 - DNA, 141 bp, synthetic construct
  misc_feature 1..141: note = Description of Artificial Sequence: Synthetic coding sequence
  source 1..141: mol_type = other DNA
atgcacactggaggagagaccagcgcctgcaagcccagctctgtgcggctggcccccagcttctccttccacgccgccggcctgcagatggccggccagatgccccacagccaccagtacagcgaccggcggcagccctag

SEQ ID NO: 150549 - DNA, 1608 bp, synthetic construct
  misc_feature 1..1608: note = Description of Artificial Sequence: Synthetic coding sequence
  source 1..1608: mol_type = other DNA
atgttcaggaaccacctgtgcctggtgtttgagatgctgagctacaacctgtatgacctgctgaggaacaccaacttccggggcgtgtccctgaacctgaccaggaagtttgcccagcagatgtgcacagccctgctcttcctggccaccccagagctgagcatcatccactgtgacctgaagccagagaacatcctgctgtgcaaccccaagaggtctgccatcaagatcgtggactttggcagcagctgccagctgggccagaggatctaccagtacatccagagccgcttctaccgcagccctgaggtgctgctgggcatgccctatgacctggccatcgacatgtggagcctgggctgcatcctggtggagatgcacactggagagcccctcttcagcggggccaatgaggtggaccagatgaacaagatcgtggaggtgctgggcatccccccagcccacatcctggaccaggcccccaaggccaggaagttctttgagaagctgcctgatggcacctggaacctgaagaagaccaaggatggcaagcgggagtacaagcccccaggcaccaggaagctgcacaacatcctgggcgtggagactggaggccctgggggcagaagagctggggagagcggccacacagtggccgactacctgaagttcaaggacctgatcctgaggatgctggactatgaccccaagacccgcatccagccctactatgccctgcagcacagcttcttcaagaagacagcagatgagggcaccaacaccagcaacagcgtgtccaccagccctgccatggagcagagccagagcagcggcaccaccagcagcaccagcagcagcagcggcggcagcagcggcaccagcaacagcggccgggcccggagtgaccccacccaccagcaccgccacagcggcggccacttcaccgctgctgtgcaggccatggactgtgagacccacagcccccaggtgcggcagcagtttcctgcccccctgggctggagcggcacagaggcccccacccaggtgacagtggagacccaccctgtgcaggagaccaccttccacgtggccccccagcagaatgccctgcaccaccaccacggcaacagcagccaccaccaccaccaccaccaccaccaccaccaccaccacggccagcaggccctgggcaacagaacccggccccgggtgtacaacagccccaccaacagcagcagcacccaggacagcatggaggtgggccacagccaccacagcatgaccagcctgagcagcagcaccaccagcagcagcaccagcagcagcagcacaggcaaccagggcaaccaggcctaccagaacagacctgtggccgccaacaccctggactttggccagaatggagccatggatgtgaacctgactgtgtacagcaacccccggcaggagaccggcattgctggccaccccacctaccagttcagcgccaacacaggccctgcccactacatgacagagggccacctgaccatgaggcagggcgctgaccgggaggagagccccatgactggagtgtgtgtgcagcagagccctgtggccagcagctag

SEQ ID NO: 150550 - DNA, 1890 bp, synthetic construct
  misc_feature 1..1890: note = Description of Artificial Sequence: Synthetic coding sequence
  source 1..1890: mol_type = other DNA
atggctgtgcccccaggccacggccccttcagcggcttccctggcccccaggagcacacccaggtgctgcctgatgtgcggctgctgccccggcggctgcccctggccttcagagatgccaccagcgcccccctgaggaagctgtctgtggacctgatcaagacctacaagcacatcaatgaggtgtactatgccaagaagaagagaagagcccagcaggccccaccccaggacagcagcaacaagaaggagaagaaggtgctgaaccacggctatgatgatgacaaccacgactacatcgtgcgctctggagagcgctggctggagagatatgaaattgacagcctgattggcaagggcagctttggccaggtggtgaaggcctatgaccaccagacccaggagctggtggccatcaagatcatcaagaacaagaaggccttcctgaaccaggcccagatcgagctgcggctgctggagctgatgaaccagcacgacacagagatgaagtactacatcgtgcacctgaagaggcacttcatgttcaggaaccacctgtgcctggtgtttgagctgctgagctacaacctgtatgacctgctgaggaacacccacttccggggcgtgtccctgaacctgaccaggaagctggcccagcagctgtgcacagccctgctcttcctggccaccccagagctgagcatcatccactgtgacctgaagccagagaacatcctgctgtgcaaccccaagaggtctgccatcaagatcgtggactttggcagcagctgccagctgggccagaggatctaccagtacatccagagccgcttctaccgcagccctgaggtgctgctgggcaccccctatgacctggccatcgacatgtggagcctgggctgcatcctggtggagatgcacactggagagcccctcttcagcggcagcaatgaggtggaccagatgaacagaattgtggaggtgctgggcatccccccagctgccatgctggaccaggcccccaaggccaggaagtactttgagcggctgcccggcggcggctggaccctgcggaggaccaaggagctgaggaaggactaccagggccctggcacccggcggctgcaggaggtgctgggcgtgcagacaggaggccctgggggcagaagagctggggagcccggccacagccctgctgactacctgcgcttccaggacctggtgctgaggatgctggagtatgagcctgctgcccgcatcagccccctgggcgccctgcagcacggcttcttccggaggacagcagatgaggccaccaacacaggccctgctggcagcagcgccagcaccagccctgcccccctggacacctgccccagcagcagcacagccagcagcatcagcagcagcggcggcagcagcggcagcagcagtgacaacagaacctaccgctacagcaaccgctactgcggcggccctggcccccccatcacagactgtgagatgaacagcccccaggtgccccccagccagcccctgcggccctgggccggaggagatgtgccccacaagacccaccaggccccagccagcgccagcagcctgcccggcaccggggcccagctgcccccccagccccgctacctgggccggccccccagccccaccagccccccacctcctgagctgatggatgtgtccctggtgggcggccctgctgactgcagccccccccacccagccccagccccccagcaccctgctgccagcgccctgcggaccaggatgactggaggccggccccccctgcccccaccagatgatcctgccaccctgggcccccacctgggcctgcggggcgtgccccagagcacagctgccagcagctag

SEQ ID NO: 150551 - DNA, 1806 bp, synthetic construct
  misc_feature 1..1806: note = Description of Artificial Sequence: Synthetic coding sequence
  source 1..1806: mol_type = other DNA
atggctgtgcccccaggccacggccccttcagcggcttccctggcccccaggagcacacccaggtgctgcctgatgtgcggctgctgccccggcggctgcccctggccttcagagatgccaccagcgcccccctgaggaagctgtctgtggacctgatcaagacctacaagcacatcaatgaggtgtactatgccaagaagaagagaagagcccagcaggccccaccccaggacagcagcaacaagaaggagaagaaggtgctgaaccacggctatgatgatgacaaccacgactacatcgtgcgctctggagagcgctggctggagagatatgaaattgacagcctgattggcaagggcagctttggccaggtggtgaaggcctatgaccaccagacccaggagctggtggccatcaagatcatcaagaacaagaaggccttcctgaaccaggcccagatcgagctgcggctgctggagctgatgaaccagcacgacacagagatgaagtactacatcgtgcacctgaagaggcacttcatgttcaggaaccacctgtgcctggtgtttgagctgctgagctacaacctgtatgacctgctgaggaacacccacttccggggcgtgtccctgaacctgaccaggaagctggcccagcagctgtgcacagccctgctcttcctggccaccccagagctgagcatcatccactgtgacctgaagccagagaacatcctgctgtgcaaccccaagaggtctgccatcaagatcgtggactttggcagcagctgccagctgggccagaggatctaccagtacatccagagccgcttctaccgcagccctgaggtgctgctgggcaccccctatgacctggccatcgacatgtggagcctgggctgcatcctggtggagatgcacactggagagcccctcttcagcggcagcaatgaggtggaccagatgaacagaattgtggaggtgctgggcatccccccagctgccatgctggaccaggcccccaaggccaggaagtactttgagcggctgcccggcggcggctggaccctgcggaggaccaaggagctgaggaaggactaccagggccctggcacccggcggctgcaggaggacctggtgctgaggatgctggagtatgagcctgctgcccgcatcagccccctgggcgccctgcagcacggcttcttccggaggacagcagatgaggccaccaacacaggccctgctggcagcagcgccagcaccagccctgcccccctggacacctgccccagcagcagcacagccagcagcatcagcagcagcggcggcagcagcggcagcagcagtgacaacagaacctaccgctacagcaaccgctactgcggcggccctggcccccccatcacagactgtgagatgaacagcccccaggtgccccccagccagcccctgcggccctgggccggaggagatgtgccccacaagacccaccaggccccagccagcgccagcagcctgcccggcaccggggcccagctgcccccccagccccgctacctgggccggccccccagccccaccagccccccacctcctgagctgatggatgtgtccctggtgggcggccctgctgactgcagccccccccacccagccccagccccccagcaccctgctgccagcgccctgcggaccaggatgactggaggccggccccccctgcccccaccagatgatcctgccaccctgggcccccacctgggcctgcggggcgtgccccagagcacagctgccagcagctag

SEQ ID NO: 150552 - DNA, 1770 bp, synthetic construct
  misc_feature 1..1770: note = Description of Artificial Sequence: Synthetic coding sequence
  source 1..1770: mol_type = other DNA
atggctgtgcccccaggccacggccccttcagcggcttccctggcccccaggagcacacccaggtgctgcctgatgtgcggctgctgccccggcggctgcccctggccttcagagatgccaccagcgcccccctgaggaagctgtctgtggacctgatcaagacctacaagcacatcaatgaggtgtactatgccaagaagaagagaagagcccagcaggccccaccccaggacagcagcaacaagaaggagaagaaggtgctgaaccacggctatgatgatgacaaccacgactacatcgtgcgctctggagagcgctggctggagagatatgaaattgacagcctgattggcaagggcagctttggccaggtggtgaaggcctatgaccaccagacccaggagctggtggccatcaagatcatcaagaacaagaaggccttcctgaaccaggcccagatcgagctgcggctgctggagctgatgaaccagcacgacacagagatgaagtactacatcgtgcacctgaagaggcacttcatgttcaggaaccacctgtgcctggtgtttgagctgctgagctacaacctgtatgacctgctgaggaacacccacttccggggcgtgtccctgaacctgaccaggaagctggcccagcagctgtgcacagccctgctcttcctggccaccccagagctgagcatcatccactgtgacctgaagccagagaacatcctgctgtgcaaccccaagaggtctgccatcaagatcgtggactttggcagcagctgccagctgggccagaggatctaccagtacatccagagccgcttctaccgcagccctgaggtgctgctgggcaccccctatgacctggccatcgacatgtggagcctgggctgcatcctggtggagatgcacactggagagcccctcttcagcggcagcaatgaggtggaccagatgaacagaattgtggaggtgctgggcatccccccagctgccatgctggaccaggcccccaaggccaggaagtactttgagcggctgcccggcggcggctggaccctgcggaggaccaaggagctgaggaaggacctggtgctgaggatgctggagtatgagcctgctgcccgcatcagccccctgggcgccctgcagcacggcttcttccggaggacagcagatgaggccaccaacacaggccctgctggcagcagcgccagcaccagccctgcccccctggacacctgccccagcagcagcacagccagcagcatcagcagcagcggcggcagcagcggcagcagcagtgacaacagaacctaccgctacagcaaccgctactgcggcggccctggcccccccatcacagactgtgagatgaacagcccccaggtgccccccagccagcccctgcggccctgggccggaggagatgtgccccacaagacccaccaggccccagccagcgccagcagcctgcccggcaccggggcccagctgcccccccagccccgctacctgggccggccccccagccccaccagccccccacctcctgagctgatggatgtgtccctggtgggcggccctgctgactgcagccccccccacccagccccagccccccagcaccctgctgccagcgccctgcggaccaggatgactggaggccggccccccctgcccccaccagatgatcctgccaccctgggcccccacctgggcctgcggggcgtgccccagagcacagctgccagcagctag

SEQ ID NO: 150553 - DNA, 285 bp, synthetic construct
  misc_feature 1..285: note = Description of Artificial Sequence: Synthetic coding sequence
  source 1..285: mol_type = other DNA
atgaatgaccacctgcacgtgggcagccacgcccacggccagatccaggtgcagcagctgtttgaggacaacagcaacaagaggacagtgctgaccacccagcccaacggcctgaccaccgtgggcaagacaggcctgcctgtggtgcctgagcggcagctggacagcatccaccggcggcagggcagcagcaccagcctgaagtccatggagggcatgggcaaggtgaaggccacccccatgaccccagagcaggccatgaagcagtacatgcagaagctgtag

SEQ ID NO: 150554 - DNA, 1806 bp, synthetic construct
  misc_feature 1..1806: note = Description of Artificial Sequence: Synthetic coding sequence
  source 1..1806: mol_type = other DNA
atgctgaccaggaagcccagcgctgctgccccagctgcctaccccaccggccggggcggggacagcgctgtgcggcagctgcaggccagccctggcctgggcgctggggccaccaggtctggagtgggcaccggcccccccagccccatcgccctgccccccctgcgggccagcaatgctgctgctgctgcccacaccatcggcggcagcaagcacaccatgaatgaccacctgcacgtgggcagccacgcccacggccagatccaggtgcagcagctgtttgaggacaacagcaacaagaggacagtgctgaccacccagcccaacggcctgaccaccgtgggcaagacaggcctgcctgtggtgcctgagcggcagctggacagcatccaccggcggcagggcagcagcaccagcctgaagtccatggagggcatgggcaaggtgaaggccacccccatgaccccagagcaggccatgaagcagtacatgcagaagctgacagcctttgagcaccacgagatcttctcctacccagagatctacttcctgggcctgaatgccaagaagaggcagggcatgactggaggccccaacaacggcggctatgatgatgaccagggcagctatgtgcaggtgccccatgaccacgtggcctaccgctatgaggtgctgaaggtgattggcaagggcagctttggccaggtggtgaaggcctatgaccacaaggtgcaccagcacgtggccctgaagatggtgagaaatgagaagcgcttccaccggcaggccgctgaggagatccgcatcctggagcacctgaggaagcaggacaaggacaacaccatgaatgtcatccacatgctggagaacttcaccttcaggaaccacatctgcatgacctttgagctgctgtccatgaacctgtatgagctgatcaagaagaacaagttccagggcttcagcctgcccctggtgaggaagtttgcccacagcatcctgcagtgcctggatgccctgcacaagaaccgcatcatccactgtgacctgaagccagagaacatcctgctgaagcagcagggccgcagcggcatcaaggtgattgactttggcagcagctgctatgagcaccagagggtgtacacctacatccagagccgcttctaccgggcccctgaggtgatcctgggcgcccgctatggcatgcccatcgacatgtggagcctgggctgcatcctggccgagctgctgaccggctaccccctgctgcctggagaagatgaaggagaccagctggcctgcatgattgagctgctgggcatgcccagccagaagctgctggatgccagcaagagggccaagaactttgtgagcagcaagggctacccccgctactgcaccgtgaccaccctgagtgatggctctgtggtgctgaatggaggccgcagcagaagaggcaagctgcggggccccccagagagccgggagtggggcaatgccctgaagggctgtgatgaccccctcttcctggacttcctgaagcagtgcctggagtgggaccctgctgtgaggatgaccccaggccaggccctgcggcacccctggctgcggcggcggctgcccaagccacccaccggggagaagacctctgtgaagaggatcacagagagcactggagccatcaccagcatcagcaagctgcccccacccagcagcagcgccagcaagctgcggaccaacctggcccagatgacagatgccaatggaaacatccagcagaggacagtgctgcccaagctggtgtcctag

SEQ ID NO: 150555 - DNA, 1587 bp, synthetic construct
  misc_feature 1..1587: note = Description of Artificial Sequence: Synthetic coding sequence
  source 1..1587: mol_type = other DNA
atgaatgaccacctgcacgtgggcagccacgcccacggccagatccaggtgcagcagctgtttgaggacaacagcaacaagaggacagtgctgaccacccagcccaacggcctgaccaccgtgggcaagacaggcctgcctgtggtgcctgagcggcagctggacagcatccaccggcggcagggcagcagcaccagcctgaagtccatggagggcatgggcaaggtgaaggccacccccatgaccccagagcaggccatgaagcagtacatgcagaagctgacagcctttgagcaccacgagatcttctcctacccagagatctacttcctgggcctgaatgccaagaagaggcagggcatgactggaggccccaacaatggaggctatgatgatgaccagggcagctatgtgcaggtgccccatgaccacgtggcctaccgctatgaggtgctgaaggtgattggcaagggcagctttggccaggtggtgaaggcctatgaccacaaggtgcaccagcacgtggccctgaagatggtgagaaatgagaagcgcttccaccggcaggccgctgaggagatccgcatcctggagcacctgaggaagcaggacaaggacaacaccatgaatgtcatccacatgctggagaacttcaccttcaggaaccacatctgcatgacctttgagctgctgtccatgaacctgtatgagctgatcaagaagaacaagttccagggcttcagcctgcccctggtgaggaagtttgcccacagcatcctgcagtgcctggatgccctgcacaagaaccgcatcatccactgtgacctgaagccagagaacatcctgctgaagcagcagggccgcagcggcatcaaggtgattgactttggcagcagctgctatgagcaccagagggtgtacacctacatccagagccgcttctaccgggcccctgaggtgatcctgggcgcccgctatggcatgcccatcgacatgtggagcctgggctgcatcctggccgagctgctgaccggctaccccctgctgcccggggaggatgaaggagaccagctggcctgcatgattgagctgctgggcatgcccagccagaagctgctggatgccagcaagagggccaagaactttgtgagcagcaagggctacccccgctactgcaccgtgaccaccctgagtgatggctctgtggtgctgaatggaggccgcagccggcggggcaagctgcggggccccccagagagccgggagtggggcaatgccctgaagggctgtgatgaccccctcttcctggacttcctgaagcagtgcctggagtgggaccctgctgtgaggatgaccccaggccaggccctgcggcacccctggctgcggcggcggctgcccaagcccccaactggagagaagacctctgtgaagaggatcacagagagcactggagccatcaccagcatcagcaagctgcccccacccagcagcagcgccagcaagctgcggaccaacctggcccagatgacagatgccaacggcaacatccagcagaggacagtgctgcccaagctggtgtcctag

SEQ ID NO: 150556 - DNA, 471 bp, synthetic construct
  misc_feature 1..471: note = Description of Artificial Sequence: Synthetic coding sequence
  source 1..471: mol_type = other DNA
atgaatgaccacctgcacgtgggcagccacgcccacggccagatccaggtgcagcagctgtttgaggacaacagcaacaagaggacagtgctgaccacccagcccaacggcctgaccaccgtgggcaagacaggcctgcctgtggtgcctgagcggcagctggacagcatccaccggcggcagggcagcagcaccagcctgaagtccatggagggcatgggcaaggtgaaggccacccccatgaccccagagcaggccatgaagcagtacatgcagaagctgacagcctttgagcaccacgagatcttctcctacccagagatctacttcctgggcctgaatgccaagaagaggcagggcatgactggaggccccaacaatggaggctatgatgatgaccagggcagctatgtgcaggtgccccatgaccacgtggcctaccgctatgaggtgctgaaggtgattggatag

SEQ ID NO: 150557 - DNA, 1707 bp, synthetic construct
  misc_feature 1..1707: note = Description of Artificial Sequence: Synthetic coding sequence
  source 1..1707: mol_type = other DNA
atgaagtggaaggagaagctgggagatggagtgtatgacaccttcatgatgattgatgagaccaagtgccccccctgcagcaatgtgctgtgcaaccccagcgagcccccaccaccccggcggctgaacatgaccacagagcagttcaccggggaccacacccagcacttcctggatggaggagagatgaaggtggagcagctgttccaggagtttggaaacaggaagagcaacaccatccagagtgatggcatcagtgacagcgagaagtgcagccccaccgtgtcccagggcaagagcagtgactgcctgaacacagtgaagagcaacagcagcagcaaggcccccaaggtggtgcccctgaccccagagcaggccctgaagcagtacaagcaccacctgacagcctatgagaagctggagatcatcaactacccagagatctactttgtgggccccaatgccaagaagagacatggagtcatcggcggccccaacaatggaggctatgatgatgctgatggagcctacatccacgtgccccgggaccacctggcctaccgctatgaggtgctgaagatcatcggcaagggcagctttggccaggtggcccgggtgtatgaccacaagctgcggcagtatgtggccctgaagatggtgagaaatgagaagcgcttccaccggcaggccgctgaggagatccgcatcctggagcacctgaagaagcaggacaagacaggctccatgaatgtcatccacatgctggagagcttcaccttcagaaatcatgtgtgcatggcctttgagctgctgagcattgacctgtatgagctgatcaagaagaacaagttccagggcttctctgtgcagctggtgaggaagtttgcccagagcatcctgcagagcctggatgccctgcacaagaacaagatcatccactgtgacctgaagccagagaacatcctgctgaagcaccacggccgcagcagcaccaaggtgattgactttggcagcagctgctttgagtaccagaagctgtacacctacatccagagccgcttctaccgggcccctgagatcatcctgggcagccgctacagcacccccatcgacatctggagctttggctgcatcctggccgagctgctgaccggccagcccctcttccctggagaagatgaaggagaccagctggcctgcatgatggagctgctgggcatgcccccacccaagctgctggagcagagcaagagggccaagtacttcatcaacagcaagggcatcccccgctactgcagcgtgaccacccaggctgatggccgggtggtgctggtgggcggccgcagccggcggggcaagaagaggggccccccaggcagcaaggactggggcacagccctgaagggctgtgatgactacctgttcatcgagttcctgaagcgctgcctgcactgggaccccagcgcccggctgaccccagcccaggccctgcggcacccctggatcagcaagtctgtgccccggcccctgaccaccatcgacaaggtgtctgggaagagggtggtgaacccagccagcgccttccagggcctgggcagcaagctgccccctgtggtgggcatcgccaacaagctgaaggccaacctgatgtctgagaccaacggcagcatccccctgtgcagcgtgctgcccaagctgatctcctag

SEQ ID NO: 150558 - DNA, 1707 bp, synthetic construct; identical to SEQ ID NO: 150557
  misc_feature 1..1707: note = Description of Artificial Sequence: Synthetic coding sequence
  source 1..1707: mol_type = other DNA

SEQ ID NO: 150559 - DNA, 1767 bp, synthetic construct
  misc_feature 1..1767: note = Description of Artificial Sequence: Synthetic coding sequence
  source 1..1767: mol_type = other DNA
atgggcggcacagcccggggccctggcaggaaggatgctggccccccaggggccggcctgcccccccagcagaggcggctgggagatggagtgtatgacaccttcatgatgattgatgagaccaagtgccccccctgcagcaatgtgctgtgcaaccccagcgagcccccaccaccccggcggctgaacatgaccacagagcagttcaccggggaccacacccagcacttcctggatggaggagagatgaaggtggagcagctgttccaggagtttggaaacaggaagagcaacaccatccagagtgatggcatcagtgacagcgagaagtgcagccccaccgtgtcccagggcaagagcagtgactgcctgaacacagtgaagagcaacagcagcagcaaggcccccaaggtggtgcccctgaccccagagcaggccctgaagcagtacaagcaccacctgacagcctatgagaagctggagatcatcaactacccagagatctactttgtgggccccaatgccaagaagagacatggagtcatcggcggccccaacaatggaggctatgatgatgctgatggagcctacatccacgtgccccgggaccacctggcctaccgctatgaggtgctgaagatcatcggcaagggcagctttggccaggtggcccgggtgtatgaccacaagctgcggcagtatgtggccctgaagatggtgagaaatgagaagcgcttccaccggcaggccgctgaggagatccgcatcctggagcacctgaagaagcaggacaagacaggctccatgaatgtcatccacatgctggagagcttcaccttcagaaatcatgtgtgcatggcctttgagctgctgagcattgacctgtatgagctgatcaagaagaacaagttccagggcttctctgtgcagctggtgaggaagtttgcccagagcatcctgcagagcctggatgccctgcacaagaacaagatcatccactgtgacctgaagccagagaacatcctgctgaagcaccacggccgcagcagcaccaaggtgattgactttggcagcagctgctttgagtaccagaagctgtacacctacatccagagccgcttctaccgggcccctgagatcatcctgggcagccgctacagcacccccatcgacatctggagctttggctgcatcctggccgagctgctgaccggccagcccctcttccctggagaagatgaaggagaccagctggcctgcatgatggagctgctgggcatgcccccacccaagctgctggagcagagcaagagggccaagtacttcatcaacagcaagggcatcccccgctactgcagcgtgaccacccaggctgatggccgggtggtgctggtgggcggccgcagccggcggggcaagaagaggggccccccaggcagcaaggactggggcacagccctgaagggctgtgatgactacctgttcatcgagttcctgaagcgctgcctgcactgggaccccagcgcccggctgaccccagcccaggccctgcggcacccctggatcagcaagtctgtgccccggcccctgaccaccatcgacaaggtgtctgggaagagggtggtgaacccagccagcgccttccagggcctgggcagcaagctgccccctgtggtgggcatcgccaacaagctgaaggccaacctgatgtctgagaccaacggcagcatccccctgtgcagcgtgctgcccaagctgatctcctag

SEQ ID NO: 150560 - DNA, 732 bp, synthetic construct
  misc_feature 1..732: note = Description of Artificial Sequence: Synthetic coding sequence
  source 1..732: mol_type = other DNA
atgaagtggaaggagaagctgggagatggagtgtatgacaccttcatgatgattgatgagaccaagtgccccccctgcagcaatgtgctgtgcaaccccagcgagcccccaccaccccggcggctgaacatgaccacagagcagttcaccggggaccacacccagcacttcctggatggaggagagatgaaggtggagcagctgttccaggagtttggaaacaggaagagcaacaccatccagagtgatggcatcagtgacagcgagaagtgcagccccaccgtgtcccagggcaagagcagtgactgcctgaacacagtgaagagcaacagcagcagcaaggcccccaaggtggtgcccctgaccccagagcaggccctgaagcagtacaagcaccacctgacagcctatgagaagctggagatcatcaactacccagagatctactttgtgggccccaatgccaagaagagacatggagtcatcggcggccccaacaatggaggctatgatgatgctgatggagcctacatccacgtgccccgggaccacctggcctaccgctatgaggtgctgaagatcatcggcaagggcagctttggccaggtggcccgggtgtatgaccacaagctgcggcagtatgtggccctgaagatggtgagaaatgagaagcgcttccaccggcaggccgctgaggagatccgcatcctggagcacctgaagaagcagtag

SEQ ID NO: 150561 - DNA, 1563 bp, synthetic construct
  misc_feature 1..1563: note = Description of Artificial Sequence: Synthetic coding sequence
  source 1..1563: mol_type = other DNA
atgcctgccagcgagctgaaggccagcgagatccccttccaccccagcatcaagacccaggaccccaaggccgaggagaagagccccaagaagcagaaggtgaccctgacagctgctgaggccctgaagctgttcaagaaccagctgagcccctatgagcagagcgagatcctgggctatgcagagctgtggttcctgggcctggaggccaagaagctggacacagcccctgagaagttcagcaagaccagctttgatgatgaacatggcttctacctgaaggtgctgcatgaccacatcgcctaccgctatgaggtgctggagaccatcggcaagggcagctttggccaggtggccaagtgcctggaccacaagaacaatgagctggtggccctgaagatcatccggaacaagaagcgcttccaccagcaggccctgatggagctgaagatcctggaggccctgaggaagaaggacaaggacaacacctacaacgtggtgcacatgaaggacttcttctacttcaggaaccacttctgcatcacctttgagctgctgggcatcaacctgtatgagctgatgaagaacaacaacttccagggcttcagcctgagcatcgtgcggcgcttcaccctgtctgtgctgaagtgcctgcagatgctgtctgtggagaagatcatccactgtgacctgaagccagagaacatcgtgctgtaccagaagggccaggcctctgtgaaggtgattgactttggcagcagctgctatgagcaccagaaggtgtacacctacatccagagccgcttctaccgcagccctgaggtgatcctgggccacccctatgatgtggccatcgacatgtggagcctgggctgcatcacagctgagctgtacacaggctaccccctcttccctggagaaaatgaggtggagcagctggcctgcatcatggaggtgctgggcctgcccccagctggcttcatccagacagccagccggcggcagaccttctttgacagcaagggcttccccaagaacatcaccaacaacagaggcaagaagcgctacccagacagcaaggacctgaccatggtgctgaagacctatgacaccagcttcctggacttcctgcggcgctgcctggtgtgggagcccagcctgaggatgaccccagaccaggccctgaagcacgcctggatccaccagagcaggaacctgaagccccagccccggccccagaccctgaggaagagcaacagcttcttccccagcgagaccaggaaggacaaggtgcagggctgccaccacagcagcaggaaggcagatgagatcaccaaggagaccacagagaagaccaaggacagccccaccaagcacgtgcagcacagcggggaccagcaggactgcctgcagcacggggctgacacagtgcagctgccccagctggtggatgcccccaagaagtctgaggccgctgtgggcgctgaggtgtccatgaccagccctggccagagcaagaacttcagcctgaagaacaccaacgtgctgccccccatcgtgtag

SEQ ID NO: 150562 - DNA, 1563 bp, synthetic construct; identical to SEQ ID NO: 150561
  misc_feature 1..1563: note = Description of Artificial Sequence: Synthetic coding sequence
  source 1..1563: mol_type = other DNA

SEQ ID NO: 150563 - DNA, 1560 bp, synthetic construct
  misc_feature 1..1560: note = Description of Artificial Sequence: Synthetic coding sequence
  source 1..1560: mol_type = other DNA
atgcctgccagcgagctgaaggccagcgagatccccttccaccccagcatcaagacccaggaccccaaggccgaggagaagagccccaagaagcagaaggtgaccctgacagctgctgaggccctgaagctgttcaagaaccagctgagcccctatgagcagagcgagatcctgggctatgcagagctgtggttcctgggcctggaggccaagaagctggacacagcccctgagaagttcagcaagaccagctttgatgatgaacatggcttctacctgaaggtgctgcatgaccacatcgcctaccgctatgaggtgctggagaccatcggcaagggcagctttggccaggtggccaagtgcctggaccacaagaacaatgagctggtggccctgaagatcatccggaacaagaagcgcttccaccagcaggccctgatggagctgaagatcctggaggccctgaggaagaaggacaaggacaacacctacaacgtggtgcacatgaaggacttcttctacttcaggaaccacttctgcatcacctttgagctgctgggcatcaacctgtatgagctgatgaagaacaacaacttccagggcttcagcctgagcatcgtgcggcgcttcaccctgtctgtgctgaagtgcctgcagatgctgtctgtggagaagatcatccactgtgacctgaagccagagaacatcgtgctgtaccagaagggccaggcctctgtgaaggtgattgactttggcagcagctgctatgagcaccagaaggtgtacacctacatccagagccgcttctaccgcagccctgaggtgatcctgggccacccctatgatgtggccatcgacatgtggagcctgggctgcatcacagctgagctgtacacaggctaccccctcttccctggagaaaatgaggtggagcagctggcctgcatcatggaggtgctgggcctgcccccagctggcttcatccagacagccagccggcggcagaccttctttgacagcaagggcttccccaagaacatcaccaacaacagaggcaagaagcgctacccagacagcaaggacctgaccatggtgctgaagacctatgacaccagcttcctggacttcctgcggcgctgcctggtgtgggagcccagcctgaggatgaccccagaccaggccctgaagcacgcctggatccaccagagcaggaacctgaagccccagccccggccccagaccctgaggaagagcaacagcttcttccccagcgagaccaggaaggacaaggtgcagggctgccaccacagcagcaggaaggatgagatcaccaaggagaccacagagaagaccaaggacagccccaccaagcacgtgcagcacagcggggaccagcaggactgcctgcagcacggggctgacacagtgcagctgccccagctggtggatgcccccaagaagtctgaggccgctgtgggcgctgaggtgtccatgaccagccctggccagagcaagaacttcagcctgaagaacaccaacgtgctgccccccatcgtgtag

SEQ ID NO: 150564 - DNA, 474 bp, synthetic construct
  misc_feature 1..474: note = Description of Artificial Sequence: Synthetic coding sequence
  source 1..474: mol_type = other DNA
atggtgctgaagacctatgacaccagcttcctggacttcctgcggcgctgcctggtgtgggagcccagcctgaggatgaccccagaccaggccctgaagcacgcctggatccaccagagcaggaacctgaagccccagccccggccccagaccctgaggaagagcaacagcttcttccccagcgagaccaggaaggacaaggtgcagggctgccaccacagcagcaggaaggcagatgagatcaccaaggagaccacagagaagaccaaggacagccccaccaagcacgtgcagcacagcggggaccagcaggactgcctgcagcacggggctgacacagtgcagctgccccagctggtggatgcccccaagaagtctgaggccgctgtgggcgctgaggtgtccatgaccagccctggccagagcaagaacttcagcctgaagaacaccaacgtgctgccccccatcgtgtag

SEQ ID NO: 150565 - DNA, 1011 bp, synthetic construct
  misc_feature 1..1011: note = Description of Artificial Sequence: Synthetic coding sequence
  source 1..1011: mol_type = other DNA
atgggcaactgcctgcacagagctgagctgagccccagcacagagaacagcagccagctggactttgaagatgtgtggaacagcagctatggagtgaatgacagcttcccagatggagactatggagccaacctggaggccgccgccccctgccacagctgcaacctgctggatgacagcgccctgcccttcttcatcctgacctctgtgctgggcatcctggccagcagcacagtgctcttcatgctgttccggcccctcttccgctggcagctgtgccccggctggcctgtgctggcccagctggccgtgggcagcgccctcttcagcatcgtggtgcctgtgctggcccctggcctgggcagcaccaggagcagcgccctgtgcagcctgggctactgtgtgtggtacggcagcgcctttgcccaggccctgctgctgggctgccacgccagcctgggccaccggctgggcgccggccaggtgcccggcctgaccctgggcctgactgtgggcatctggggcgtggccgccctgctgaccctgcctgtgaccctggccagcggggccagcggcggcctgtgcaccctcatctacagcacagagctgaaggccctgcaggccacccacacagtggcctgcctggccatctttgtgctgctgcccctgggcctgtttggagccaagggcctgaagaaggccctgggcatgggccctggcccctggatgaacatcctgtgggcctggttcatcttctggtggccccacggcgtggtgctgggcctggacttcctggtgcgcagcaagctgctgctgctgagcacctgcctggcccagcaggccctggacctgctgctgaacctggccgaggccctggccatcctgcactgtgtggccacccccctgctgctggccctcttctgccaccaggccaccaggaccctgctgcccagcctgcccctgcctgagggctggagcagccacctggacaccctgggcagcaagagctag

SEQ ID NO: 150566 - DNA, 1017 bp, synthetic construct
  misc_feature 1..1017: note = Description of Artificial Sequence: Synthetic coding sequence
  source 1..1017: mol_type = other DNA
atggccagcagcggctacgtgctgcaggccgagctgagccccagcacagagaacagcagccagctggactttgaagatgtgtggaacagcagctatggagtgaatgacagcttcccagatggagactatggagccaacctggaggccgccgccccctgccacagctgcaacctgctggatgacagcgccctgcccttcttcatcctgacctctgtgctgggcatcctggccagcagcacagtgctcttcatgctgttccggcccctcttccgctggcagctgtgccccggctggcctgtgctggcccagctggccgtgggcagcgccctcttcagcatcgtggtgcctgtgctggcccctggcctgggcagcaccaggagcagcgccctgtgcagcctgggctactgtgtgtggtacggcagcgcctttgcccaggccctgctgctgggctgccacgccagcctgggccaccggctgggcgccggccaggtgcccggcctgaccctgggcctgactgtgggcatctggggcgtggccgccctgctgaccctgcctgtgaccctggccagcggggccagcggcggcctgtgcaccctcatctacagcacagagctgaaggccctgcaggccacccacacagtggcctgcctggccatctttgtgctgctgcccctgggcctgtttggagccaagggcctgaagaaggccctgggcatgggccctggcccctggatgaacatcctgtgggcctggttcatcttctggtggccccacggcgtggtgctgggcctggacttcctggtgcgcagcaagctgctgctgctgagcacctgcctggcccagcaggccctggacctgctgctgaacctggccgaggccctggccatcctgcactgtgtggccacccccctgctgctggccctcttctgccaccaggccaccaggaccctgctgcccagcctgcccctgcctgagggctggagcagccacctggacaccctgggcagcaagagctag

SEQ ID NO: 150567 - DNA, 1011 bp, synthetic construct; identical to SEQ ID NO: 150565
  misc_feature 1..1011: note = Description of Artificial Sequence: Synthetic coding sequence
  source 1..1011: mol_type = other DNA

SEQ ID NO: 150568 - DNA, 468 bp, synthetic construct
  misc_feature 1..468: note = Description of Artificial Sequence: Synthetic coding sequence
  source 1..468: mol_type = other DNA
atggccagcagcggctacgtgctgcaggccgagctgagccccagcacagagaacagcagccagctggactttgaagatgtgtggaacagcagctatggagtgaatgacagcttcccagatggagactatggagccaacctggaggccgccgccccctgccacagctgcaacctgctggatgacagcgccctgcccttcttcatcctgacctctgtgctgggcatcctggccagcagcacagtgctcttcatgctgttccggcccctcttccgctggcagctgtgccccggctggcctgtgctggcccagctggccgtgggcagcgccctcttcagcatcgtggtgcctgtgctggcccctggcctgggcagcaccaggagcagcgccctgtgcagcctgggctactgtgtgtggtacggcagcgcctttgcccaggccctgctgctgggctgccacgccagcctgtag

SEQ ID NO: 150569 - DNA, 1011 bp, synthetic construct; identical to SEQ ID NO: 150565
  misc_feature 1..1011: note = Description of Artificial Sequence: Synthetic coding sequence
  source 1..1011: mol_type = other DNA

SEQ ID NO: 150570 - DNA, 2010 bp, synthetic construct
  misc_feature 1..2010: note = Description of Artificial Sequence: Synthetic coding sequence
  source 1..2010: mol_type = other DNA
atgggcagcaacagcagccgcatcggggacctgcccaagaatgagtacctgaagaagctgtctggaacagagagcatcagtgaaaatgaccccttctggaaccagctgctgtccttctccttccctgcccccaccagcagcagcgagctgaagctgctggaggaggccaccatctctgtgtgccgcagcctggtggagaacaaccccaggactggaaacctgggcgccctgatcaaggtgttcctgagcaggaccaaggagctgaagctgtctgctgagtgccagaaccacatcttcatctggcagacccacaatgccctcttcatcatctgctgcctgctgaaggtgttcatctgccagatgtctgaggaggagctgcagctgcacttcacctatgaggagaagagccctggcaactacagcagtgacagcgaggacctgctggaggagctgctgtgctgcctgatgcagctgatcacagacatccccctgctggacatcacctatgagatctctgtggaggccatcagcaccatggtggtgttcctgagctgccagctgttccacaaggaggtgctgcggcagagcatcagccacaagtacctgatgaggggcccctgcctgccctacaccagcaagctggtgaagaccctgctgtacaacttcatccggcaggagaagcccccacctcctggggcccacgtgttcccccagcagagtgatggcggcggcctgctgtatggcctggccagcggcgtggccaccggcctgtggacagtgttcaccctgggcggcgtgggcagcaaggctgctgccagccctgagctgagcagccccctggccaaccagagcctgctgctgctgctggtgctggccaacctgacagatgccagtgatgcccccaacccctaccggcaggccatcatgtccttcaagaacacccaggacagcagccccttccccagcagcatcccccacgccttccagatcaacttcaacagcctgtacacagccctgtgtgagcagcagaccagtgaccaggccaccctgctgctgtacaccctgctgcaccagaacagcaacatccgcacctacatgctggccaggacagacatggagaacctggtgctgcccatcctggagatcctgtaccacgtggaggagaggaacagccaccacgtgtacatggccctgatcatcctgctgatcctgacagaagatgatggcttcaacagaagcatccatgaagtcatcctgaagaacatcacctggtacagcgagcgggtgctgacagagatcagcctgggcagcctgctgatcctggtggtgatccgcaccatccagtacaacatgaccaggacccgggacaagtacctgcacaccaactgcctggccgccctggccaacatgtctgcccagttccgcagcctgcaccagtatgctgcccagaggatcatcagcctcttcagcctgctgagcaagaagcacaacaaggtgctggagcaggccacccagagcctgcggggcagcctgagcagcaatgatgtgcccctgcctgactatgcccaggacctgaatgtcatcgaggaggtgatccgcatgatgctggagatcatcaacagctgcctgaccaacagcctgcaccacaaccccaacctggtgtatgccctgctgtacaagagggacctgtttgagcagttccgcacccaccccagcttccaggacatcatgcagaacatcgacctggtgatctccttcttcagcagccggctgctgcaggccggggctgagctgtctgtggagcgggtgctggagatcatcaagcagggcgtggtggccctgcccaaggaccggctgaagaagtttcctgagctgaagttcaagtatgtggaggaggagcagcctgaggagttcttcatcccctacgtgtggagcctggtgtacaacagcgctgtgggcctgtactggaacccccaggacatccagctgttcaccatggacagcgactag

SEQ ID NO: 150571 - DNA, 519 bp, synthetic construct
  misc_feature 1..519: note = Description of Artificial Sequence: Synthetic coding sequence
  source 1..519: mol_type = other DNA
atggccctgatcatcctgctgatcctgacagaagatgatggcttcaacagaagcatccacgaggtgatcctgaagaacatcacctggtacagcgagcgggtgctgacagagatcagcctgggcagcctgctgatcctggtggtgatccgcaccatccagtacaacatgaccaggacccgggacaagtacctgcacaccaactgcctggccgccctggccaacatgtctgcccagttccgcagcctgcaccagtatgctgcccagaggatcatctcctacacctgccgccacctgcggcgctacgtgtatgtgctggacaagctgtacttcccccacagccactgcagcaccctgcagcactgcttcagcaccctgagtgacaacggggaggagctgctgagcctgacctgcagccacatcctgcggagctatgccagcagcctcttcagcctgctgagcaagaagcacaacaaggtgctggagcaggccacccagagcctgcggggcagcctgtcctag

SEQ ID NO: 150572 - DNA, 1440 bp, synthetic construct
  misc_feature 1..1440: note = Description of Artificial Sequence: Synthetic coding sequence
  source 1..1440: mol_type = other DNA
atgggcagcaacagcagccgcatcggggacctgcccaagaatgagtacctgaagaagctgtctggaacagagagcatcagtgaaaatgaccccttctggaaccagctgctgtccttctccttccctgcccccaccagcagcagcgagctgaagctgctggaggaggccaccatctctgtgtgccgcagcctggccggcctgtggacagtgttcaccctgggcggcgtgggcagcaaggctgctgccagccctgagctgagcagccccctggccaaccagagcctgctgctgctgctggtgctggccaacctgacagatgccagtgatgcccccaacccctaccggcaggccatcatgtccttcaagaacacccaggacagcagccccttccccagcagcatcccccacgccttccagatcaacttcaacagcctgtacacagccctgtgtgagcagcagaccagtgaccaggccaccctgctgctgtacaccctgctgcaccagaacagcaacatccgcacctacatgctggccaggacagacatggagaacctggtgctgcccatcctggagatcctgtaccacgtggaggagaggaacagccaccacgtgtacatggccctgatcatcctgctgatcctgacagaagatgatggcttcaacagaagcatccatgaagtcatcctgaagaacatcacctggtacagcgagcgggtgctgacagagatcagcctgggcagcctgctgatcctggtggtgatccgcaccatccagtacaacatgaccaggacccgggacaagtacctgcacaccaactgcctggccgccctggccaacatgtctgcccagttccgcagcctgcaccagtatgctgcccagaggatcatcagcctcttcagcctgctgagcaagaagcacaacaaggtgctggagcaggccacccagagcctgcggggcagcctgagcagcaatgatgtgcccctgcctgactatgcccaggacctgaatgtcatcgaggaggtgatccgcatgatgctggagatcatcaacagctgcctgaccaacagcctgcaccacaaccccaacctggtgtatgccctgctgtacaagagggacctgtttgagcagttccgcacccaccccagcttccaggacatcatgcagaacatcgacctggtgatctccttcttcagcagccggctgctgcaggccggggctgagctgtctgtggagcgggtgctggagatcatcaagcagggcgtggtggccctgcccaaggaccggctgaagaagtttcctgagctgaagttcaagtatgtggaggaggagcagcctgaggagttcttcatcccctacgtgtggagcctggtgtacaacagcgctgtgggcctgtactggaacccccaggacatccagctgttcaccatggacagcgactag

SEQ ID NO: 150573 - DNA, 3837 bp, synthetic construct
  misc_feature 1..3837: note = Description of Artificial Sequence: Synthetic coding sequence
  source 1..3837: mol_type = other DNA
atggcccagagcaagagacatgtgtacagcaggacccccagcggcagcaggatgtctgctgaggccagcgcccggcccctgcgggtgggcagccgggtggaggtgattggcaagggccaccggggcaccgtggcctacgtgggcgccaccctgtttgccaccgggaagtgggtgggcgtcatcctggatgaggccaagggcaagaatgatggcaccgtgcagggcaggaagtacttcacctgtgatgagggccacggcatctttgtgcggcagagccagatccaggtgtttgaagatggagctgacaccaccagccctgagaccccagacagcagcgccagcaaggtgctgaagcgggagggcacagacaccacagccaagaccagcaagctgcggggcctgaagcccaagaaggcccccacagccaggaagaccaccacccggcggcccaagcccaccaggcctgccagcactggagtggccggggccagcagcagcctgggccccagcggcagcgccagcgctggggagctgagcagcagcgagcccagcaccccagcccagacccccctggccgcccccatcatccccacccctgtgctgaccagccctggagctgtgccccccctgcccagccccagcaaggaggaggagggcctgcgggcccaggtgcgggacctggaggagaagctggagaccctgcggctgaagagagctgaggacaaggccaagctgaaggagctggagaagcacaagatccagctggagcaggtgcaggagtggaagagcaagatgcaggagcagcaggccgacctgcagaggcggctgaaggaggccaggaaggaggccaaggaggccctggaggccaaggagcgctacatggaggagatggctgacacagcagatgccatcgagatggccaccctggacaaggagatggccgaggagcgggcagagagcctgcagcaggaggtggaggccctgaaggagcgggtggatgagctgaccacagacctggagatcctgaaggccgagattgaggagaagggcagtgatggagctgccagcagctaccagctgaagcagctggaggagcagaatgcccggctgaaggatgccctggtgaggatgagggacctgagcagcagcgagaagcaggagcacgtgaagctgcagaagctgatggagaagaagaaccaggagctggaggtggtgcggcagcagcgggagcggctgcaggaggagctgagccaggccgagagcaccattgatgagctgaaggagcaggtggatgctgccctgggcgctgaggagatggtggagatgctgacagacaggaacctgaacctggaggagaaggtgcgggagctgcgggagaccgtgggggacctggaggccatgaatgagatgaatgatgagctgcaggagaatgcccgggagacagagctggagctgcgggagcagctggacatggccggggcccgggtgcgggaggcccagaagagggtggaggccgcccaggagaccgtggccgactaccagcagaccatcaagaagtaccggcagctgacagcccacctgcaggatgtgaaccgggagctgaccaaccagcaggaggcctctgtggagcggcagcagcagcccccacctgagacctttgacttcaagatcaagtttgctgagaccaaggcccacgccaaggccatcgagatggagctgcggcagatggaggtggcccaggccaacagacacatgagcctgctgacagccttcatgccagacagcttcctgcggcctggaggagaccatgactgtgtgctggtgctgctgctgatgcccaggctcatctgcaaggccgagctgatcaggaagcaggcccaggagaagtttgagctgtctgagaactgcagcgagcggcccggcctgcggggagctgctggggagcagctgagctttgctgctggcctggtgtacagcctgagcctgctgcaggccaccctgcacagatatgagcacgccctgagccagtgcagcgtggatgtgtacaagaaggtgggcagcctgtacccagagatgtctgcccacgagaggagcctggacttcctgattgagctgctgcacaaggaccagctggatgagaccgtgaatgtggagcccctgaccaaggccatcaagtactaccagcacctgtacagcatccacctggccgagcagcctgaggactgcaccatgcagctggccgaccacatcaagttcacccagagcgccctggactgcatgtctgtggaggtgggccgcctgcgggccttcctgcagggcggccaggaggccacagacatcgccctgctgctgcgggacctggagaccagctgcagcgacatccggcagttctgcaagaagatcagaagaaggatgcctggaacagatgcccctggcatcccagctgccctggccttcggcccccaggtgtctgacaccctgctggactgcaggaagcacctgacctgggtggtggccgtgctgcaggaggtggccgctgctgctgcccagctgattgcccccctggctgaaaatgaaggcctgctggtggccgccctggaggagctggccttcaaggccagcgagcagatctacggcacccccagcagcagcccctatgaatgtctgcggcagagctgcaacatcctgatcagcaccatgaacaagctggccacagccatgcaggagggggagtatgatgctgagaggcctcccagcaagcccccacctgtggagctgcgggctgctgccctgcgggcagagatcacagatgctgagggcctgggcctgaagctggaggaccgggagaccgtcatcaaggagctgaagaagagcctgaagatcaagggggaggagctgtctgaggccaacgtgcggctgagcctgctggagaagaagctggacagcgctgccaaggatgctgatgaaagaattgagaaggtgcagacccggctggaggagacccaggccctgctgaggaagaaggagaaggagtttgaggagaccatggatgccctgcaggccgacatcgaccagctggaggccgagaaggccgagctgaagcagaggctgaacagccagagcaagaggaccatcgagggcctgcggggccccccacccagcggcatcgccaccctggtgtctggaattgctggggaggagcagcagagaggagccatccctggccaggcccctggctctgtgcccggccctggcctggtgaaggacagccccctgctgctgcagcagatcagcgccatgaggctgcacatcagccagctgcagcacgagaacagcatcctgaagggggcccagatgaaggccagcctggccagcctgccccccctgcacgtggccaagctgagccatgagggccctggcagcgagctgcctgctggggccctgtacaggaagaccagccagctgctggagaccctgaaccagctgagcacccacacccacgtggtggacatcaccaggaccagccctgctgccaagagccccagcgcccagctgatggagcaggtggcccagctgaagagcctgagtgacacagtggagaagctgaaggatgaggtgctgaaggagaccgtgtcccagaggcctggggccaccgtgcccacagactttgccaccttccccagcagcgccttcctgcgggccaaggaggagcagcaggatgacacagtgtacatgggcaaggtgaccttcagctgtgccgccggcttcggccagaggcaccggctggtgctgacccaggagcagctgcaccagctgcacagccgcctcatctcctag

SEQ ID NO: 150574 - DNA, 3786 bp, synthetic construct
  misc_feature 1..3786: note = Description of Artificial Sequence: Synthetic coding sequence
  source 1..3786: mol_type = other DNA
atgtctgctgaggccagcgcccggcccctgcgggtgggcagccgggtggaggtgattggcaagggccaccggggcaccgtggcctacgtgggcgccaccctgtttgccaccgggaagtgggtgggcgtcatcctggatgaggccaagggcaagaatgatggcaccgtgcagggcaggaagtacttcacctgtgatgagggccacggcatctttgtgcggcagagccagatccaggtgtttgaagatggagctgacaccaccagccctgagaccccagacagcagcgccagcaaggtgctgaagcgggagggcacagacaccacagccaagaccagcaagctgcggggcctgaagcccaagaaggcccccacagccaggaaaggaagaagagtgaggaccaagcccaccaggcctgccagcactggagtggccggggccagcagcagcctgggccccagcggcagcgccagcgctggggagctgagcagcagcgagcccagcaccccagcccagacccccctggccgcccccatcatccccacccctgtgctgaccagccctggagctgtgccccccctgcccagccccagcaaggaggaggagggcctgcgggcccaggtgcgggacctggaggagaagctggagaccctgcggctgaagagagctgaggacaaggccaagctgaaggagctggagaagcacaagatccagctggagcaggtgcaggagtggaagagcaagatgcaggagcagcaggccgacctgcagaggcggctgaaggaggccaggaaggaggccaaggaggccctggaggccaaggagcgctacatggaggagatggctgacacagcagatgccatcgagatggccaccctggacaaggagatggccgaggagagagctgagagcctgcagcaggaggtggaggccctgaaggagcgggtggatgagctgaccacagacctggagatcctgaaggccgagattgaggagaagggcagtgatggagctgccagcagctaccagctgaagcagctggaggagcagaatgcccggctgaaggatgccctggtgaggatgagggacctgagcagcagcgagaagcaggagcacgtgaagctgcagaagctgatggagaagaagaaccaggagctggaggtggtgcggcagcagcgggagcggctgcaggaggagctgagccaggccgagagcaccattgatgagctgaaggagcaggtggatgctgccctgggcgctgaggagatggtggagatgctgacagacaggaacctgaacctggaggagaaggtgcgggagctgcgggagaccgtgggggacctggaggccatgaatgagatgaatgatgagctgcaggagaatgcccgggagacagagctggagctgcgggagcagctggacatggccggggcccgggtgcgggaggcccagaagagggtggaggccgcccaggagaccgtggccgactaccagcagaccatcaagaagtaccggcagctgacagcccacctgcaggatgtgaaccgggagctgaccaaccagcaggaggcctctgtggagcggcagcagcagcccccacctgagacctttgacttcaagatcaagtttgctgagaccaaggcccacgccaaggccatcgagatggagctgcggcagatggaggtggcccaggccaacagacacatgagcctgctgacagccttcatgccagacagcttcctgcggcctggaggagaccatgactgtgtgctggtgctgctgctgatgcccaggctcatctgcaaggccgagctgatcaggaagcaggcccaggagaagtttgagctgtctgagaactgcagcgagaggcctggcctgcggggagctgctggggagcagctgagctttgctgctggcctggtgtacagcctgagcctgctgcaggccaccctgcacagatatgaacatgccctgagccagtgcagcgtggatgtgtacaagaaggtgggcagcctgtacccagagatgtctgcccacgagaggagcctggacttcctgattgagctgctgcacaaggaccagctggatgaaacagtgaatgtggagcccctgaccaaggccatcaagtactaccagcacctgtacagcatccacctggccgagcagcctgaggactgcaccatgcagctggccgaccacatcaagttcacccagagcgccctggactgcatgtctgtggaggtgggccgcctgcgggccttcctgcagggcggccaggaggccacagacatcgccctgctgctgcgggacctggagaccagctgcagcgacatccggcagttctgcaagaagatcagaagaaggatgcctggaacagatgcccctggcatcccagctgccctggccttcggcccccaggtgtctgacaccctgctggactgcaggaagcacctgacctgggtggtggccgtgctgcaggaggtggccgctgctgctgcccagctgattgcccccctggccgagaatgaaggcctgctggtggccgccctggaggagctggccttcaaggccagcgagcagatctacggcacccccagcagcagcccctatgagtgcctgcggcagagctgcaacatcctgatcagcaccatgaacaagctggccacagccatgcaggagggggagtatgatgctgagcggccccccagcaagcccccacctgtggagctgcgggccgccgccctgcgggcagagatcacagatgctgagggcctgggcctgaagctggaggaccgggagaccgtcatcaaggagctgaagaagagcctgaagatcaagggggaggagctgtctgaggccaacgtgcggctgagcctgctggagaagaagctggacagcgctgccaaggatgctgatgagcgcatcgagaaggtgcagacccggctggaggagacccaggccctgctgaggaagaaggagaaggagtttgaggagaccatggatgccctgcaggccgacatcgaccagctggaggccgagaaggccgagctgaagcagaggctgaacagccagagcaagaggaccatcgagggcctgcggggccccccaccttctggaattgccaccctggtgtctggaattgctggggaggagcagcagagaggagccatccctggccaggcccctggctctgtgcccggccctggcctggtgaaggacagccccctgctgctgcagcagatcagcgccatgaggctgcacatcagccagctgcagcatgaaaattccatcctgaagggggcccagatgaaggccagcctggccagcctgccccccctgcacgtggccaagctgagccatgagggccctggcagcgagctgcctgctggggccctgtacaggaagaccagccagctgctggagaccctgaaccagctgagcacccacacccacgtggtggacatcaccaggaccagccctgctgccaagagccccagcgcccagctgatggagcaggtggcccagctgaagagcctgagtgacacagtggagaagctgaaggatgaggtgctgaaggagaccgtgtcccagaggcctggggccaccgtgcccacagactttgccaccttccccagcagcgccttcctgcgggccaaggaggagcagcaggatgacacagtgtacatgggcaaggtgaccttcagctgtgccgccggcttcggccagaggcaccggctggtgctgacccaggagcagctgcaccagctgcacagccgcctcatctcctag

SEQ ID NO: 150575 - DNA, 3816 bp, synthetic construct
  misc_feature 1..3816: note = Description of Artificial Sequence: Synthetic coding sequence
  source 1..3816: mol_type = other DNA
atggcccagagcaagagacatgtgtacagcaggacccccagcggcagcaggatgtctgctgaggccagcgcccggcccctgcgggtgggcagccgggtggaggtgattggcaagggccaccggggcaccgtggcctacgtgggcgccaccctgtttgccaccgggaagtgggtgggcgtcatcctggatgaggccaagggcaagaatgatggcaccgtgcagggcaggaagtacttcacctgtgatgagggccacggcatctttgtgcggcagagccagatccaggtgtttgaagatggagctgacaccaccagccctgagaccccagacagcagcgccagcaaggtgctgaagcgggagggcacagacaccacagccaagaccagcaagctggcccccacagccaggaagaccaccacccggcggcccaagcccaccaggcctgccagcactggagtggccggggccagcagcagcctgggccccagcggcagcgccagcgctggggagctgagcagcagcgagcccagcaccccagcccagacccccctggccgcccccatcatccccacccctgtgctgaccagccctggagctgtgccccccctgcccagccccagcaaggaggaggagggcctgcgggcccaggtgcgggacctggaggagaagctggagaccctgcggctgaagagagctgaggacaaggccaagctgaaggagctggagaagcacaagatccagctggagcaggtgcaggagtggaagagcaagatgcaggagcagcaggccgacctgcagaggcggctgaaggaggccaggaaggaggccaaggaggccctggaggccaaggagcgctacatggaggagatggctgacacagcagatgccatcgagatggccaccctggacaaggagatggccgaggagagagctgagagcctgcagcaggaggtggaggccctgaaggagcgggtggatgagctgaccacagacctggagatcctgaaggccgagattgaggagaagggcagtgatggagctgccagcagctaccagctgaagcagctggaggagcagaatgcccggctgaaggatgccctggtgaggatgagggacctgagcagcagcgagaagcaggagcacgtgaagctgcagaagctgatggagaagaagaaccaggagctggaggtggtgcggcagcagcgggagcggctgcaggaggagctgagccaggccgagagcaccattgatgagctgaaggagcaggtggatgctgccctgggcgctgaggagatggtggagatgctgacagacaggaacctgaacctggaggagaaggtgcgggagctgcgggagaccgtgggggacctggaggccatgaatgagatgaatgatgagctgcaggagaatgcccgggagacagagctggagctgcgggagcagctggacatggccggggcccgggtgcgggaggcccagaagagggtggaggccgcccaggagaccgtggccgactaccagcagaccatcaagaagtaccggcagctgacagcccacctgcaggatgtgaaccgggagctgaccaaccagcaggaggcctctgtggagcggcagcagcagcccccacctgagacctttgacttcaagatcaagtttgctgagaccaaggcccacgccaaggccatcgagatggagctgcggcagatggaggtggcccaggccaacagacacatgagcctgctgacagccttcatgccagacagcttcctgcggcctggaggagaccatgactgtgtgctggtgctgctgctgatgcccaggctcatctgcaaggccgagctgatcaggaagcaggcccaggagaagtttgagctgtctgagaactgcagcgagaggcctggcctgcggggagctgctggggagcagctgagctttgctgctggcctggtgtacagcctgagcctgctgcaggccaccctgcacagatatgaacatgccctgagccagtgcagcgtggatgtgtacaagaaggtgggcagcctgtacccagagatgtctgcccacgagaggagcctggacttcctgattgagctgctgcacaaggaccagctggatgaaacagtgaatgtggagcccctgaccaaggccatcaagtactaccagcacctgtacagcatccacctggccgagcagcctgaggactgcaccatgcagctggccgaccacatcaagttcacccagagcgccctggactgcatgtctgtggaggtgggccgcctgcgggccttcctgcagggcggccaggaggccacagacatcgccctgctgctgcgggacctggagaccagctgcagcgacatccggcagttctgcaagaagatcagaagaaggatgcctggaacagatgcccctggcatcccagctgccctggccttcggcccccaggtgtctgacaccctgctggactgcaggaagcacctgacctgggtggtggccgtgctgcaggaggtggccgctgctgctgcccagctgattgcccccctggccgagaatgaaggcctgctggtggccgccctggaggagctggccttcaaggccagcgagcagatctacggcacccccagcagcagcccctatgagtgcctgcggcagagctgcaacatcctgatcagcaccatgaacaagctggccacagccatgcaggagggggagtatgatgctgagcggccccccagcaagcccccacctgtggagctgcgggccgccgccctgcgggcagagatcacagatgctgagggcctgggcctgaagctggaggaccgggagaccgtcatcaaggagctgaagaagagcctgaagatcaagggggaggagctgtctgaggccaacgtgcggctgagcctgctggagaagaagctggacagcgctgccaaggatgctgatgagcgcatcgagaaggtgcagacccggctggaggagacccaggccctgctgaggaagaaggagaaggagtttgaggagaccatggatgccctgcaggccgacatcgaccagctggaggccgagaaggccgagctgaagcagaggctgaacagccagagcaagaggaccatcgagggcctgcggggccccccaccttctggaattgccaccctggtgtctggaattgctggggaggagcagcagagaggagccatccctggccaggcccctggctctgtgcccggccctggcctggtgaaggacagccccctgctgctgcagcagatcagcgccatgaggctgcacatcagccagctgcagcatgaaaattccatcctgaagggggcccagatgaaggccagcctggccagcctgccccccctgcacgtggccaagctgagccatgagggccctggcagcgagctgcctgctggggccctgtacaggaagaccagccagctgctggagaccctgaaccagctgagcacccacacccacgtggtggacatcaccaggaccagccctgctgccaagagccccagcgcccagctgatggagcaggtggcccagctgaagagcctgagtgacacagtggagaagctgaaggatgaggtgctgaaggagaccgtgtcccagaggcctggggccaccgtgcccacagactttgccaccttccccagcagcgccttcctgcgggccaaggaggagcagcaggatgacacagtgtacatgggcaaggtgaccttcagctgtgccgccggcttcggccagaggcaccggctggtgctgacccaggagcagctgcaccagctgcacagccgcctcatctcctag

SEQ ID NO: 150576 - DNA, 3435 bp, synthetic construct
  misc_feature 1..3435: note = Description of Artificial Sequence: Synthetic coding sequence
  source 1..3435: mol_type = other DNA
atgatgaggcaggcccccacagccaggaagaccaccacccggcggcccaagcccaccaggcctgccagcactggagtggccggggccagcagcagcctgggccccagcggcagcgccagcgctggggagctgagcagcagcgagcccagcaccccagcccagacccccctggccgcccccatcatccccacccctgtgctgaccagccctggagctgtgccccccctgcccagccccagcaaggaggaggagggcctgcgggcccaggtgcgggacctggaggagaagctggagaccctgcggctgaagagagctgaggacaaggccaagctgaaggagctggagaagcacaagatccagctggagcaggtgcaggagtggaagagcaagatgcaggagcagcaggccgacctgcagaggcggctgaaggaggccaggaaggaggccaaggaggccctggaggccaaggagcgctacatggaggagatggctgacacagcagatgccatcgagatggccaccctggacaaggagatggccgaggagcgggcagagagcctgcagcaggaggtggaggccctgaaggagcgggtggatgagctgaccacagacctggagatcctgaaggccgagattgaggagaagggcagtgatggagctgccagcagctaccagctgaagcagctggaggagcagaatgcccggctgaaggatgccctggtgaggatgagggacctgagcagcagcgagaagcaggagcacgtgaagctgcagaagctgatggagaagaagaaccaggagctggaggtggtgcggcagcagcgggagcggctgcaggaggagctgagccaggccgagagcaccattgatgagctgaaggagcaggtggatgctgccctgggcgctgaggagatggtggagatgctgacagacaggaacctgaacctggaggagaaggtgcgggagctgcgggagaccgtgggggacctggaggccatgaatgagatgaatgatgagctgcaggagaatgcccgggagacagagctggagctgcgggagcagctggacatggccggggcccgggtgcgggaggcccagaagagggtggaggccgcccaggagaccgtggccgactaccagcagaccatcaagaagtaccggcagctgacagcccacctgcaggatgtgaaccgggagctgaccaaccagcaggaggcctctgtggagcggcagcagcagcccccacctgagacctttgacttcaagatcaagtttgctgagaccaaggcccacgccaaggccatcgagatggagctgcggcagatggaggtggcccaggccaacagacacatgagcctgctgacagccttcatgccagacagcttcctgcggcctggaggagaccatgactgtgtgctggtgctgctgctgatgcccaggctcatctgcaaggccgagctgatcaggaagcaggcccaggagaagtttgagctgtctgagaactgcagcgagcggcccggcctgcggggagctgctggggagcagctgagctttgctgctggcctggtgtacagcctgagcctgctgcaggccaccctgcacagatatgagcacgccctgagccagtgcagcgtggatgtgtacaagaaggtgggcagcctgtacccagagatgtctgcccacgagaggagcctggacttcctgattgagctgctgcacaaggaccagctggatgagaccgtgaatgtggagcccctgaccaaggccatcaagtactaccagcacctgtacagcatccacctggccgagcagcctgaggactgcaccatgcagctggccgaccacatcaagttcacccagagcgccctggactgcatgtctgtggaggtgggccgcctgcgggccttcctgcagggcggccaggaggccacagacatcgccctgctgctgcgggacctggagaccagctgcagcgacatccggcagttctgcaagaagatcagaagaaggatgcctggaacagatgcccctggcatcccagctgccctggccttcggcccccaggtgtctgacaccctgctggactgcaggaagcacctgacctgggtggtggccgtgctgcaggaggtggccgctgctgctgcccagctgattgcccccctggctgaaaatgaaggcctgctggtggccgccctggaggagctggccttcaaggccagcgagcagatctacggcacccccagcagcagcccctatgaatgtctgcggcagagctgcaacatcctgatcagcaccatgaacaagctggccacagccatgcaggagggggagtatgatgctgagaggcctcccagcaagcccccacctgtggagctgcgggctgctgccctgcgggcagagatcacagatgctgagggcctgggcctgaagctggaggaccgggagaccgtcatcaaggagctgaagaagagcctgaagatcaagggggaggagctgtctgaggccaacgtgcggctgagcctgctggagaagaagctggacagcgctgccaaggatgctgatgaaagaattgagaaggtgcagacccggctggaggagacccaggccctgctgaggaagaaggagaaggagtttgaggagaccatggatgccctgcaggccgacatcgaccagctggaggccgagaaggccgagctgaagcagaggctgaacagccagagcaagaggaccatcgagggcctgcggggccccccacccagcggcatcgccaccctggtgtctggaattgctggggaggagcagcagagaggagccatccctggccaggcccctggctctgtgcccggccctggcctggtgaaggacagccccctgctgctgcagcagatcagcgccatgaggctgcacatcagccagctgcagcacgagaacagcatcctgaagggggcccagatgaaggccagcctggccagcctgccccccctgcacgtggccaagctgagccatgagggccctggcagcgagctgcctgctggggccctgtacaggaagaccagccagctgctggagaccctgaaccagctgagcacccacacccacgtggtggacatcaccaggaccagccctgctgccaagagccccagcgcccagctgatggagcaggtggcccagctgaagagcctgagtgacacagtggagaagctgaaggatgaggtgctgaaggagaccgtgtcccagaggcctggggccaccgtgcccacagactttgccaccttccccagcagcgccttcctgcgggccaaggaggagcagcaggatgacacagtgtacatgggcaaggtgaccttcagctgtgccgccggcttcggccagaggcaccggctggtgctgacccaggagcagctgcaccagctgcacagccgcctcatctcctag

SEQ ID NO: 150577 - DNA, 3771 bp, synthetic construct
  misc_feature 1..3771: note = Description of Artificial Sequence: Synthetic coding sequence
  source 1..3771: mol_type = other DNA
atgtctgctgaggccagcgcccggcccctgcgggtgggcagccgggtggaggtgattggcaagggccaccggggcaccgtggcctacgtgggcgccaccctgtttgccaccgggaagtgggtgggcgtcatcctggatgaggccaagggcaagaatgatggcaccgtgcagggcaggaagtacttcacctgtgatgagggccacggcatctttgtgcggcagagccagatccaggtgtttgaagatggagctgacaccaccagccctgagaccccagacagcagcgccagcaaggtgctgaagcgggagggcacagacaccacagccaagaccagcaagctgcggggcctgaagcccaagaaggcccccacagccaggaagaccaccacccggcggcccaagcccaccaggcctgccagcactggagtggccggggccagcagcagcctgggccccagcggcagcgccagcgctggggagctgagcagcagcgagcccagcaccccagcccagacccccctggccgcccccatcatccccacccctgtgctgaccagccctggagctgtgccccccctgcccagccccagcaaggaggaggagggcctgcgggcccaggtgcgggacctggaggagaagctggagaccctgcggctgaagagagctgaggacaaggccaagctgaaggagctggagaagcacaagatccagctggagcaggtgcaggagtggaagagcaagatgcaggagcagcaggccgacctgcagaggcggctgaaggaggccaggaaggaggccaaggaggccctggaggccaaggagcgctacatggaggagatggctgacacagcagatgccatcgagatggccaccctggacaaggagatggccgaggagagagctgagagcctgcagcaggaggtggaggccctgaaggagcgggtggatgagctgaccacagacctggagatcctgaaggccgagattgaggagaagggcagtgatggagctgccagcagctaccagctgaagcagctggaggagcagaatgcccggctgaaggatgccctggtgaggatgagggacctgagcagcagcgagaagcaggagcacgtgaagctgcagaagctgatggagaagaagaaccaggagctggaggtggtgcggcagcagcgggagcggctgcaggaggagctgagccaggccgagagcaccattgatgagctgaaggagcaggtggatgctgccctgggcgctgaggagatggtggagatgctgacagacaggaacctgaacctggaggagaaggtgcgggagctgcgggagaccgtgggggacctggaggccatgaatgagatgaatgatgagctgcaggagaatgcccgggagacagagctggagctgcgggagcagctggacatggccggggcccgggtgcgggaggcccagaagagggtggaggccgcccaggagaccgtggccgactaccagcagaccatcaagaagtaccggcagctgacagcccacctgcaggatgtgaaccgggagctgaccaaccagcaggaggcctctgtggagcggcagcagcagcccccacctgagacctttgacttcaagatcaagtttgctgagaccaaggcccacgccaaggccatcgagatggagctgcggcagatggaggtggcccaggccaacagacacatgagcctgctgacagccttcatgccagacagcttcctgcggcctggaggagaccatgactgtgtgctggtgctgctgctgatgcccaggctcatctgcaaggccgagctgatcaggaagcaggcccaggagaagtttgagctgtctgagaactgcagcgagaggcctggcctgcggggagctgctggggagcagctgagctttgctgctggcctggtgtacagcctgagcctgctgcaggccaccctgcacagatatgaacatgccctgagccagtgcagcgtggatgtgtacaagaaggtgggcagcctgtacccagagatgtctgcccacgagaggagcctggacttcctgattgagctgctgcacaaggaccagctggatgaaacagtgaatgtggagcccctgaccaaggccatcaagtactaccagcacctgtacagcatccacctggccgagcagcctgaggactgcaccatgcagctggccgaccacatcaagttcacccagagcgccctggactgcatgtctgtggaggtgggccgcctgcgggccttcctgcagggcggccaggaggccacagacatcgccctgctgctgcgggacctggagaccagctgcagcgacatccggcagttctgcaagaagatcagaagaaggatgcctggaacagatgcccctggcatcccagctgccctggccttcggcccccaggtgtctgacaccctgctggactgcaggaagcacctgacctgggtggtggccgtgctgcaggaggtggccgctgctgctgcccagctgattgcccccctggccgagaatgaaggcctgctggtggccgccctggaggagctggccttcaaggccagcgagcagatctacggcacccccagcagcagcccctatgagtgcctgcggcagagctgcaacatcctgatcagcaccatgaacaagctggccacagccatgcaggagggggagtatgatgctgagcggccccccagcaagcccccacctgtggagctgcgggccgccgccctgcgggcagagatcacagatgctgagggcctgggcctgaagctggaggaccgggagaccgtcatcaaggagctgaagaagagcctgaagatcaagggggaggagctgtctgaggccaacgtgcggctgagcctgctggagaagaagctggacagcgctgccaaggatgctgatgagcgcatcgagaaggtgcagacccggctggaggagacccaggccctgctgaggaagaaggagaaggagtttgaggagaccatggatgccctgcaggccgacatcgaccagctggaggccgagaaggccgagctgaagcagaggctgaacagccagagcaagaggaccatcgagggcctgcggggccccccaccttctggaattgccaccctggtgtctggaattgctggaggagccatccctggccaggcccctggctctgtgcccggccctggcctggtgaaggacagccccctgctgctgcagcagatcagcgccatgaggctgcacatcagccagctgcagcacgagaacagcatcctgaagggggcccagatgaaggccagcctggccagcctgccccccctgcacgtggccaagctgagccatgagggccctggcagcgagctgcctgctggggccctgtacaggaagaccagccagctgctggagaccctgaaccagctgagcacccacacccacgtggtggacatcaccaggaccagccctgctgccaagagccccagcgcccagctgatggagcaggtggcccagctgaagagcctgagtgacacagtggagaagctgaaggatgaggtgctgaaggagaccgtgtcccagaggcctggggccaccgtgcccacagactttgccaccttccccagcagcgccttcctgcgggccaaggaggagcagcaggatgacacagtgtacatgggcaaggtgaccttcagctgtgccgccggcttcggccagaggcaccggctggtgctgacccaggagcagctgcaccagctgcacagccgcctcatctcctag

SEQ ID NO: 150578 - DNA, 2673 bp, synthetic construct
  misc_feature 1..2673: note = Description of Artificial Sequence: Synthetic coding sequence
  source 1..2673: mol_type = other DNA
atgtctgctgaggccagcgcccggcccctgcgggtgggcagccgggtggaggtgattggcaagggccaccggggcaccgtggcctacgtgggcgccaccctgtttgccaccgggaagtgggtgggcgtcatcctggatgaggccaagggcaagaatgatggcaccgtgcagggcaggaagtacttcacctgtgatgagggccacggcatctttgtgcggcagagccagatccaggtgtttgaagatggagctgacaccaccagccctgagaccccagacagcagcgccagcaaggtgctgaagcgggagggcacagacaccacagccaagaccagcaagctgcccaccaggcctgccagcactggagtggccggggccagcagcagcctgggccccagcggcagcgccagcgctggggagctgagcagcagcgagcccagcaccccagcccagacccccctggccgcccccatcatccccacccctgtgctgaccagccctggagctgtgccccccctgcccagccccagcaaggaggaggagggcctgcgggcccaggtgcgggacctggaggagaagctggagaccctgcggctgaagagagctgaggacaaggccaagctgaaggagctggagaagcacaagatccagctggagcaggtgcaggagtggaagagcaagatgcaggagcagcaggccgacctgcagaggcggctgaaggaggccaggaaggaggccaaggaggccctggaggccaaggagcgctacatggaggagatggctgacacagcagatgccatcgagatggccaccctggacaaggagatggccgaggagagagctgagagcctgcagcaggaggtggaggccctgaaggagcgggtggatgagctgaccacagacctggagatcctgaaggccgagattgaggagaagggcagtgatggagctgccagcagctaccagctgaagcagctggaggagcagaatgcccggctgaaggatgccctggtgaggatgagggacctgagcagcagcgagaagcaggagcacgtgaagctgcagaagctgatggagaagaagaaccaggagctggaggtggtgcggcagcagcgggagcggctgcaggaggagctgagccaggccgagagcaccattgatgagctgaaggagcaggtggatgctgccctgggcgctgaggagatggtggagatgctgacagacaggaacctgaacctggaggagaaggtgcgggagctgcgggagaccgtgggggacctggaggccatgaatgagatgaatgatgagctgcaggagaatgcccgggagacagagctggagctgcgggagcagctggacatggccggggcccgggtgcgggaggcccagaagagggtggaggccgcccaggagaccgtggccgactaccagcagaccatcaagaagtaccggcagctgacagcccacctgcaggatgtgaaccgggagctgaccaaccagcaggaggcctctgtggagcggcagcagcagcccccacctgagacctttgacttcaagatcaagtttgctgagaccaaggcccacgccaaggccatcgagatggagctgcggcagatggaggtggcccaggccaacagacacatgagcctgctgacagccttcatgccagacagcttcctgcggcctggaggagaccatgactgtgtgctggtgctgctgctgatgcccaggctcatctgcaaggccgagctgatcaggaagcaggcccaggagaagtttgagctgtctgagaactgcagcgagaggcctggcctgcggggagctgctggggagcagctgagctttgctgctggcctggtgtacagcctgagcctgctgcaggccaccctgcacagatatgaacatgccctgagccagtgcagcgtggatgtgtacaagaaggtgggcagcctgtacccagagatgtctgcccacgagaggagcctggacttcctgattgagctgctgcacaaggaccagctggatgaaacagtgaatgtggagcccctgaccaaggccatcaagtactaccagcacctgtacagcatccacctggccgagcagcctgaggactgcaccatgcagctggccgaccacatcaagttcacccagagcgccctggactgcatgtctgtggaggtgggccgcctgcgggccttcctgcagggcggccaggaggccacagacatcgccctgctgctgcgggacctggagaccagctgcagcgacatccggcagttctgcaagaagatcagaagaaggatgcctggaacagatgcccctggcatcccagctgccctggccttcggcccccaggtgtctgacaccctgctggactgcaggaagcacctgacctgggtggtggccgtgctgcaggaggtggccgctgctgctgcccagctgattgcccccctggccgagaatgaaggcctgctggtggccgccctggaggagctggccttcaaggccagcgagcaggtgggcctggatggctgggtggagggcgtgggccgggtgtctgaccagtgtggggccttcaccagcgccctgggcagctgccgctccatgggccccccacctgctgcccccatgtctgtgtgtgccagccacgccaccagcagctctgtgccctag

SEQ ID NO: 150579 - DNA, 561 bp, synthetic construct
  misc_feature 1..561: note = Description of Artificial Sequence: Synthetic coding sequence
  source 1..561: mol_type = other DNA
atgctgatgggcctgctgcggccctacatcctgggggagcggggcaccgtgatgaccccatctggcagcaggatgtctgctgaggccagcgcccggcccctgcgggtgggcagccgggtggaggtgattggcaagggccaccggggcaccgtggcctacgtgggcgccaccctgtttgccaccgggaagtgggtgggcgtcatcctggatgaggccaagggcaagaatgatggcaccgtgcagggcaggaagtacttcacctgtgatgagggccacggcatctttgtgcggcagagccagatccaggtgtttgaagatggagctgacaccaccagccctgagaccccagacagcagcgccagcaaggtgctgaagcgggagggcacagacaccacagccaagaccagcaagctgcggggcctgaagcccaagaaggcccccacagccaggaagaccaccacccggcggcccaagcccaccaggcctgccagcactggagtggccggggccagcagcagcctgggccccagcggcagcgccagcgctggggagctgtcctag

SEQ ID NO: 150580 - DNA, 3711 bp, synthetic construct
  misc_feature 1..3711: note = Description of Artificial Sequence: Synthetic coding sequence
  source 1..3711: mol_type = other DNA
atgtctgctgaggccagcgcccggcccctgcgggtgggcagccgggtggaggtgattggcaagggccaccggggcaccgtggcctacgtgggcgccaccctgtttgccaccgggaagtgggtgggcgtcatcctggatgaggccaagggcaagaatgatggcaccgtgcagggcaggaagtacttcacctgtgatgagggccacggcatctttgtgcggcagagccagatccaggtgtttgaagatggagctgacaccaccagccctgagaccccagacagcagcgccagcaaggtgctgaagcgggagggcacagacaccacagccaagaccagcaagctgcccaccaggcctgccagcactggagtggccggggccagcagcagcctgggccccagcggcagcgccagcgctggggagctgagcagcagcgagcccagcaccccagcccagacccccctggccgcccccatcatccccacccctgtgctgaccagccctggagctgtgccccccctgcccagccccagcaaggaggaggagggcctgcgggcccaggtgcgggacctggaggagaagctggagaccctgcggctgaagagagctgaggacaaggccaagctgaaggagctggagaagcacaagatccagctggagcaggtgcaggagtggaagagcaagatgcaggagcagcaggccgacctgcagaggcggctgaaggaggccaggaaggaggccaaggaggccctggaggccaaggagcgctacatggaggagatggctgacacagcagatgccatcgagatggccaccctggacaaggagatggccgaggagagagctgagagcctgcagcaggaggtggaggccctgaaggagcgggtggatgagctgaccacagacctggagatcctgaaggccgagattgaggagaagggcagtgatggagctgccagcagctaccagctgaagcagctggaggagcagaatgcccggctgaaggatgccctggtgaggatgagggacctgagcagcagcgagaagcaggagcacgtgaagctgcagaagctgatggagaagaagaaccaggagctggaggtggtgcggcagcagcgggagcggctgcaggaggagctgagccaggccgagagcaccattgatgagctgaaggagcaggtggatgctgccctgggcgctgaggagatggtggagatgctgacagacaggaacctgaacctggaggagaaggtgcgggagctgcgggagaccgtgggggacctggaggccatgaatgagatgaatgatgagctgcaggagaatgcccgggagacagagctggagctgcgggagcagctggacatggccggggcccgggtgcgggaggcccagaagagggtggaggccgcccaggagaccgtggccgactaccagcagaccatcaagaagtaccggcagctgacagcccacctgcaggatgtgaaccgggagctgaccaaccagcaggaggcctctgtggagcggcagcagcagcccccacctgagacctttgacttcaagatcaagtttgctgagaccaaggcccacgccaaggccatcgagatggagctgcggcagatggaggtggcccaggccaacagacacatgagcctgctgacagccttcatgccagacagcttcctgcggcctggaggagaccatgactgtgtgctggtgctgctgctgatgcccaggctcatctgcaaggccgagctgatcaggaagcaggcccaggagaagtttgagctgtctgagaactgcagcgagaggcctggcctgcggggagctgctggggagcagctgagctttgctgctggcctggtgtacagcctgagcctgctgcaggccaccctgcacagatatgaacatgccctgagccagtgcagcgtggatgtgtacaagaaggtgggcagcctgtacccagagatgtctgcccacgagaggagcctggacttcctgattgagctgctgcacaaggaccagctggatgaaacagtgaatgtggagcccctgaccaaggccatcaagtactaccagcacctgtacagcatccacctggccgagcagcctgaggactgcaccatgcagctggccgaccacatcaagttcacccagagcgccctggactgcatgtctgtggaggtgggccgcctgcgggccttcctgcagggcggccaggaggccacagacatcgccctgctgctgcgggacctggagaccagctgcagcgacatccggcagttctgcaagaagatcagaagaaggatgcctggaacagatgcccctggcatcccagctgccctggccttcggcccccaggtgtctgacaccctgctggactgcaggaagcacctgacctgggtggtggccgtgctgcaggaggtggccgctgctgctgcccagctgattgcccccctggccgagaatgaaggcctgctggtggccgccctggaggagctggccttcaaggccagcgagcagatctacggcacccccagcagcagcccctatgagtgcctgcggcagagctgcaacatcctgatcagcaccatgaacaagctggccacagccatgcaggagggggagtatgatgctgagcggccccccagcaagcccccacctgtggagctgcgggccgccgccctgcgggcagagatcacagatgctgagggcctgggcctgaagctggaggaccgggagaccgtcatcaaggagctgaagaagagcctgaagatcaagggggaggagctgtctgaggccaacgtgcggctgagcctgctggagaagaagctggacagcgctgccaaggatgctgatgagcgcatcgagaaggtgcagacccggctggaggagacccaggccctgctgaggaagaaggagaaggagtttgaggagaccatggatgccctgcaggccgacatcgaccagctggaggccgagaaggccgagctgaagcagaggctgaacagccagagcaagaggaccatcgagggcctgcggggccccccaccttctggaattgccaccctggtgtctggaattgctggaggagccatccctggccaggcccctggctctgtgcccggccctggcctggtgaaggacagccccctgctgctgcagcagatcagcgccatgaggctgcacatcagccagctgcagcacgagaacagcatcctgaagggggcccagatgaaggccagcctggccagcctgccccccctgcacgtggccaagctgagccatgagggccctggcagcgagctgcctgctggggccctgtacaggaagaccagccagctgctggagaccctgaaccagctgagcacccacacccacgtggtggacatcaccaggaccagccctgctgccaagagccccagcgcccagctgatggagcaggtggcccagctgaagagcctgagtgacacagtggagaagctgaaggatgaggtgctgaaggagaccgtgtcccagaggcctggggccaccgtgcccacagactttgccaccttccccagcagcgccttcctgcgggccaaggaggagcagcaggatgacacagtgtacatgggcaaggtgaccttcagctgtgccgccggcttcggccagaggcaccggctggtgctgacccaggagcagctgcaccagctgcacagccgcctcatctcctag

SEQ ID NO: 150581 - DNA, 3420 bp, synthetic construct
  misc_feature 1..3420: note = Description of Artificial Sequence: Synthetic coding sequence
  source 1..3420: mol_type = other DNA
atgatgaggcaggcccccacagccaggaagaccaccacccggcggcccaagcccaccaggcctgccagcactggagtggccggggccagcagcagcctgggccccagcggcagcgccagcgctggggagctgagcagcagcgagcccagcaccccagcccagacccccctggccgcccccatcatccccacccctgtgctgaccagccctggagctgtgccccccctgcccagccccagcaaggaggaggagggcctgcgggcccaggtgcgggacctggaggagaagctggagaccctgcggctgaagagagctgaggacaaggccaagctgaaggagctggagaagcacaagatccagctggagcaggtgcaggagtggaagagcaagatgcaggagcagcaggccgacctgcagaggcggctgaaggaggccaggaaggaggccaaggaggccctggaggccaaggagcgctacatggaggagatggctgacacagcagatgccatcgagatggccaccctggacaaggagatggccgaggagcgggcagagagcctgcagcaggaggtggaggccctgaaggagcgggtggatgagctgaccacagacctggagatcctgaaggccgagattgaggagaagggcagtgatggagctgccagcagctaccagctgaagcagctggaggagcagaatgcccggctgaaggatgccctggtgaggatgagggacctgagcagcagcgagaagcaggagcacgtgaagctgcagaagctgatggagaagaagaaccaggagctggaggtggtgcggcagcagcgggagcggctgcaggaggagctgagccaggccgagagcaccattgatgagctgaaggagcaggtggatgctgccctgggcgctgaggagatggtggagatgctgacagacaggaacctgaacctggaggagaaggtgcgggagctgcgggagaccgtgggggacctggaggccatgaatgagatgaatgatgagctgcaggagaatgcccgggagacagagctggagctgcgggagcagctggacatggccggggcccgggtgcgggaggcccagaagagggtggaggccgcccaggagaccgtggccgactaccagcagaccatcaagaagtaccggcagctgacagcccacctgcaggatgtgaaccgggagctgaccaaccagcaggaggcctctgtggagcggcagcagcagcccccacctgagacctttgacttcaagatcaagtttgctgagaccaaggcccacgccaaggccatcgagatggagctgcggcagatggaggtggcccaggccaacagacacatgagcctgctgacagccttcatgccagacagcttcctgcggcctggaggagaccatgactgtgtgctggtgctgctgctgatgcccaggctcatctgcaaggccgagctgatcaggaagcaggcccaggagaagtttgagctgtctgagaactgcagcgagcggcccggcctgcggggagctgctggggagcagctgagctttgctgctggcctggtgtacagcctgagcctgctgcaggccaccctgcacagatatgagcacgccctgagccagtgcagcgtggatgtgtacaagaaggtgggcagcctgtacccagagatgtctgcccacgagaggagcctggacttcctgattgagctgctgcacaaggaccagctggatgagaccgtgaatgtggagcccctgaccaaggccatcaagtactaccagcacctgtacagcatccacctggccgagcagcctgaggactgcaccatgcagctggccgaccacatcaagttcacccagagcgccctggactgcatgtctgtggaggtgggccgcctgcgggccttcctgcagggcggccaggaggccacagacatcgccctgctgctgcgggacctggagaccagctgcagcgacatccggcagttctgcaagaagatcagaagaaggatgcctggaacagatgcccctggcatcccagctgccctggccttcggcccccaggtgtctgacaccctgctggactgcaggaagcacctgacctgggtggtggccgtgctgcaggaggtggccgctgctgctgcccagctgattgcccccctggctgaaaatgaaggcctgctggtggccgccctggaggagctggccttcaaggccagcgagcagatctacggcacccccagcagcagcccctatgaatgtctgcggcagagctgcaacatcctgatcagcaccatgaacaagctggccacagccatgcaggagggggagtatgatgctgagaggcctcccagcaagcccccacctgtggagctgcgggctgctgccctgcgggcagagatcacagatgctgagggcctgggcctgaagctggaggaccgggagaccgtcatcaaggagctgaagaagagcctgaagatcaagggggaggagctgtctgaggccaacgtgcggctgagcctgctggagaagaagctggacagcgctgccaaggatgctgatgaaagaattgagaaggtgcagacccggctggaggagacccaggccctgctgaggaagaaggagaaggagtttgaggagaccatggatgccctgcaggccgacatcgaccagctggaggccgagaaggccgagctgaagcagaggctgaacagccagagcaagaggaccatcgagggcctgcggggccccccacccagcggcatcgccaccctggtgtctggaattgctgggggcgccatccctggccaggcccctggctctgtgcccggccctggcctggtgaaggacagccccctgctgctgcagcagatcagcgccatgaggctgcacatcagccagctgcagcatgaaaattccatcctgaagggggcccagatgaaggccagcctggccagcctgccccccctgcacgtggccaagctgagccatgagggccctggcagcgagctgcctgctggggccctgtacaggaagaccagccagctgctggagaccctgaaccagctgagcacccacacccacgtggtggacatcaccaggaccagccctgctgccaagagccccagcgcccagctgatggagcaggtggcccagctgaagagcctgagtgacacagtggagaagctgaaggatgaggtgctgaaggagaccgtgtcccagaggcctggggccaccgtgcccacagactttgccaccttccccagcagcgccttcctgcgggccaaggaggagcagcaggatgacacagtgtacatgggcaaggtgaccttcagctgtgccgccggcttcggccagaggcaccggctggtgctgacccaggagcagctgcaccagctgcacagccgcctcatctcctag

SEQ ID NO: 150582 - DNA, 3762 bp, synthetic construct
  misc_feature 1..3762: note = Description of Artificial Sequence: Synthetic coding sequence
  source 1..3762: mol_type = other DNA
atggcccagagcaagagacatgtgtacagcaggacccccagcggcagcaggatgtctgctgaggccagcgcccggcccctgcgggtgggcagccgggtggaggtgattggcaagggccaccggggcaccgtggcctacgtgggcgccaccctgtttgccaccgggaagtgggtgggcgtcatcctggatgaggccaagggcaagaatgatggcaccgtgcagggcaggaagtacttcacctgtgatgagggccacggcatctttgtgcggcagagccagatccaggtgtttgaagatggagctgacaccaccagccctgagaccccagacagcagcgccagcaaggtgctgaagcgggagggcacagacaccacagccaagaccagcaagctgcccaccaggcctgccagcactggagtggccggggccagcagcagcctgggccccagcggcagcgccagcgctggggagctgagcagcagcgagcccagcaccccagcccagacccccctggccgcccccatcatccccacccctgtgctgaccagccctggagctgtgccccccctgcccagccccagcaaggaggaggagggcctgcgggcccaggtgcgggacctggaggagaagctggagaccctgcggctgaagagagctgaggacaaggccaagctgaaggagctggagaagcacaagatccagctggagcaggtgcaggagtggaagagcaagatgcaggagcagcaggccgacctgcagaggcggctgaaggaggccaggaaggaggccaaggaggccctggaggccaaggagcgctacatggaggagatggctgacacagcagatgccatcgagatggccaccctggacaaggagatggccgaggagcgggcagagagcctgcagcaggaggtggaggccctgaaggagcgggtggatgagctgaccacagacctggagatcctgaaggccgagattgaggagaagggcagtgatggagctgccagcagctaccagctgaagcagctggaggagcagaatgcccggctgaaggatgccctggtgaggatgagggacctgagcagcagcgagaagcaggagcacgtgaagctgcagaagctgatggagaagaagaaccaggagctggaggtggtgcggcagcagcgggagcggctgcaggaggagctgagccaggccgagagcaccattgatgagctgaaggagcaggtggatgctgccctgggcgctgaggagatggtggagatgctgacagacaggaacctgaacctggaggagaaggtgcgggagctgcgggagaccgtgggggacctggaggccatgaatgagatgaatgatgagctgcaggagaatgcccgggagacagagctggagctgcgggagcagctggacatggccggggcccgggtgcgggaggcccagaagagggtggaggccgcccaggagaccgtggccgactaccagcagaccatcaagaagtaccggcagctgacagcccacctgcaggatgtgaaccgggagctgaccaaccagcaggaggcctctgtggagcggcagcagcagcccccacctgagacctttgacttcaagatcaagtttgctgagaccaaggcccacgccaaggccatcgagatggagctgcggcagatggaggtggcccaggccaacagacacatgagcctgctgacagccttcatgccagacagcttcctgcggcctggaggagaccatgactgtgtgctggtgctgctgctgatgcccaggctcatctgcaaggccgagctgatcaggaagcaggcccaggagaagtttgagctgtctgagaactgcagcgagcggcccggcctgcggggagctgctggggagcagctgagctttgctgctggcctggtgtacagcctgagcctgctgcaggccaccctgcacagatatgagcacgccctgagccagtgcagcgtggatgtgtacaagaaggtgggcagcctgtacccagagatgtctgcccacgagaggagcctggacttcctgattgagctgctgcacaaggaccagctggatgagaccgtgaatgtggagcccctgaccaaggccatcaagtactaccagcacctgtacagcatccacctggccgagcagcctgaggactgcaccatgcagctggccgaccacatcaagttcacccagagcgccctggactgcatgtctgtggaggtgggccgcctgcgggccttcctgcagggcggccaggaggccacagacatcgccctgctgctgcgggacctggagaccagctgcagcgacatccggcagttctgcaagaagatcagaagaaggatgcctggaacagatgcccctggcatcccagctgccctggccttcggcccccaggtgtctgacaccctgctggactgcaggaagcacctgacctgggtggtggccgtgctgcaggaggtggccgctgctgctgcccagctgattgcccccctggctgaaaatgaaggcctgctggtggccgccctggaggagctggccttcaaggccagcgagcagatctacggcacccccagcagcagcccctatgaatgtctgcggcagagctgcaacatcctgatcagcaccatgaacaagctggccacagccatgcaggagggggagtatgatgctgagaggcctcccagcaagcccccacctgtggagctgcgggctgctgccctgcgggcagagatcacagatgctgagggcctgggcctgaagctggaggaccgggagaccgtcatcaaggagctgaagaagagcctgaagatcaagggggaggagctgtctgaggccaacgtgcggctgagcctgctggagaagaagctggacagcgctgccaaggatgctgatgaaagaattgagaaggtgcagacccggctggaggagacccaggccctgctgaggaagaaggagaaggagtttgaggagaccatggatgccctgcaggccgacatcgaccagctggaggccgagaaggccgagctgaagcagaggctgaacagccagagcaagaggaccatcgagggcctgcggggccccccacccagcggcatcgccaccctggtgtctggaattgctgggggcgccatccctggccaggcccctggctctgtgcccggccctggcctggtgaaggacagccccctgctgctgcagcagatcagcgccatgaggctgcacatcagccagctgcagcatgaaaattccatcctgaagggggcccagatgaaggccagcctggccagcctgccccccctgcacgtggccaagctgagccatgagggccctggcagcgagctgcctgctggggccctgtacaggaagaccagccagctgctggagaccctgaaccagctgagcacccacacccacgtggtggacatcaccaggaccagccctgctgccaagagccccagcgcccagctgatggagcaggtggcccagctgaagagcctgagtgacacagtggagaagctgaaggatgaggtgctgaaggagaccgtgtcccagaggcctggggccaccgtgcccacagactttgccaccttccccagcagcgccttcctgcgggccaaggaggagcagcaggatgacacagtgtacatgggcaaggtgaccttcagctgtgccgccggcttcggccagaggcaccggctggtgctgacccaggagcagctgcaccagctgcacagccgcctcatctcctag

SEQ ID NO: 150583 - DNA, 1221 bp, synthetic construct
  misc_feature 1..1221: note = Description of Artificial Sequence: Synthetic coding sequence
  source 1..1221: mol_type = other DNA
atggctgaccccaagtatgctgacctgcccggcatcgccagaaatgaaccagatgtgtatgagaccagtgacctgcctgaagatgaccaggccgagtttgatgcctttgcccaggagctggaggagctgaccagcacctctgtggagcacatcatcgtgaaccccaatgctgcctatgacaagttcaaggacaagagggtgggcaccaagggcctggacttcagtgaccgcatcggcaagaccaagaggacaggctatgagagcggggagtatgagatgctgggggagggcctgggcgtgaaggagaccccccagcagaagtaccagaggctgctgcacgaggtgcaggagctgaccacagaggtggagaagatcaagaccaccgtgaaggagagcgccacagaggagaagctgacccctgtgctgctggccaagcagctggccgccctgaagcagcagctggtggccagccacctggagaagctgctgggcccagatgctgccatcaacctgacagatcctgatggagccctggccaagaggctgctgctgcagctggaggccaccaagaacagcaaaggaggcagcggcggcaagaccaccggcaccccaccagacagcagcctggtgacctatgagctgcacagcaggcctgagcaggacaagttcagccaggccgccaaggtggccgagctggagaagaggctgacagagctggagacagctgtgcgctgtgaccaggatgcccagaaccccctgtctgctggcctgcagggcgcctgcctgatggagaccgtggagctgctgcaggccaaggtgtctgccctggacctggccgtgctggaccaggtggaggcccggctgcagagcgtgctgggcaaggtgaatgagatcgccaagcacaaggcctctgtggaggatgctgacacccagagcaaggtgcaccagctgtatgagaccatccagcgctggagccccatcgccagcaccctgcctgagctggtgcagaggctggtgaccatcaagcagctgcacgagcaggccatgcagtttggccagctgctgacccacctggacaccacccagcagatgattgccaacagcctgaaggacaacaccaccctgctgacccaggtgcagaccaccatgagggagaacctggccaccgtggagggcaactttgccagcattgatgagaggatgaagaagctgggcaagtag

SEQ ID NO: 150584 - DNA, 1137 bp, synthetic construct
  misc_feature 1..1137: note = Description of Artificial Sequence: Synthetic coding sequence
  source 1..1137: mol_type = other DNA
atgtatgcccagggcacagaggacagcaggaccctggaggagctgaccagcacctctgtggagcacatcatcgtgaaccccaatgctgcctatgacaagttcaaggacaagagggtgggcaccaagggcctggacttcagtgaccgcatcggcaagaccaagaggacaggctatgagagcggggagtatgagatgctgggggagggcctgggcgtgaaggagaccccccagcagaagtaccagaggctgctgcacgaggtgcaggagctgaccacagaggtggagaagatcaagaccaccgtgaaggagagcgccacagaggagaagctgacccctgtgctgctggccaagcagctggccgccctgaagcagcagctggtggccagccacctggagaagctgctgggcccagatgctgccatcaacctgacagatcctgatggagccctggccaagaggctgctgctgcagctggaggccaccaagaacagcaaaggaggcagcggcggcaagaccaccggcaccccaccagacagcagcctggtgacctatgagctgcacagcaggcctgagcaggacaagttcagccaggccgccaaggtggccgagctggagaagaggctgacagagctggagacagctgtgcgctgtgaccaggatgcccagaaccccctgtctgctggcctgcagggcgcctgcctgatggagaccgtggagctgctgcaggccaaggtgtctgccctggacctggccgtgctggaccaggtggaggcccggctgcagagcgtgctgggcaaggtgaatgagatcgccaagcacaaggcctctgtggaggatgctgacacccagagcaaggtgcaccagctgtatgagaccatccagcgctggagccccatcgccagcaccctgcctgagctggtgcagaggctggtgaccatcaagcagctgcacgagcaggccatgcagtttggccagctgctgacccacctggacaccacccagcagatgattgccaacagcctgaaggacaacaccaccctgctgacccaggtgcagaccaccatgagggagaacctggccaccgtggagggcaactttgccagcattgatgagaggatgaagaagctgggcaagtag

SEQ ID NO: 150585 - DNA, 945 bp, synthetic construct
  misc_feature 1..945: note = Description of Artificial Sequence: Synthetic coding sequence
  source 1..945: mol_type = other DNA
atgctgggggagggcctgggcgtgaaggagaccccccagcagaagtaccagaggctgctgcacgaggtgcaggagctgaccacagaggtggagaagatcaagaccaccgtgaaggagagcgccacagaggagaagctgacccctgtgctgctggccaagcagctggccgccctgaagcagcagctggtggccagccacctggagaagctgctgggcccagatgctgccatcaacctgacagatcctgatggagccctggccaagaggctgctgctgcagctggaggccaccaagaacagcaaaggaggcagcggcggcaagaccaccggcaccccaccagacagcagcctggtgacctatgagctgcacagcaggcctgagcaggacaagttcagccaggccgccaaggtggccgagctggagaagaggctgacagagctggagacagctgtgcgctgtgaccaggatgcccagaaccccctgtctgctggcctgcagggcgcctgcctgatggagaccgtggagctgctgcaggccaaggtgtctgccctggacctggccgtgctggaccaggtggaggcccggctgcagagcgtgctgggcaaggtgaatgagatcgccaagcacaaggcctctgtggaggatgctgacacccagagcaaggtgcaccagctgtatgagaccatccagcgctggagccccatcgccagcaccctgcctgagctggtgcagaggctggtgaccatcaagcagctgcacgagcaggccatgcagtttggccagctgctgacccacctggacaccacccagcagatgattgccaacagcctgaaggacaacaccaccctgctgacccaggtgcagaccaccatgagggagaacctggccaccgtggagggcaactttgccagcattgatgagaggatgaagaagctgggcaagtag

SEQ ID NO: 150586 - DNA, 1221 bp, synthetic construct
  misc_feature 1..1221: note = Description of Artificial Sequence: Synthetic coding sequence
  source 1..1221: mol_type = other DNA
atggctgaccccaagtatgctgacctgcccggcatcgccagaaatgaaccagatgtgtatgagaccagtgacctgcctgaagatgaccaggccgagtttgatgccaccgtgcagcacctggaggagctgaccagcacctctgtggagcacatcatcgtgaaccccaatgctgcctatgacaagttcaaggacaagagggtgggcaccaagggcctggacttcagtgaccgcatcggcaagaccaagaggacaggctatgagagcggggagtatgagatgctgggggagggcctgggcgtgaaggagaccccccagcagaagtaccagaggctgctgcacgaggtgcaggagctgaccacagaggtggagaagatcaagaccaccgtgaaggagagcgccacagaggagaagctgacccctgtgctgctggccaagcagctggccgccctgaagcagcagctggtggccagccacctggagaagctgctgggcccagatgctgccatcaacctgacagatcctgatggagccctggccaagaggctgctgctgcagctggaggccaccaagaacagcaaaggaggcagcggcggcaagaccaccggcaccccaccagacagcagcctggtgacctatgagctgcacagcaggcctgagcaggacaagttcagccaggccgccaaggtggccgagctggagaagaggctgacagagctggagacagctgtgcgctgtgaccaggatgcccagaaccccctgtctgctggcctgcagggcgcctgcctgatggagaccgtggagctgctgcaggccaaggtgtctgccctggacctggccgtgctggaccaggtggaggcccggctgcagagcgtgctgggcaaggtgaatgagatcgccaagcacaaggcctctgtggaggatgctgacacccagagcaaggtgcaccagctgtatgagaccatccagcgctggagccccatcgccagcaccctgcctgagctggtgcagaggctggtgaccatcaagcagctgcacgagcaggccatgcagtttggccagctgctgacccacctggacaccacccagcagatgattgccaacagcctgaaggacaacaccaccctgctgacccaggtgcagaccaccatgagggagaacctggccaccgtggagggcaactttgccagcattgatgagaggatgaagaagctgggcaagtag

SEQ ID NO: 150587 - DNA, 1206 bp, synthetic construct
  misc_feature 1..1206: note = Description of Artificial Sequence: Synthetic coding sequence
  source 1..1206: mol_type = other DNA
atggctgaccccaagtatgctgacctgcccggcatcgccagaaatgaaccagatgtgtatgagaccagtgacctgcctgaagatgaccaggccgagtttgatgctgaggagctgaccagcacctctgtggagcacatcatcgtgaaccccaatgctgcctatgacaagttcaaggacaagagggtgggcaccaagggcctggacttcagtgacagaattggcaagaccaagaggacaggctatgaaagtggagaatatgagatgctgggggagggcctgggcgtgaaggagaccccccagcagaagtaccagaggctgctgcacgaggtgcaggagctgaccacagaggtggagaagatcaagaccaccgtgaaggagagcgccacagaggagaagctgacccctgtgctgctggccaagcagctggccgccctgaagcagcagctggtggccagccacctggagaagctgctgggcccagatgctgccatcaacctgacagatcctgatggagccctggccaagaggctgctgctgcagctggaggccaccaagaacagcaagggcggcagcggcggcaagaccaccggcaccccaccagacagcagcctggtgacctatgagctgcacagcaggcctgagcaggacaagttcagccaggccgccaaggtggccgagctggagaagaggctgacagagctggagacagctgtgcgctgtgaccaggatgcccagaaccccctgtctgctggcctgcagggcgcctgcctgatggagaccgtggagctgctgcaggccaaggtgtctgccctggacctggccgtgctggaccaggtggaggcccggctgcagagcgtgctgggcaaggtgaatgaaattgccaagcacaaggcctctgtggaggatgctgacacccagagcaaggtgcaccagctgtatgagaccatccagcgctggagccccatcgccagcaccctgcctgagctggtgcagaggctggtgaccatcaagcagctgcacgagcaggccatgcagtttggccagctgctgacccacctggacaccacccagcagatgattgccaacagcctgaaggacaacaccaccctgctgacccaggtgcagaccaccatgagggagaacctggccaccgtggagggcaactttgccagcattgatgagaggatgaagaagctgggcaagtag

SEQ ID NO: 150588 - DNA, 561 bp, synthetic construct
  misc_feature 1..561: note = Description of Artificial Sequence: Synthetic coding sequence
  source 1..561: mol_type = other DNA
atggccggcctgacagacctgcagaggctgcaggcccgggtggaggagctggagcgctgggtgtatggccctgggggcgcccggggcagcaggaaggtggctgatggcctggtgaaggtgcaggtggccctgggcaacatcagcagcaagcgggagcgggtgaagatcctgtacaagaagattgaggacctgatcaagtacctggaccctgagtacatcgaccgcatcgccatcccagatgccagcaagctgcagttcatcctggccgaggagcagttcatcctgagccaggtggccctgctggagcaggtgaatgccctggtgcccatgctggacagcgcccacatcaaggctgtgcctgagcacgccgcccggctgcagaggctggcccagatccacatccagcagcaggaccagtgtgtggagatcacagaggagagcaaggccctgctggaggagtacaacaagaccaccatgctgctgagcaagcagtttgtgcagtgggatgagctgctgtgccagctggaggccgccacccaggtgaagccagctgaggagtag

SEQ ID NO: 150589 - DNA, 531 bp, synthetic construct
  misc_feature 1..531: note = Description of Artificial Sequence: Synthetic coding sequence
  source 1..531: mol_type = other DNA
atggccggcctgacagacctgcagaggctgcaggcccgggtggaggagctggagcgctgggtgtatggccctgggggcgcccggggcagcaggaaggtggctgatggcctggtgaaggtgcaggtggccctgggcaacatcagcagcaagcgggagcgggtgaagatcctgtacaagaagattgaggacctgatcaagtacctggaccctgagtacatcgaccgcatcgccatcccagatgccagcaagctgcagttcatcctggccgaggagcagttcatcctgagccaggtggccctgctggagcaggtgaatgccctggtgcccatgctggacagcgcccacatcaaggctgtgcctgagcacgccgcccggctgcagaggctggcccagatccacatccagcagcaggccccctggggcgtgggcgtgagagatgaggccggcagcctggtggaggatgtgggctttgcccagttcctgtctgtgctgcacttcggccccactggacctgtgtgtggcaaccactag

SEQ ID NO: 150590 - DNA, 486 bp, synthetic construct
  misc_feature 1..486: note = Description of Artificial Sequence: Synthetic coding sequence
  source 1..486: mol_type = other DNA
atggccggcctgacagacctgcagaggctgcaggcccgggtggaggagctggagcgctgggtgtatggccctgggggcgcccggggcagcaggaaggtggctgatggcctggtgaaggtgcaggtggccctgggcaacatcagcagcaagcgggagcgggtgaagatcctgtacaagaagattgaggacctgatcaagtacctggaccctgagtacatcgaccgcatcgccatcccagatgccagcaagctgcagttcatcctggccggaaatgccggcctgcacgtgtacatgcacctgaggatgtgggtggtgggggaggtgaagcacagagatggcctgagcatccagagcagcggcggctacaagccctggatgctgctgtctggaattgtggcctggttctgggtggaggaccccatggaccccctggtggacatcgagtacagcatccccctgcaccagctgcaggccatggtgccctag

SEQ ID NO: 150591 - DNA, 315 bp, synthetic construct
  misc_feature 1..315: note = Description of Artificial Sequence: Synthetic coding sequence
  source 1..315: mol_type = other DNA
atggccggcctgacagacctgcagaggctgcaggcccgggtggaggagctggagcgctgggtgtatggccctgggggcgcccggggcagcaggaaggtggctgatggcctggtgaaggtgcaggtggccctgggcaacatcagcagcaagcgggagcgggtgaagatcctgtacaagaagattgaggacctgatcaagtacctggaccctgagtacatcgaccgcatcgccatcccagatgccagcaagctgcagttcatcctggccgagaggagcagcctgtccttcccccggctgcacagctggagcaggtag

SEQ ID NO: 150592 - DNA, 477 bp, synthetic construct
  misc_feature 1..477: note = Description of Artificial Sequence: Synthetic coding sequence
  source 1..477: mol_type = other DNA
atggccggcctgacagacctgcagaggctgcaggcccgggtggaggagctggagcgctgggtgtatggccctgggggcgcccggggcagcaggaaggtggctgatggcctggtgaaggtgcaggtggccctgggcaacatcagcagcaagcgggagcgggtgaagatcctgtacaagaagattgaggacctgatcaagtacctggaccctgagtacatcgaccgcatcgccatcccagatgccagcaagctgcagttcatcctggccgctgtgcctgagcacgccgcccggctgcagaggctggcccagatccacatccagcagcaggaccagtgtgtggagatcacagaggagagcaaggccctgctggaggagtacaacaagaccaccatgctgctgagcaagcagtttgtgcagtgggatgagctgctgtgccagctggaggccgccacccaggtgaagccagctgaggagtag

SEQ ID NO: 150593 - DNA, 456 bp, synthetic construct
  misc_feature 1..456: note = Description of Artificial Sequence: Synthetic coding sequence
  source 1..456: mol_type = other DNA
cagaggctgcaggcccgggtggaggagctggagcgctgggtgtatggccctggaggagcccggggcagcaggaaggtggctgatggcctggtgaaggtgcaggtggccctgggcaacatcagcagcaagcgggagcgggtgaagatcctgtacaagaagattgaagatctcatcaagtacctggaccctgagtacatcgacagaattgccatcccagatgccagcaagctgcagttcatcctggccgctgtgcctgagcacgccgcccggctgcagaggctggcccagatccacatccagcagcaggaccagtgtgtggagatcacagaggagagcaaggccctgctggaggagtacaacaagaccaccatgctgctgagcaagcagtttgtgcagtgggatgagctgctgtgccagctggaggccgccacccaggtgaagccagctgaggagtag

SEQ ID NO: 150594 - DNA, 519 bp, synthetic construct
  misc_feature 1..519: note = Description of Artificial Sequence: Synthetic coding sequence
  source 1..519: mol_type = other DNA
atggccggcctgacagacctgcagaggctgcaggcccgggtggaggagctggagcgctgggtgtatggccctgggggcgcccggggcagcaggaaggtggctgatggcctggtgaaggtgcaggtggccctgggcaacatcagcagcaagcgggagcgggtgaagatcctgtacaagaagattgaggacctgatcaagtacctggaccctgagtacatcgaccgcatcgccatcccagatgccagcaagctgcagttcatcctggccggaaatgccggcctgcacgtgtacatgcacctgaggatgtgggtggtgggggaggtgaagcacagagatggcctgagcatccagagcagcggcggctacaagccctggatgctgctgtctggaattgtggcctggttctgggtggaggaccccatggaccccctggtggacatcgagtacagcatccccctgcaccagctgcaggccatggtgcctgccaccgtgggcgccagccctgtgttctaccagtag

SEQ ID NO: 150595 - DNA, 549 bp, synthetic construct
  misc_feature 1..549: note = Description of Artificial Sequence: Synthetic coding sequence
  source 1..549: mol_type = other DNA
atggagctgggggagctgctgtacaacaagtctgagtacatcgagacagccagcggcaacaaggtgtcccggcagagcgtgctgtgtggcagccagaacatcgtgctgaatggcaagaccatcgtgatgaatgactgcatcatccggggggacctggccaacgtgcgggtgggccgccactgtgtggtgaagagccgcagcgtcatccggccccccttcaagaagttcagcaagggcgtggccttcttccccctgcacatcggggaccacgtgttcatcgaggaggactgtgtggtgaatgctgcccagatcggcagctatgtgcacgtgggcaagaactgtgtgattggccgccgctgtgtgctgaaggactgctgcaagatcctggacaacacagtgctgcccccagagaccgtggtgccccccttcaccgtcttcagcggctgccccggcctcttcagcggggagctgcctgaatgtacccaggagctgatgattgatgtgaccaagagctactaccagaagttcctgcccctgacccaggtgtag

SEQ ID NO: 150596 - DNA, 255 bp, synthetic construct
  misc_feature 1..255: note = Description of Artificial Sequence: Synthetic coding sequence
  source 1..255: mol_type = other DNA
atggagctgggggagctgctgtacaacaagtctgagtacatcgagacagccagcggcaacaaggtgtcccggcagagcgtgctgtgtggcagccagaacatcgtgctgaatggcaagaactttgtgatcagcgtcttcctgagcccctacatccgctgccacagcgcctgccgggacaggaagagaagtgatgagagcgtgcggctgtctgtgaacaaccgggagtggtggggcctggtgaactggaggatgtag

SEQ ID NO: 150597 - DNA, 1650 bp, synthetic construct
  misc_feature 1..1650: note = Description of Artificial Sequence: Synthetic coding sequence
  source 1..1650: mol_type = other DNA
atggagtttgctgagctgatcaagaccccccgggtggacaacgtggtgctgcaccggcccttctacccagctgtggagggcaccctgtgcctgaccggccaccacctgatcctgagcagccggcaggacaacacagaggagctgtggctgctgcacagcaacattgatgccatcgacaagagatttgtgggcagcctgggcaccatcatcatcaagtgcaaggacttccgcatcatccagctggacatccctggcatggaggagtgcctgaacatcgccagcagcattgaggccctgagcaccctggacagcatcaccctgatgtaccccttcttctaccggcccatgtttgaggtgattgaagatggctggcacagcttcctgcctgagcaggagtttgagctgtacagcagcgccaccagcgagtggaggctgtcctatgtgaacaaggagtttgctgtgtgccccagctacccacccatcgtgacagtgcccaagagcattgatgatgaggccctgaggaaggtggccaccttcagacatggaggccgcttccctgtgctgagctactaccacaagaagaatggcatggtgatcatgaggagcggccagcccctgaccggcaccaacggccgccgctgcaaggaggatgagaagctgatcaatgccaccctgcgggccggcaagaggggctacatcatcgacaccaggagcctgaatgtggcccagcagacccgggccaagggcggcggctttgagcaggaggcccactacccccagtggaggcgcatccacaagagcattgaaagataccacatcctgcaggagagcctcatcaagctggtggaggcctgcaatgaccagacccacaacatggaccgctggctgagcaagctggaggccagcaactggctgacccacatcaaggagatcctgaccacagcctgcctggccgcccagtgcatcgaccgggagggcgccagcatcctgatccacggcacagagggcacagacagcaccctgcaggtgaccagcctggcccagatcatcctggagcccaggagcaggaccatccggggctttgaggccctgattgagcgggagtggctgcaggccggccaccccttccagcagagatgtgcccagagcgcctactgcaacaccaagcagaagtgggaggcccctgtgttcctgctcttcctggactgtgtgtggcagatcctgcggcagttcccctgcagctttgagttcaatgaaaacttcctgatcatgctgtttgagcacgcctatgccagccagtttggcaccttcctgggcaacaatgaaagtgagcgctgcaagctgaagctgcagcagaagaccatgagcctgtggagctgggtgaaccagcccagcgagctgagcaagttcaccaaccccctgtttgaggccaacaacctggtgatctggcccagcgtggccccccagagcctgcccctgtgggagggcatcttcctgcgctggaacagaagcagcaagtacctggatgaggcctatgaggagatggtgaacatcatcgagtacaacaaggagctgcaggccaaggtgaacatcctgcggcggcagctggccgagctggagacagaagatggcatgcaggagagcccctag

SEQ ID NO: 150598 - DNA, 2556 bp, synthetic construct
  misc_feature 1..2556: note = Description of Artificial Sequence: Synthetic coding sequence
  source 1..2556: mol_type = other DNA
atgggcaacagaggcatggaggacctgatccccctggtgaaccggctgcaggatgccttcagcgccatcggccagaatgctgacctggacctgccccagattgctgtggtgggcggccagagcgctgggaagagctctgtgctggagaactttgtgggccgggacttcctgccccggggcagcggcatcgtgacccggcggcccctggtgctgcagctggtgaatgccaccacagaatatgcagagttcctgcactgcaagggcaagaagttcacagactttgaggaggtgcggctggagattgaagctgagacagacagagtgacaggcaccaacaagggcatcagccctgtgcccatcaacctgcgggtgtacagcccccacgtgctgaacctgaccctggtggacctgcccggcatgaccaaggtgcctgtgggggaccagcccccagacatcgagttccagatccgggacatgctgatgcagtttgtgaccaaggagaactgcctgatcctggccgtgtccccagccaacagcgacctggccaacagtgatgccctgaaggtggccaaggaggtggacccccagggccagaggaccatcggggtcatcaccaagctggacctgatggatgagggcacagatgccagagatgtgctggagaacaagctgctgcccctgcggcggggctacatcggcgtggtgaacagaagccagaaggacattgatggcaagaaggacatcacagctgccctggccgctgagaggaagttcttcctgagccaccccagctaccgccacctggccgacaggatgggcaccccctacctgcagaaggtgctgaaccagcagctgaccaaccacatccgggacaccctgcccggcctgaggaacaagctgcagagccagctgctgagcattgagaaggaggtggaggagtacaagaacttccggccagatgatcctgccaggaagaccaaggccctgctgcagatggtgcagcagtttgctgtggactttgagaagagaattgagggcagcggggaccagattgacacctatgagctgtctggaggagcccgcatcaaccgcatcttccacgagcgcttcccctttgagctggtgaagatggagtttgatgagaaggagctgcggcgggagatctcctatgccatcaagaacatccacggcatcagaacaggcctcttcaccccagacatggcctttgagaccatcgtgaagaagcaggtgaagaagatccgggagccctgcctgaagtgtgtggacatggtgatcagcgagctgatcagcacagtgcggcagtgcaccaagaagctgcagcagtacccccggctgcgggaggagatggagagaattgtgaccacccacatccgggagcgggagggccgcaccaaggagcaggtgatgctgctgattgatattgagctggcctacatgaacaccaaccacgaggacttcatcggctttgccaatgcccagcagaggagcaaccagatgaacaagaagaagaccagcggcaaccaggatgagatcctggtgatcaggaagggctggctgaccatcaacaacatcggcatcatgaagggcggcagcaaggagtactggtttgtgctgacagctgagaacctgtcctggtacaaggatgatgaggagaaggagaagaagtacatgctgtctgtggacaacctgaagctgagagatgtggagaagggcttcatgagcagcaagcacatctttgccctcttcaacacagagcagagaaatgtgtacaaggactaccggcagctggagctggcctgtgagacccaggaggaggtggacagctggaaggccagcttcctgcgggccggcgtgtacccagagcgggtgggggacaaggagaaggccagcgagacagaagaaaatggaagtgacagcttcatgcacagcatggacccccagctggagcggcaggtggagaccatccggaacctggtggacagctacatggccatcgtgaacaagacagtgcgggacctgatgcccaagaccatcatgcacctgatgatcaacaacaccaaggagttcatcttcagcgagctgctggccaacctgtacagctgtggggaccagaacaccctgatggaggagagcgctgagcaggcccagaggagagatgagatgctgaggatgtaccacgccctgaaggaggccctgagcatcatcggggacatcaacaccaccaccgtgtccacccccatgcctcctcctgtggatgacagctggctgcaggtgcagagcgtgcctgctggccgccgcagccccaccagcagccccaccccccagaggcgggccccagctgtgcccccagcccggcccggcagccggggccctgcccctggccccccacctgctggcagcgccctgggcggggcccctcctgtgcccagcaggcctggggccagcccagaccccttcggccccccaccccaggtgcccagccggcccaacagagcccctcctggggtgccccgcatcaccatcagtgacccctag

SEQ ID NO: 150599 - DNA, 2595 bp, synthetic construct
  misc_feature 1..2595: note = Description of Artificial Sequence: Synthetic coding sequence
  source 1..2595: mol_type = other DNA
atgggcaacagaggcatggaggacctgatccccctggtgaaccggctgcaggatgccttcagcgccatcggccagaatgctgacctggacctgccccagattgctgtggtgggcggccagagcgctgggaagagctctgtgctggagaactttgtgggccgggacttcctgccccggggcagcggcatcgtgacccggcggcccctggtgctgcagctggtgaatgccaccacagaatatgcagagttcctgcactgcaagggcaagaagttcacagactttgaggaggtgcggctggagattgaagctgagacagacagagtgacaggcaccaacaagggcatcagccctgtgcccatcaacctgcgggtgtacagcccccacgtgctgaacctgaccctggtggacctgcccggcatgaccaaggtgcctgtgggggaccagcccccagacatcgagttccagatccgggacatgctgatgcagtttgtgaccaaggagaactgcctgatcctggccgtgtccccagccaacagcgacctggccaacagtgatgccctgaaggtggccaaggaggtggacccccagggccagaggaccatcggggtcatcaccaagctggacctgatggatgagggcacagatgccagagatgtgctggagaacaagctgctgcccctgcggcggggctacatcggcgtggtgaacagaagccagaaggacattgatggcaagaaggacatcacagctgccctggccgctgagaggaagttcttcctgagccaccccagctaccgccacctggccgacaggatgggcaccccctacctgcagaaggtgctgaaccagcagctgaccaaccacatccgggacaccctgcccggcctgaggaacaagctgcagagccagctgctgagcattgagaaggaggtggaggagtacaagaacttccggccagatgatcctgccaggaagaccaaggccctgctgcagatggtgcagcagtttgctgtggactttgagaagagaattgagggcagcggggaccagattgacacctatgagctgtctggaggagcccgcatcaaccgcatcttccacgagcgcttcccctttgagctggtgaagatggagtttgatgagaaggagctgcggcgggagatctcctatgccatcaagaacatccacggcatcagaacaggcctcttcaccccagacatggcctttgagaccatcgtgaagaagcaggtgaagaagatccgggagccctgcctgaagtgtgtggacatggtgatcagcgagctgatcagcacagtgcggcagtgcaccaagaagctgcagcagtacccccggctgcgggaggagatggagagaattgtgaccacccacatccgggagcgggagggccgcaccaaggagcaggtgatgctgctgattgatattgagctggcctacatgaacaccaaccacgaggacttcatcggctttgccaatgcccagcagaggagcaaccagatgaacaagaagaagaccagcggcaaccaggatgagatcctggtgatcaggaagggctggctgaccatcaacaacatcggcatcatgaagggcggcagcaaggagtactggtttgtgctgacagctgagaacctgtcctggtacaaggatgatgaggagaaggagaagaagtacatgctgtctgtggacaacctgaagctgagagatgtggagaagggcttcatgagcagcaagcacatctttgccctcttcaacacagagcagagaaatgtgtacaaggactaccggcagctggagctggcctgtgagacccaggaggaggtggacagctggaaggccagcttcctgcgggccggcgtgtacccagagcgggtgggggacaaggagaaggccagcgagacagaagaaaatggaagtgacagcttcatgcacagcatggacccccagctggagcggcaggtggagaccatccggaacctggtggacagctacatggccatcgtgaacaagacagtgcgggacctgatgcccaagaccatcatgcacctgatgatcaacaacaccaaggagttcatcttcagcgagctgctggccaacctgtacagctgtggggaccagaacaccctgatggaggagagcgctgagcaggcccagaggagagatgagatgctgaggatgtaccacgccctgaaggaggccctgagcatcatcggggacatcaacaccaccaccgtgtccacccccatgcctcctcctgtggatgacagctggctgcaggtgcagagcgtgcctgctggccgccgcagccccaccagcagccccaccccccagaggcgggccccagctgtgcccccagcccggcccggcagccggggccctgcccctggccccccacctgctggcagcgccctgggcggggcccctcctgtgcccagcaggcctggggccagcccagaccccttcggccccccaccccaggtgcccagccggcccaacagagcccctcctggggtgcccagccgcagcggccaggccagccccagcaggcctgagagcccccggcccccatttgacctgtag

SEQ ID NO: 150600 - DNA, 1989 bp, synthetic construct
  misc_feature 1..1989: note = Description of Artificial Sequence: Synthetic coding sequence
  source 1..1989: mol_type = other DNA
atggaggacctgatccccctggtgaaccggctgcaggatgccttcagcgccatcggccagaatgctgacctggacctgccccagattgctgtggtgggcggccagagcgctgggaagagctctgtgctggagaactttgtgggccgggacttcctgccccggggcagcggcatcgtgacccggcggcccctggtgctgcagctggtgaatgccaccacagaatatgcagagttcctgcactgcaagggcaagaagttcacagactttgaggaggtgcggctggagattgaggccgagacagacagagtgacaggcaccaacaagggcatcagccctgtgcccatcaacctgcgggtgtacagcccccacgtgctgaacctgaccctggtggacctgcccggcatgaccaaggtgcctgtgggggaccagcccccagacatcgagttccagatccgggacatgctgatgcagtttgtgaccaaggagaactgcctgatcctggccgtgtccccagccaacagcgacctggccaacagtgatgccctgaaggtggccaaggaggtggacccccagggccagaggaccatcggggtcatcaccaagctggacctgatggatgagggcacagatgccagagatgtgctggagaacaagctgctgcccctgcggcggggctacatcggcgtggtgaacagaagccagaaggacattgatggcaagaaggacatcacagctgccctggccgctgagaggaagttcttcctgagccaccccagctaccgccacctggccgacaggatgggcaccccctacctgcagaaggtgctgaaccagcagctgaccaaccacatccgggacaccctgcccggcctgaggaacaagctgcagagccagctgctgagcattgagaaggaggtggaggagtacaagaacttccggccagatgatcctgccaggaagaccaaggccctgctgcagatggtgcagcagtttgctgtggactttgagaagagaattgagggcagcggggaccagattgacacctatgagctgagcggcggggcccgcatcaaccgcatcttccacgagcgcttcccctttgagctggtgaagatggagtttgatgagaaggagctgcggcgggagatctcctatgccatcaagaacatccacggcatcagaacaggcctcttcaccccagacatggcctttgagaccatcgtgaagaagcaggtgaagaagatccgggagccctgcctgaagtgtgtggacatggtgatcagcgagctgatcagcacagtgcggcagtgcaccaagaagctgcagcagtacccccggctgcgggaggagatggagcgcatcgtgaccacccacatccgggagcgggagggccgcaccaaggagcaggtgatgctgctgattgacatcgagctggcctacatgaacaccaaccacgaggacttcatcggctttgccaatgcccagcagaggagcaaccagatgaacaagaagaagaccagcggcaaccagatcaccctgcaggtgatcaggaagggctggctgaccatcaacaacatcggcatcatgaagggcggcagcaaggagtactggtttgtgctgacagctgagaacctgtcctggtacaaggatgatgaggagaaggagaagaagtacatgctgtctgtggacaacctgaagctgagagatgtggagaagggcttcatgagcagcaagcacatctttgccctcttcaacacagagcagagaaatgtgtacaaggactaccggcagctggagctggcctgtgagacccaggaggaggtggacagctggaaggccagcttcctgcgggccggcgtgtacccagagcgggtgggggacaaggagaaggtgtctgtgcccttcagctgcctgctgcccggcatctgcagcctggccccagccccagcccgcttcagcagcaaaggacctggagatgtgctcttctag

SEQ ID NO: 150601 - DNA, 2556 bp, synthetic construct
  misc_feature 1..2556: note = Description of Artificial Sequence: Synthetic coding sequence
  source 1..2556: mol_type = other DNA
atgggcaacagaggcatggaggacctgatccccctggtgaaccggctgcaggatgccttcagcgccatcggccagaatgctgacctggacctgccccagattgctgtggtgggcggccagagcgctgggaagagctctgtgctggagaactttgtgggccgggacttcctgccccggggcagcggcatcgtgacccggcggcccctggtgctgcagctggtgaatgccaccacagaatatgcagagttcctgcactgcaagggcaagaagttcacagactttgaggaggtgcggctggagattgaagctgagacagacagagtgacaggcaccaacaagggcatcagccctgtgcccatcaacctgcgggtgtacagcccccacgtgctgaacctgaccctggtggacctgcccggcatgaccaaggtgcctgtgggggaccagcccccagacatcgagttccagatccgggacatgctgatgcagtttgtgaccaaggagaactgcctgatcctggccgtgtccccagccaacagcgacctggccaacagtgatgccctgaaggtggccaaggaggtggacccccagggccagaggaccatcggggtcatcaccaagctggacctgatggatgagggcacagatgccagagatgtgctggagaacaagctgctgcccctgcggcggggctacatcggcgtggtgaacagaagccagaaggacattgatggcaagaaggacatcacagctgccctggccgctgagaggaagttcttcctgagccaccccagctaccgccacctggccgacaggatgggcaccccctacctgcagaaggtgctgaaccagcagctgaccaaccacatccgggacaccctgcccggcctgaggaacaagctgcagagccagctgctgagcattgagaaggaggtggaggagtacaagaacttccggccagatgatcctgccaggaagaccaaggccctgctgcagatggtgcagcagtttgctgtggactttgagaagagaattgagggcagcggggaccagattgacacctatgagctgtctggaggagcccgcatcaaccgcatcttccacgagcgcttcccctttgagctggtgaagatggagtttgatgagaaggagctgcggcgggagatctcctatgccatcaagaacatccacggcatcagaacaggcctcttcaccccagacctggcctttgaggccaccgtgaagaagcaggtgcagaagctgaaggagcccagcatcaagtgtgtggacatggtggtgtctgagctgacagccaccatcagaaaatgttctgagaagctgcagcagtacccccggctgcgggaggagatggagagaattgtgaccacccacatccgggagcgggagggccgcaccaaggagcaggtgatgctgctgattgatattgagctggcctacatgaacaccaaccacgaggacttcatcggctttgccaatgcccagcagaggagcaaccagatgaacaagaagaagaccagcggcaaccaggatgagatcctggtgatcaggaagggctggctgaccatcaacaacatcggcatcatgaagggcggcagcaaggagtactggtttgtgctgacagctgagaacctgtcctggtacaaggatgatgaggagaaggagaagaagtacatgctgtctgtggacaacctgaagctgagagatgtggagaagggcttcatgagcagcaagcacatctttgccctcttcaacacagagcagagaaatgtgtacaaggactaccggcagctggagctggcctgtgagacccaggaggaggtggacagctggaaggccagcttcctgcgggccggcgtgtacccagagcgggtgggggacaaggagaaggccagcgagacagaagaaaatggaagtgacagcttcatgcacagcatggacccccagctggagcggcaggtggagaccatccggaacctggtggacagctacatggccatcgtgaacaagacagtgcgggacctgatgcccaagaccatcatgcacctgatgatcaacaacaccaaggagttcatcttcagcgagctgctggccaacctgtacagctgtggggaccagaacaccctgatggaggagagcgctgagcaggcccagaggagagatgagatgctgaggatgtaccacgccctgaaggaggccctgagcatcatcggggacatcaacaccaccaccgtgtccacccccatgcctcctcctgtggatgacagctggctgcaggtgcagagcgtgcctgctggccgccgcagccccaccagcagccccaccccccagaggcgggccccagctgtgcccccagcccggcccggcagccggggccctgcccctggccccccacctgctggcagcgccctgggcggggcccctcctgtgcccagcaggcctggggccagcccagaccccttcggccccccaccccaggtgcccagccggcccaacagagcccctcctggggtgccccgcatcaccatcagtgacccctag

SEQ ID NO: 150602 - DNA, 2556 bp, synthetic construct; identical to SEQ ID NO: 150601
  misc_feature 1..2556: note = Description of Artificial Sequence: Synthetic coding sequence
  source 1..2556: mol_type = other DNA

SEQ ID NO: 150603 - DNA, 2595 bp, synthetic construct
  misc_feature 1..2595: note = Description of Artificial Sequence: Synthetic coding sequence
  source 1..2595: mol_type = other DNA
atgggcaacagaggcatggaggacctgatccccctggtgaaccggctgcaggatgccttcagcgccatcggccagaatgctgacctggacctgccccagattgctgtggtgggcggccagagcgctgggaagagctctgtgctggagaactttgtgggccgggacttcctgccccggggcagcggcatcgtgacccggcggcccctggtgctgcagctggtgaatgccaccacagaatatgcagagttcctgcactgcaagggcaagaagttcacagactttgaggaggtgcggctggagattgaagctgagacagacagagtgacaggcaccaacaagggcatcagccctgtgcccatcaacctgcgggtgtacagcccccacgtgctgaacctgaccctggtggacctgcccggcatgaccaaggtgcctgtgggggaccagcccccagacatcgagttccagatccgggacatgctgatgcagtttgtgaccaaggagaactgcctgatcctggccgtgtccccagccaacagcgacctggccaacagtgatgccctgaaggtggccaaggaggtggacccccagggccagaggaccatcggggtcatcaccaagctggacctgatggatgagggcacagatgccagagatgtgctggagaacaagctgctgcccctgcggcggggctacatcggcgtggtgaacagaagccagaaggacattgatggcaagaaggacatcacagctgccctggccgctgagaggaagttcttcctgagccaccccagctaccgccacctggccgacaggatgggcaccccctacctgcagaaggtgctgaaccagcagctgaccaaccacatccgggacaccctgcccggcctgaggaacaagctgcagagccagctgctgagcattgagaaggaggtggaggagtacaagaacttccggccagatgatcctgccaggaagaccaaggccctgctgcagatggtgcagcagtttgctgtggactttgagaagagaattgagggcagcggggaccagattgacacctatgagctgtctggaggagcccgcatcaaccgcatcttccacgagcgcttcccctttgagctggtgaagatggagtttgatgagaaggagctgcggcgggagatctcctatgccatcaagaacatccacggcatcagaacaggcctcttcaccccagacctggcctttgaggccaccgtgaagaagcaggtgcagaagctgaaggagcccagcatcaagtgtgtggacatggtggtgtctgagctgacagccaccatcagaaaatgttctgagaagctgcagcagtacccccggctgcgggaggagatggagagaattgtgaccacccacatccgggagcgggagggccgcaccaaggagcaggtgatgctgctgattgatattgagctggcctacatgaacaccaaccacgaggacttcatcggctttgccaatgcccagcagaggagcaaccagatgaacaagaagaagaccagcggcaaccaggatgagatcctggtgatcaggaagggctggctgaccatcaacaacatcggcatcatgaagggcggcagcaaggagtactggtttgtgctgacagctgagaacctgtcctggtacaaggatgatgaggagaaggagaagaagtacatgctgtctgtggacaacctgaagctgagagatgtggagaagggcttcatgagcagcaagcacatctttgccctcttcaacacagagcagagaaatgtgtacaaggactaccggcagctggagctggcctgtgagacccaggaggaggtggacagctggaaggccagcttcctgcgggccggcgtgtacccagagcgggtgggggacaaggagaaggccagcgagacagaagaaaatggaagtgacagcttcatgcacagcatggacccccagctggagcggcaggtggagaccatccggaacctggtggacagctacatggccatcgtgaacaagacagtgcgggacctgatgcccaagaccatcatgcacctgatgatcaacaacaccaaggagttcatcttcagcgagctgctggccaacctgtacagctgtggggaccagaacaccctgatggaggagagcgctgagcaggcccagaggagagatgagatgctgaggatgtaccacgccctgaaggaggccctgagcatcatcggggacatcaacaccaccaccgtgtccacccccatgcctcctcctgtggatgacagctggctgcaggtgcagagcgtgcctgctggccgccgcagccccaccagcagccccaccccccagaggcgggccccagctgtgcccccagcccggcccggcagccggggccctgcccctggccccccacctgctggcagcgccctgggcggggcccctcctgtgcccagcaggcctggggccagcccagaccccttcggccccccaccccaggtgcccagccggcccaacagagcccctcctggggtgcccagccgcagcggccaggccagccccagcaggcctgagagcccccggcccccatttgacctgtag

SEQ ID NO: 150604 - DNA, 1191 bp, synthetic construct
  misc_feature 1..1191: note = Description of Artificial Sequence: Synthetic coding sequence
  source 1..1191: mol_type = other DNA
atggagcgcatcgtgaccacccacatccgggagcgggagggccgcaccaaggagcaggtgatgctgctgattgacatcgagctggcctacatgaacaccaaccacgaggacttcatcggctttgccaatgcccagcagaggagcaaccagatgaacaagaagaagaccagcggcaaccaggatgagatcctggtgatcaggaagggctggctgaccatcaacaacatcggcatcatgaagggcggcagcaaggagtactggtttgtgctgacagctgagaacctgtcctggtacaaggatgatgaggagaaggagaagaagtacatgctgtctgtggacaacctgaagctgagagatgtggagaagggcttcatgagcagcaagcacatctttgccctcttcaacacagagcagagaaatgtgtacaaggactaccggcagctggagctggcctgtgagacccaggaggaggtggacagctggaaggccagcttcctgcgggccggcgtgtacccagagcgggtgggggacaaggagaaggccagcgagacagaggagaatggaagtgacagcttcatgcacagcatggacccccagctggagcggcaggtggagaccatccggaacctggtggacagctacatggccatcgtgaacaagacagtgcgggacctgatgcccaagaccatcatgcacctgatgatcaacaacaccaaggagttcatcttcagcgagctgctggccaacctgtacagctgtggggaccagaacaccctgatggaggagagcgctgagcaggcccagaggagagatgagatgctgaggatgtaccacgccctgaaggaggccctgagcatcattggagacatcaacaccaccaccgtgtccacccccatgcctcctcctgtggatgacagctggctgcaggtgcagagcgtgcctgctggaagaagaagccccaccagcagccccaccccccagaggcgggccccagctgtgcccccagcccggcccggcagccggggccctgcccctggccccccacctgctggcagcgccctgggcggggcccctcctgtgcccagcaggcctggggccagcccagacccctttggacctccaccccaggtgcccagccggcccaacagagcccctcctggggtgccccgcatcaccatcagtgacccctag

SEQ ID NO: 150605 - DNA, 1728 bp, synthetic construct
  misc_feature 1..1728: note = Description of Artificial Sequence: Synthetic coding sequence
  source 1..1728: mol_type = other DNA
atggaggccctgatccctgtgatcaacaagctgcaggatgtgttcaacacagtgggcgctgacatcatccagctgccccagatcgtggtggtgggcacccagagcagcggcaagagctctgtgctggagagcctggtgggccgggacctgctgccccggggcactggaattgtgacccggcggcccctcatcctgcagctggtgcacgtgtcccaggaggacaagaggaagaccactggagaggagaatggagtggaggccgaggagtggggcaagttcctgcacaccaagaacaagctgtacacagactttgatgagatccggcaggagattgaaaatgaaacagagcgcatcagcggcaacaacaagggcgtgtccccagagcccatccacctgaagatcttcagccccaacgtggtgaacctgaccctggtggacctgcccggcatgaccaaggtgcctgtgggggaccagcccaaggacatcgagctgcagatccgggagctgatcctgcgcttcatcagcaaccccaacagcatcatcctggccgtgacagctgccaacacagacatggccaccagcgaggccctgaagatcagccgggaggtggaccctgatggccgccgcaccctggccgtcatcaccaagctggacctgatggatgctggaacagatgccatggatgtgctgatgggccgggtcatccctgtgaagctgggcatcatcggcgtggtgaacagaagccagctggacatcaacaacaagaagtctgtgacagacagcatcagagatgaatatgccttcctgcagaagaagtaccccagcctggccaacagaaatggcaccaagtacctggcccggaccctgaaccggctgctgatgcaccacatccgggactgcctgcctgagctgaagacccgcatcaacgtgctggccgcccagtaccagagcctgctgaacagctatggagagcctgtggatgacaagagcgccaccctgctgcagctgatcaccaagtttgccacagagtactgcaacaccatcgagggcacagccaagtacatcgagaccagcgagctgtgtggcggggcccgcatctgctacatcttccacgagaccttcggccgcaccctggagagcgtggaccccctgggcggcctgaacaccatcgacatcctgacagccatcagaaatgccaccggccccaggcctgccctgtttgtgcctgaggtgtcctttgagctgctggtgaagaggcagatcaagaggctggaggagcccagcctgcgctgtgtggagctggtgcatgaggagatgcagaggatcatccagcactgcagcaactacagcacccaggagctgctgcgcttccccaagctgcatgatgccatcgtggaggtggtgacctgcctgctgaggaagaggctgcctgtgaccaatgagatggtgcacaacctggtggccatcgagctggcctacatcaacaccaagcacccagactttgctgatgcctgtggcctgatgaacaacaacatcgaggagcagaggaggaaccggctggcccgggagctgcccagcgctgtgtcccgggacaaggtggccagcggcggcggcggcgtgggagatggagtgcaggagcccaccactggaaactggaggggcatgctgaagaccagcaaggccgaggagctgctggccgagaagaagaagaagaagaagaagaagtag

SEQ ID NO: 150606 - DNA, 2100 bp, synthetic construct
  misc_feature 1..2100: note = Description of Artificial Sequence: Synthetic coding sequence
  source 1..2100: mol_type = other DNA
atggaggccctgatccctgtgatcaacaagctgcaggatgtgttcaacacagtgggcgctgacatcatccagctgccccagatcgtggtggtgggcacccagagcagcggcaagagctctgtgctggagagcctggtgggccgggacctgctgccccggggcactggaattgtgacccggcggcccctcatcctgcagctggtgcacgtgtcccaggaggacaagaggaagaccactggagaggagaatggagtggaggccgaggagtggggcaagttcctgcacaccaagaacaagctgtacacagactttgatgagatccggcaggagattgaaaatgaaacagagcgcatcagcggcaacaacaagggcgtgtccccagagcccatccacctgaagatcttcagccccaacgtggtgaacctgaccctggtggacctgcccggcatgaccaaggtgcctgtgggggaccagcccaaggacatcgagctgcagatccgggagctgatcctgcgcttcatcagcaaccccaacagcatcatcctggccgtgacagctgccaacacagacatggccaccagcgaggccctgaagatcagccgggaggtggaccctgatggccgccgcaccctggccgtcatcaccaagctggacctgatggatgctggaacagatgccatggatgtgctgatgggccgggtcatccctgtgaagctgggcatcatcggcgtggtgaacagaagccagctggacatcaacaacaagaagtctgtgacagacagcatcagagatgaatatgccttcctgcagaagaagtaccccagcctggccaacagaaatggcaccaagtacctggcccggaccctgaaccggctgctgatgcaccacatccgggactgcctgcctgagctgaagacccgcatcaacgtgctggccgcccagtaccagagcctgctgaacagctatggagagcctgtggatgacaagagcgccaccctgctgcagctgatcaccaagtttgccacagagtactgcaacaccatcgagggcacagccaagtacatcgagaccagcgagctgtgtggcggggcccgcatctgctacatcttccacgagaccttcggccgcaccctggagagcgtggaccccctgggcggcctgaacaccatcgacatcctgacagccatcagaaatgccaccggccccaggcctgccctgtttgtgcctgaggtgtcctttgagctgctggtgaagaggcagatcaagaggctggaggagcccagcctgcgctgtgtggagctggtgcatgaggagatgcagaggatcatccagcactgcagcaactacagcacccaggagctgctgcgcttccccaagctgcatgatgccatcgtggaggtggtgacctgcctgctgaggaagaggctgcctgtgaccaatgagatggtgcacaacctggtggccatcgagctggcctacatcaacaccaagcacccagactttgctgatgcctgtggcctgatgaacaacaacatcgaggagcagaggaggaaccggctggcccgggagctgcccagcgctgtgtcccgggacaaggtggccagcggcggcggcggcgtgggagatggagtgcaggagcccaccactggaaactggaggggcatgctgaagaccagcaaggccgaggagctgctggccgaggagaagagcaagcccatccccatcatgcctgccagcccccagaagggccatgctgtgaacctgctggatgtgcctgtgcctgtggccaggaagctgagcgcccgggagcagagggactgtgaggtgattgaaagactcatcaagagctacttcctgattgtgaggaagaacatccaggacagcgtgcccaaggctgtgatgcacttcctggtgaaccacgtgaaggacaccctgcagagcgagctggtgggccagctgtacaagagcagcctgctggatgacctgctgacagaaagtgaggacatggcccagaggaggaaggaggccgctgacatgctgaaggccctgcagggcgccagccagatcatcgccgagatccgggagacccacctgtggtag

SEQ ID NO: 150607 - DNA, 2376 bp, synthetic construct
  misc_feature 1..2376: note = Description of Artificial Sequence: Synthetic coding sequence
  source 1..2376: mol_type = other DNA
atggcctgccgggagggcgccggcagccggcgggcccggagcaatggctgccgcctgccccggcggggcagaagaagaggaggaagaagaagaacagtgggccctggccccatccactgccggggcagaagagccctgggccccagggtcttccgggtgatggaggccctgatccctgtgatcaacaagctgcaggatgtgttcaacacagtgggcgctgacatcatccagctgccccagatcgtggtggtgggcacccagagcagcggcaagagctctgtgctggagagcctggtgggccgggacctgctgccccggggcaccggcatcgtgacccggcggcccctcatcctgcagctggtgcacgtgtcccaggaggacaagaggaagaccaccggggaggagaatgaccctgccacctggaagaacagccgccacctgagcaaaggagtggaggccgaggagtggggcaagttcctgcacaccaagaacaagctgtacacagactttgatgagatccggcaggagattgaaaatgaaacagagcgcatcagcggcaacaacaagggcgtgtccccagagcccatccacctgaagatcttcagccccaacgtggtgaacctgaccctggtggacctgcccggcatgaccaaggtgcctgtgggggaccagcccaaggacatcgagctgcagatccgggagctgatcctgcgcttcatcagcaaccccaacagcatcatcctggccgtgacagctgccaacacagacatggccaccagcgaggccctgaagatcagccgggaggtggaccctgatggccgccgcaccctggccgtcatcaccaagctggacctgatggatgctggaacagatgccatggatgtgctgatgggccgggtcatccctgtgaagctgggcatcatcggcgtggtgaacagaagccagctggacatcaacaacaagaagtctgtgacagacagcatcagagatgaatatgccttcctgcagaagaagtaccccagcctggccaacagaaatggcaccaagtacctggcccggaccctgaaccggctgctgatgcaccacatccgggactgcctgcctgagctgaagacccgcatcaacgtgctggccgcccagtaccagagcctgctgaacagctatggagagcctgtggatgacaagagcgccaccctgctgcagctgatcaccaagtttgccacagagtactgcaacaccatcgagggcacagccaagtacatcgagaccagcgagctgtgtggcggggcccgcatctgctacatcttccacgagaccttcggccgcaccctggagagcgtggaccccctgggcggcctgaacaccatcgacatcctgacagccatcagaaatgccaccggccccaggcctgccctgtttgtgcctgaggtgtcctttgagctgctggtgaagaggcagatcaagaggctggaggagcccagcctgcgctgtgtggagctggtgcatgaggagatgcagaggatcatccagcactgcagcaactacagcacccaggagctgctgcgcttccccaagctgcatgatgccatcgtggaggtggtgacctgcctgctgaggaagaggctgcctgtgaccaatgagatggtgcacaacctggtggccatcgagctggcctacatcaacaccaagcacccagactttgctgatgcctgtggcctgatgaacaacaacatcgaggagcagaggaggaaccggctggcccgggagctgcccagcgctgtgtcccgggacaagagcagcaaggtgcccagcgccctggccccagccagccaggagcccagccctgctgccagcgctgaggctgatggcaaggtggccagcggcggcggcggcgtgggagatggagtgcaggagcccaccactggaaactggaggggcatgctgaagaccagcaaggccgaggagctgctggccgaggagaagagcaagcccatccccatcatgcctgccagcccccagaagggccatgctgtgaacctgctggatgtgcctgtgcctgtggccaggaagctgagcgcccgggagcagagggactgtgaggtgattgaaagactcatcaagagctacttcctgattgtgaggaagaacatccaggacagcgtgcccaaggctgtgatgcacttcctggtgaaccacgtgaaggacaccctgcagagcgagctggtgggccagctgtacaagagcagcctgctggatgacctgctgacagaaagtgaggacatggcccagaggaggaaggaggccgctgacatgctgaaggccctgcagggcgccagccagatcatcgccgagatccgggagacccacctgtggtag

SEQ ID NO: 150608 - DNA, 1602 bp, synthetic construct
  misc_feature 1..1602: note = Description of Artificial Sequence: Synthetic coding sequence
  source 1..1602: mol_type = other DNA
atgttccacaagaagatcaatggcaagcagcaggagaagaagatgaccctgctgcacggcaagacccaggacaccttcctgaagggctggaagcagaagaatggagtgaacttcttcacccccaagatccgcagccagctggacatcaacaacaagaagtctgtgacagacagcatcagagatgaatatgccttcctgcagaagaagtaccccagcctggccaacagaaatggcaccaagtacctggcccggaccctgaaccggctgctgatgcaccacatccgggactgcctgcctgagctgaagacccgcatcaacgtgctggccgcccagtaccagagcctgctgaacagctatggagagcctgtggatgacaagagcgccaccctgctgcagctgatcaccaagtttgccacagagtactgcaacaccatcgagggcacagccaagtacatcgagaccagcgagctgtgtggcggggcccgcatctgctacatcttccacgagacctttggaagaaccctggagagcgtggaccccctgggcggcctgaacaccatcgacatcctgacagccatcagaaatgccaccggccccaggcctgccctgtttgtgcctgaggtgtcctttgagctgctggtgaagaggcagatcaagaggctggaggagcccagcctgcgctgtgtggagctggtgcatgaggagatgcagaggatcatccagcactgcagcaactacagcacccaggagctgctgcgcttccccaagctgcatgatgccatcgtggaggtggtgacctgcctgctgaggaagaggctgcctgtgaccaatgagatggtgcacaacctggtggccatcgagctggcctacatcaacaccaagcacccagactttgctgatgcctgtggcctgatgaacaacaacatcgaggagcagaggaggaaccggctggcccgggagctgcccagcgctgtgtcccgggacaagagcagcaaggtgcccagcgccctggccccagccagccaggagcccagccctgctgccagcgctgaggctgatggcaagctgatccaggacagcagaagagagaccaagaatgtggccagcggcggcggcggcgtgggagatggagtgcaggagcccaccactggaaactggaggggcatgctgaagaccagcaaggccgaggagctgctggccgaggagaagagcaagcccatccccatcatgcctgccagcccccagaagggccatgctgtgaacctgctggatgtgcctgtgcctgtggccaggaagctgagcgcccgggagcagagggactgtgaggtgattgaaagactcatcaagagctacttcctgattgtgaggaagaacatccaggacagcgtgcccaaggctgtgatgcacttcctggtgaaccacgtgaaggacaccctgcagagcgagctggtgggccagctgtacaagagcagcctgctggatgacctgctgacagaaagtgaggacatggcccagaggaggaaggaggccgctgacatgctgaaggccctgcagggcgccagccagatcatcgccgagatccgggagacccacctgtggtag

SEQ ID NO: 150609 - DNA, 2133 bp, synthetic construct
  misc_feature 1..2133: note = Description of Artificial Sequence: Synthetic coding sequence
  source 1..2133: mol_type = other DNA
atggaggccctgatccctgtgatcaacaagctgcaggatgtgttcaacacagtgggcgctgacatcatccagctgccccagatcgtggtggtgggcacccagagcagcggcaagagctctgtgctggagagcctggtgggccgggacctgctgccccggggcactggaattgtgacccggcggcccctcatcctgcagctggtgcacgtgtcccaggaggacaagaggaagaccactggagaggagaatggagtggaggccgaggagtggggcaagttcctgcacaccaagaacaagctgtacacagactttgatgagatccggcaggagattgaaaatgaaacagagcgcatcagcggcaacaacaagggcgtgtccccagagcccatccacctgaagatcttcagccccaacgtggtgaacctgaccctggtggacctgcccggcatgaccaaggtgcctgtgggggaccagcccaaggacatcgagctgcagatccgggagctgatcctgcgcttcatcagcaaccccaacagcatcatcctggccgtgacagctgccaacacagacatggccaccagcgaggccctgaagatcagccgggaggtggaccctgatggccgccgcaccctggccgtcatcaccaagctggacctgatggatgctggaacagatgccatggatgtgctgatgggccgggtcatccctgtgaagctgggcatcatcggcgtggtgaacagaagccagctggacatcaacaacaagaagtctgtgacagacagcatcagagatgaatatgccttcctgcagaagaagtaccccagcctggccaacagaaatggcaccaagtacctggcccggaccctgaaccggctgctgatgcaccacatccgggactgcctgcctgagctgaagacccgcatcaacgtgctggccgcccagtaccagagcctgctgaacagctatggagagcctgtggatgacaagagcgccaccctgctgcagctgatcaccaagtttgccacagagtactgcaacaccatcgagggcacagccaagtacatcgagaccagcgagctgtgtggcggggcccgcatctgctacatcttccacgagaccttcggccgcaccctggagagcgtggaccccctgggcggcctgaacaccatcgacatcctgacagccatcagaaatgccaccggccccaggcctgccctgtttgtgcctgaggtgtcctttgagctgctggtgaagaggcagatcaagaggctggaggagcccagcctgcgctgtgtggagctggtgcatgaggagatgcagaggatcatccagcactgcagcaactacagcacccaggagctgctgcgcttccccaagctgcatgatgccatcgtggaggtggtgacctgcctgctgaggaagaggctgcctgtgaccaatgagatggtgcacaacctggtggccatcgagctggcctacatcaacaccaagcacccagactttgctgatgcctgtggcctgatgaacaacaacatcgaggagcagaggaggaaccggctggcccgggagctgcccagcgctgtgtcccgggacaagctgatccaggacagccggcgggagaccaagaatgtggccagcggcggcggcggcgtgggagatggagtgcaggagcccaccaccggcaactggaggggcatgctgaagaccagcaaggccgaggagctgctggccgaggagaagagcaagcccatccccatcatgcctgccagcccccagaagggccatgctgtgaacctgctggatgtgcctgtgcctgtggccaggaagctgagcgcccgggagcagagggactgtgaggtgattgagcggctcatcaagagctacttcctgattgtgaggaagaacatccaggacagcgtgcccaaggctgtgatgcacttcctggtgaaccacgtgaaggacaccctgcagagcgagctggtgggccagctgtacaagagcagcctgctggatgacctgctgacagaaagtgaggacatggcccagaggaggaaggaggccgctgacatgctgaaggccctgcagggcgccagccagatcatcgccgagatccgggagacccacctgtggtag

SEQ ID NO: 150610 - DNA, 2178 bp, synthetic construct
  misc_feature 1..2178: note = Description of Artificial Sequence: Synthetic coding sequence
  source 1..2178: mol_type = other DNA
atggaggccctgatccctgtgatcaacaagctgcaggatgtgttcaacacagtgggcgctgacatcatccagctgccccagatcgtggtggtgggcacccagagcagcggcaagagctctgtgctggagagcctggtgggccgggacctgctgccccggggcactggaattgtgacccggcggcccctcatcctgcagctggtgcacgtgtcccaggaggacaagaggaagaccactggagaggagaatggagtggaggccgaggagtggggcaagttcctgcacaccaagaacaagctgtacacagactttgatgagatccggcaggagattgaaaatgaaacagagcgcatcagcggcaacaacaagggcgtgtccccagagcccatccacctgaagatcttcagccccaacgtggtgaacctgaccctggtggacctgcccggcatgaccaaggtgcctgtgggggaccagcccaaggacatcgagctgcagatccgggagctgatcctgcgcttcatcagcaaccccaacagcatcatcctggccgtgacagctgccaacacagacatggccaccagcgaggccctgaagatcagccgggaggtggaccctgatggccgccgcaccctggccgtcatcaccaagctggacctgatggatgctggaacagatgccatggatgtgctgatgggccgggtcatccctgtgaagctgggcatcatcggcgtggtgaacagaagccagctggacatcaacaacaagaagtctgtgacagacagcatcagagatgaatatgccttcctgcagaagaagtaccccagcctggccaacagaaatggcaccaagtacctggcccggaccctgaaccggctgctgatgcaccacatccgggactgcctgcctgagctgaagacccgcatcaacgtgctggccgcccagtaccagagcctgctgaacagctatggagagcctgtggatgacaagagcgccaccctgctgcagctgatcaccaagtttgccacagagtactgcaacaccatcgagggcacagccaagtacatcgagaccagcgagctgtgtggcggggcccgcatctgctacatcttccacgagaccttcggccgcaccctggagagcgtggaccccctgggcggcctgaacaccatcgacatcctgacagccatcagaaatgccaccggccccaggcctgccctgtttgtgcctgaggtgtcctttgagctgctggtgaagaggcagatcaagaggctggaggagcccagcctgcgctgtgtggagctggtgcatgaggagatgcagaggatcatccagcactgcagcaactacagcacccaggagctgctgcgcttccccaagctgcatgatgccatcgtggaggtggtgacctgcctgctgaggaagaggctgcctgtgaccaatgagatggtgcacaacctggtggccatcgagctggcctacatcaacaccaagcacccagactttgctgatgcctgtggcctgatgaacaacaacatcgaggagcagaggaggaaccggctggcccgggagctgcccagcgctgtgtcccgggacaagagcagcaaggtgcccagcgccctggccccagccagccaggagcccagccctgctgccagcgctgaggctgatggcaaggtggccagcggcggcggcggcgtgggagatggagtgcaggagcccaccactggaaactggaggggcatgctgaagaccagcaaggccgaggagctgctggccgaggagaagagcaagcccatccccatcatgcctgccagcccccagaagggccatgctgtgaacctgctggatgtgcctgtgcctgtggccaggaagctgagcgcccgggagcagagggactgtgaggtgattgaaagactcatcaagagctacttcctgattgtgaggaagaacatccaggacagcgtgcccaaggctgtgatgcacttcctggtgaaccacgtgaaggacaccctgcagagcgagctggtgggccagctgtacaagagcagcctgctggatgacctgctgacagaaagtgaggacatggcccagaggaggaaggaggccgctgacatgctgaaggccctgcagggcgccagccagatcatcgccgagatccgggagacccacctgtggtag

SEQ ID NO: 150611 - DNA, 2211 bp, synthetic construct
  misc_feature 1..2211: note = Description of Artificial Sequence: Synthetic coding sequence
  source 1..2211: mol_type = other DNA
atggaggccctgatccctgtgatcaacaagctgcaggatgtgttcaacacagtgggcgctgacatcatccagctgccccagatcgtggtggtgggcacccagagcagcggcaagagctctgtgctggagagcctggtgggccgggacctgctgccccggggcactggaattgtgacccggcggcccctcatcctgcagctggtgcacgtgtcccaggaggacaagaggaagaccactggagaggagaatggagtggaggccgaggagtggggcaagttcctgcacaccaagaacaagctgtacacagactttgatgagatccggcaggagattgaaaatgaaacagagcgcatcagcggcaacaacaagggcgtgtccccagagcccatccacctgaagatcttcagccccaacgtggtgaacctgaccctggtggacctgcccggcatgaccaaggtgcctgtgggggaccagcccaaggacatcgagctgcagatccgggagctgatcctgcgcttcatcagcaaccccaacagcatcatcctggccgtgacagctgccaacacagacatggccaccagcgaggccctgaagatcagccgggaggtggaccctgatggccgccgcaccctggccgtcatcaccaagctggacctgatggatgctggaacagatgccatggatgtgctgatgggccgggtcatccctgtgaagctgggcatcatcggcgtggtgaacagaagccagctggacatcaacaacaagaagtctgtgacagacagcatcagagatgaatatgccttcctgcagaagaagtaccccagcctggccaacagaaatggcaccaagtacctggcccggaccctgaaccggctgctgatgcaccacatccgggactgcctgcctgagctgaagacccgcatcaacgtgctggccgcccagtaccagagcctgctgaacagctatggagagcctgtggatgacaagagcgccaccctgctgcagctgatcaccaagtttgccacagagtactgcaacaccatcgagggcacagccaagtacatcgagaccagcgagctgtgtggcggggcccgcatctgctacatcttccacgagaccttcggccgcaccctggagagcgtggaccccctgggcggcctgaacaccatcgacatcctgacagccatcagaaatgccaccggccccaggcctgccctgtttgtgcctgaggtgtcctttgagctgctggtgaagaggcagatcaagaggctggaggagcccagcctgcgctgtgtggagctggtgcatgaggagatgcagaggatcatccagcactgcagcaactacagcacccaggagctgctgcgcttccccaagctgcatgatgccatcgtggaggtggtgacctgcctgctgaggaagaggctgcctgtgaccaatgagatggtgcacaacctggtggccatcgagctggcctacatcaacaccaagcacccagactttgctgatgcctgtggcctgatgaacaacaacatcgaggagcagaggaggaaccggctggcccgggagctgcccagcgctgtgtcccgggacaagagcagcaaggtgcccagcgccctggccccagccagccaggagcccagccctgctgccagcgctgaggctgatggcaagctgatccaggacagccggcgggagaccaagaatgtggccagcggcggcggcggcgtgggagatggagtgcaggagcccaccaccggcaactggaggggcatgctgaagaccagcaaggccgaggagctgctggccgaggagaagagcaagcccatccccatcatgcctgccagcccccagaagggccatgctgtgaacctgctggatgtgcctgtgcctgtggccaggaagctgagcgcccgggagcagagggactgtgaggtgattgagcggctcatcaagagctacttcctgattgtgaggaagaacatccaggacagcgtgcccaaggctgtgatgcacttcctggtgaaccacgtgaaggacaccctgcagagcgagctggtgggccagctgtacaagagcagcctgctggatgacctgctgacagaaagtgaggacatggcccagaggaggaaggaggccgctgacatgctgaaggccctgcagggcgccagccagatcatcgccgagatccgggagacccacctgtggtag

SEQ ID NO: 150612 - DNA, 2250 bp, synthetic construct
  misc_feature 1..2250: note = Description of Artificial Sequence: Synthetic coding sequence
  source 1..2250: mol_type = other DNA
atggaggccctgatccctgtgatcaacaagctgcaggatgtgttcaacacagtgggcgctgacatcatccagctgccccagatcgtggtggtgggcacccagagcagcggcaagagctctgtgctggagagcctggtgggccgggacctgctgccccggggcactggaattgtgacccggcggcccctcatcctgcagctggtgcacgtgtcccaggaggacaagaggaagaccactggagaggagaatgaccctgccacctggaagaacagccgccacctgagcaagggcgtggaggccgaggagtggggcaagttcctgcacaccaagaacaagctgtacacagactttgatgagatccggcaggagattgaaaatgaaacagagcgcatcagcggcaacaacaagggcgtgtccccagagcccatccacctgaagatcttcagccccaacgtggtgaacctgaccctggtggacctgcccggcatgaccaaggtgcctgtgggggaccagcccaaggacatcgagctgcagatccgggagctgatcctgcgcttcatcagcaaccccaacagcatcatcctggccgtgacagctgccaacacagacatggccaccagcgaggccctgaagatcagccgggaggtggaccctgatggaagaaggaccctggccgtcatcaccaagctggacctgatggatgctggaacagatgccatggatgtgctgatgggccgggtcatccctgtgaagctgggcatcattggagtggtgaacagaagccagctggacatcaacaacaagaagtctgtgacagacagcatcagagatgaatatgccttcctgcagaagaagtaccccagcctggccaacagaaatggcaccaagtacctggcccggaccctgaaccggctgctgatgcaccacatccgggactgcctgcctgagctgaagacccgcatcaacgtgctggccgcccagtaccagagcctgctgaacagctatggagagcctgtggatgacaagagcgccaccctgctgcagctgatcaccaagtttgccacagagtactgcaacaccatcgagggcacagccaagtacatcgagaccagcgagctgtgtggcggggcccgcatctgctacatcttccacgagacctttggaagaaccctggagagcgtggaccccctgggcggcctgaacaccatcgacatcctgacagccatcagaaatgccaccggccccaggcctgccctgtttgtgcctgaggtgtcctttgagctgctggtgaagaggcagatcaagaggctggaggagcccagcctgcgctgtgtggagctggtgcatgaggagatgcagaggatcatccagcactgcagcaactacagcacccaggagctgctgcgcttccccaagctgcatgatgccatcgtggaggtggtgacctgcctgctgaggaagaggctgcctgtgaccaatgagatggtgcacaacctggtggccatcgagctggcctacatcaacaccaagcacccagactttgctgatgcctgtggcctgatgaacaacaacatcgaggagcagaggaggaaccggctggcccgggagctgcccagcgctgtgtcccgggacaagagcagcaaggtgcccagcgccctggccccagccagccaggagcccagccctgctgccagcgctgaggctgatggcaagctgatccaggacagcagaagagagaccaagaatgtggccagcggcggcggcggcgtgggagatggagtgcaggagcccaccactggaaactggaggggcatgctgaagaccagcaaggccgaggagctgctggccgaggagaagagcaagcccatccccatcatgcctgccagcccccagaagggccatgctgtgaacctgctggatgtgcctgtgcctgtggccaggaagctgagcgcccgggagcagagggactgtgaggtgattgaaagactcatcaagagctacttcctgattgtgaggaagaacatccaggacagcgtgcccaaggctgtgatgcacttcctggtgaaccacgtgaaggacaccctgcagagcgagctggtgggccagctgtacaagagcagcctgctggatgacctgctgacagaaagtgaggacatggcccagaggaggaaggaggccgctgacatgctgaaggccctgcagggcgccagccagatcatcgccgagatccgggagacccacctgtggtag

SEQ ID NO: 150613 - DNA, 2613 bp, synthetic construct
  misc_feature 1..2613: note = Description of Artificial Sequence: Synthetic coding sequence
  source 1..2613: mol_type = other DNA
atgggcaacagaggcatggaggagctgatccccctggtgaacaagctgcaggatgccttcagcagcatcggccagagctgccacctggacctgccccagattgctgtggtgggcggccagagcgctgggaagagctctgtgctggagaactttgtgggccgggacttcctgccccggggcagcggcatcgtgacccggcggcccctcatcctgcagctgatcttcagcaagacagagcacgccgagttcctgcactgcaagagcaagaagttcacagactttgatgaggtgcggcaggagattgaagctgagacagacagagtgacaggcaccaacaagggcatcagccctgtgcccatcaacctgcgggtgtacagcccccacgtgctgaacctgaccctgattgacctgcccggcatcaccaaggtgcctgtgggggaccagcccccagacatcgagtaccagatcaaggacatgatcctgcagttcatcagccgggagagcagcctcatcctggccgtgaccccagccaacatggacctggccaacagtgatgccctgaagctggccaaggaggtggacccccagggcctgcggaccatcggggtcatcaccaagctggacctgatggatgagggcacagatgccagagatgtgctggagaacaagctgctgcccctgcggcggggctacatcggcgtggtgaacagaagccagaaggacatcgagggcaagaaggacatccgggccgccctggccgctgagaggaagttcttcctgagccacccagcctaccgccacatggctgacaggatgggcaccccccacctgcagaagaccctgaaccagcagctgaccaaccacatccgggagagcctgcctgccctgcggagcaagctgcagagccagctgctgagcctggagaaggaggtggaggagtacaagaacttccggccagatgaccccaccaggaagaccaaggccctgctgcagatggtgcagcagtttggagtggactttgagaagagaattgagggcagcggggaccaggtggacaccctggagctgtctggaggagcccgcatcaaccgcatcttccacgagcgcttcccctttgagctggtgaagatggagtttgatgagaaggacctgcggcgggagatctcctatgccatcaagaacatccacggcgtgaggacaggcctcttcaccccagacatggcctttgaggccatcgtgaagaagcagatcgtgaagctgaaggagcccagcctgaagtgtgtggacctggtggtgtctgagctggccaccgtcatcaagaagtgtgccgagaagctgagcagctacccccggctgcgggaggagacagaaagaattgtgaccacctacatccgggagcgggagggccgcaccaaggaccagatcctgctgctgattgatattgagcagagctacatcaacaccaaccacgaggacttcatcggctttgccaatgcccagcagaggagcacccagctgaacaagaagagggccatccccaaccagcctgagaccctggtgatccggcggggctggctgaccatcaacaacatcagcctgatgaagggcggcagcaaggagtactggtttgtgctgacagctgagagcctgtcctggtacaaggatgaggaggagaaggagaagaagtacatgctgcccctggacaacctgaagatcagagatgtggagaagggcttcatgagcaacaagcacgtgtttgccatcttcaacacagagcagagaaatgtgtacaaggacctgcggcagatcgagctggcctgtgacagccaggaggatgtggacagctggaaggccagcttcctgcgggccggcgtgtacccagagaaggaccaggctgaaaatgaagatggagcccaggagaacaccttctccatggacccccagctggagcggcaggtggagaccatccggaacctggtggacagctatgtggccatcatcaacaagagcatccgggacctgatgcccaagaccatcatgcacctgatgatcaacaacaccaaggccttcatccaccacgagctgctggcctacctgtacagcagcgctgaccagagcagcctgatggaggagagcgctgaccaggcccagaggagagatgacatgctgaggatgtaccacgccctgaaggaggccctgaacatcatcggggacatcagcaccagcacagtgtccacccctgtgcccccacctgtggatgacacctggctgcagagcgccagcagccacagccccaccccccagaggaggcctgtgagcagcatccaccccccaggccggcccccagctgtgcggggccccaccccaggccccccactcatccctgtgcctgtgggcgctgctgccagcttcagcgccccacccatccccagcaggcctggcccccagagcgtgtttgccaacagcgacctcttccctgccccaccccagatccccagcaggcctgtgcgcatccccccaggcatccccccaggagtgcccagcagaagacctcctgctgcccccagccggcccaccatcatccggcctgctgagcccagcctgctggactag

SEQ ID NO: 150614 - DNA, 2601 bp, synthetic construct
  misc_feature 1..2601: note = Description of Artificial Sequence: Synthetic coding sequence
  source 1..2601: mol_type = other DNA
atgggcaacagaggcatggaggagctgatccccctggtgaacaagctgcaggatgccttcagcagcatcggccagagctgccacctggacctgccccagattgctgtggtgggcggccagagcgctgggaagagctctgtgctggagaactttgtgggccgggacttcctgccccggggcagcggcatcgtgacccggcggcccctcatcctgcagctgatcttcagcaagacagagcacgccgagttcctgcactgcaagagcaagaagttcacagactttgatgaggtgcggcaggagattgaagctgagacagacagagtgacaggcaccaacaagggcatcagccctgtgcccatcaacctgcgggtgtacagcccccacgtgctgaacctgaccctgattgacctgcccggcatcaccaaggtgcctgtgggggaccagcccccagacatcgagtaccagatcaaggacatgatcctgcagttcatcagccgggagagcagcctcatcctggccgtgaccccagccaacatggacctggccaacagtgatgccctgaagctggccaaggaggtggacccccagggcctgcggaccatcggggtcatcaccaagctggacctgatggatgagggcacagatgccagagatgtgctggagaacaagctgctgcccctgcggcggggctacatcggcgtggtgaacagaagccagaaggacatcgagggcaagaaggacatccgggccgccctggccgctgagaggaagttcttcctgagccacccagcctaccgccacatggctgacaggatgggcaccccccacctgcagaagaccctgaaccagcagctgaccaaccacatccgggagagcctgcctgccctgcggagcaagctgcagagccagctgctgagcctggagaaggaggtggaggagtacaagaacttccggccagatgaccccaccaggaagaccaaggccctgctgcagatggtgcagcagtttggagtggactttgagaagagaattgagggcagcggggaccaggtggacaccctggagctgtctggaggagcccgcatcaaccgcatcttccacgagcgcttcccctttgagctggtgaagatggagtttgatgagaaggacctgcggcgggagatctcctatgccatcaagaacatccacggcgtgaggacaggcctcttcaccccagacctggcctttgaggccatcgtgaagaagcaggtggtgaagctgaaggagccctgcctgaagtgtgtggacctggtgatccaggagctgatcaacacagtgcggcagtgcaccagcaagctgagcagctacccccggctgcgggaggagacagaaagaattgtgaccacctacatccgggagcgggagggccgcaccaaggaccagatcctgctgctgattgatattgagcagagctacatcaacaccaaccacgaggacttcatcggctttgccaatgcccagcagaggagcacccagctgaacaagaagagggccatccccaaccaggtgatccggcggggctggctgaccatcaacaacatcagcctgatgaagggcggcagcaaggagtactggtttgtgctgacagctgagagcctgtcctggtacaaggatgaggaggagaaggagaagaagtacatgctgcccctggacaacctgaagatcagagatgtggagaagggcttcatgagcaacaagcacgtgtttgccatcttcaacacagagcagagaaatgtgtacaaggacctgcggcagatcgagctggcctgtgacagccaggaggatgtggacagctggaaggccagcttcctgcgggccggcgtgtacccagagaaggaccaggctgaaaatgaagatggagcccaggagaacaccttctccatggacccccagctggagcggcaggtggagaccatccggaacctggtggacagctatgtggccatcatcaacaagagcatccgggacctgatgcccaagaccatcatgcacctgatgatcaacaacaccaaggccttcatccaccacgagctgctggcctacctgtacagcagcgctgaccagagcagcctgatggaggagagcgctgaccaggcccagaggagagatgacatgctgaggatgtaccacgccctgaaggaggccctgaacatcatcggggacatcagcaccagcacagtgtccacccctgtgcccccacctgtggatgacacctggctgcagagcgccagcagccacagccccaccccccagaggaggcctgtgagcagcatccaccccccaggccggcccccagctgtgcggggccccaccccaggccccccactcatccctgtgcctgtgggcgctgctgccagcttcagcgccccacccatccccagcaggcctggcccccagagcgtgtttgccaacagcgacctcttccctgccccaccccagatccccagcaggcctgtgcgcatccccccaggcatccccccaggagtgcccagcagaagacctcctgctgcccccagccggcccaccatcatccggcctgctgagcccagcctgctggactag

SEQ ID NO: 150615 - DNA, 2613 bp, synthetic construct
  misc_feature 1..2613: note = Description of Artificial Sequence: Synthetic coding sequence
  source 1..2613: mol_type = other DNA
atgggcaacagaggcatggaggagctgatccccctggtgaacaagctgcaggatgccttcagcagcatcggccagagctgccacctggacctgccccagattgctgtggtgggcggccagagcgctgggaagagctctgtgctggagaactttgtgggccgggacttcctgccccggggcagcggcatcgtgacccggcggcccctcatcctgcagctgatcttcagcaagacagagcacgccgagttcctgcactgcaagagcaagaagttcacagactttgatgaggtgcggcaggagattgaagctgagacagacagagtgacaggcaccaacaagggcatcagccctgtgcccatcaacctgcgggtgtacagcccccacgtgctgaacctgaccctgattgacctgcccggcatcaccaaggtgcctgtgggggaccagcccccagacatcgagtaccagatcaaggacatgatcctgcagttcatcagccgggagagcagcctcatcctggccgtgaccccagccaacatggacctggccaacagtgatgccctgaagctggccaaggaggtggacccccagggcctgcggaccatcggggtcatcaccaagctggacctgatggatgagggcacagatgccagagatgtgctggagaacaagctgctgcccctgcggcggggctacatcggcgtggtgaacagaagccagaaggacatcgagggcaagaaggacatccgggccgccctggccgctgagaggaagttcttcctgagccacccagcctaccgccacatggctgacaggatgggcaccccccacctgcagaagaccctgaaccagcagctgaccaaccacatccgggagagcctgcctgccctgcggagcaagctgcagagccagctgctgagcctggagaaggaggtggaggagtacaagaacttccggccagatgaccccaccaggaagaccaaggccctgctgcagatggtgcagcagtttggagtggactttgagaagagaattgagggcagcggggaccaggtggacaccctggagctgtctggaggagcccgcatcaaccgcatcttccacgagcgcttcccctttgagctggtgaagatggagtttgatgagaaggacctgcggcgggagatctcctatgccatcaagaacatccacggcgtgaggacaggcctcttcaccccagacctggcctttgaggccatcgtgaagaagcaggtggtgaagctgaaggagccctgcctgaagtgtgtggacctggtgatccaggagctgatcaacacagtgcggcagtgcaccagcaagctgagcagctacccccggctgcgggaggagacagaaagaattgtgaccacctacatccgggagcgggagggccgcaccaaggaccagatcctgctgctgattgatattgagcagagctacatcaacaccaaccacgaggacttcatcggctttgccaatgcccagcagaggagcacccagctgaacaagaagagggccatccccaaccagggcgagatcctggtgatccggcggggctggctgaccatcaacaacatcagcctgatgaagggcggcagcaaggagtactggtttgtgctgacagctgagagcctgtcctggtacaaggatgaggaggagaaggagaagaagtacatgctgcccctggacaacctgaagatcagagatgtggagaagggcttcatgagcaacaagcacgtgtttgccatcttcaacacagagcagagaaatgtgtacaaggacctgcggcagatcgagctggcctgtgacagccaggaggatgtggacagctggaaggccagcttcctgcgggccggcgtgtacccagagaaggaccaggctgaaaatgaagatggagcccaggagaacaccttctccatggacccccagctggagcggcaggtggagaccatccggaacctggtggacagctatgtggccatcatcaacaagagcatccgggacctgatgcccaagaccatcatgcacctgatgatcaacaacaccaaggccttcatccaccacgagctgctggcctacctgtacagcagcgctgaccagagcagcctgatggaggagagcgctgaccaggcccagaggagagatgacatgctgaggatgtaccacgccctgaaggaggccctgaacatcatcggggacatcagcaccagcacagtgtccacccctgtgcccccacctgtggatgacacctggctgcagagcgccagcagccacagccccaccccccagaggaggcctgtgagcagcatccaccccccaggccggcccccagctgtgcggggccccaccccaggccccccactcatccctgtgcctgtgggcgctgctgccagcttcagcgccccacccatccccagcaggcctggcccccagagcgtgtttgccaacagcgacctcttccctgccccaccccagatccccagcaggcctgtgcgcatccccccaggcatccccccaggagtgcccagcagaagacctcctgctgcccccagccggcccaccatcatccggcctgctgagcccagcctgctggactag

SEQ ID NO: 150616 - DNA, 1461 bp, synthetic construct
  misc_feature 1..1461: note = Description of Artificial Sequence: Synthetic coding sequence
  source 1..1461: mol_type = other DNA
catgtgacagtggccgctgctgacagctggaagcccccagccagcgcccagcacgtgggccgggcccccagggctggagctgccacctgcttcctgggcccccggccccccagccacctgggcggccgggacttcctgccccggggcagcggcatcgtgacccggcggcccctcatcctgcagctgatcttcagcaagacagaacatgctgagttcctgcactgcaagagcaagaagttcacagactttgatgaggtgcggcaggagattgaggccgagacagacagagtgacaggcaccaacaagggcatcagccctgtgcccatcaacctgcgggtgtacagcccccacgtgctgaacctgaccctgattgacctgcccggcatcaccaaggtgcctgtgggggaccagcccccagacatcgagtaccagatcaaggacatgatcctgcagttcatcagccgggagagcagcctcatcctggccgtgaccccagccaacatggacctggccaacagtgatgccctgaagctggccaaggaggtggacccccagggcctgcggaccatcggggtcatcaccaagctggacctgatggatgagggcacagatgccagagatgtgctggagaacaagctgctgcccctgcggcggggctacatcggcgtggtgaacagaagccagaaggacatcgagggcaagaaggacatccgggccgccctggccgctgagaggaagttcttcctgagccacccagcctaccgccacatggctgacaggatgggcaccccccacctgcagaagaccctgaaccagcagctgaccaaccacatccgggagagcctgcctgccctgcggagcaagctgcagagccagctgctgagcctggagaaggaggtggaggagtacaagaacttccggccagatgaccccaccaggaagaccaaggccctgctgcagatggtgcagcagtttggagtggactttgagaagagaattgagggcagcggggaccaggtggacaccctggagctgagcggcggggcccgcatcaaccgcatcttccacgagcgcttcccctttgagctggtgaagatggagtttgatgagaaggacctgcggcgggagatctcctatgccatcaagaacatccatggagtgaggacaggcctcttcaccccagacatggcctttgaggccatcgtgaagaagcagatcgtgaagctgaaggagcccagcctgaagtgtgtggacctggtggtgtctgagctggccaccgtcatcaagaagtgtgccgagaagctgagcagctacccccggctgcgggaggagacagagcgcatcgtgaccacctacatccgggagcgggagggccgcaccaaggaccagatcctgctgctgattgacatcgagcagagctacatcaacaccaaccacgaggacttcatcggctttgcctag

SEQ ID NO: 150617 - DNA, 2613 bp, synthetic construct
  misc_feature 1..2613: note = Description of Artificial Sequence: Synthetic coding sequence
  source 1..2613: mol_type = other DNA
atgggcaacagaggcatggaggagctgatccccctggtgaacaagctgcaggatgccttcagcagcatcggccagagctgccacctggacctgccccagattgctgtggtgggcggccagagcgctgggaagagctctgtgctggagaactttgtgggccgggacttcctgccccggggcagcggcatcgtgacccggcggcccctcatcctgcagctgatcttcagcaagacagagcacgccgagttcctgcactgcaagagcaagaagttcacagactttgatgaggtgcggcaggagattgaagctgagacagacagagtgacaggcaccaacaagggcatcagccctgtgcccatcaacctgcgggtgtacagcccccacgtgctgaacctgaccctgattgacctgcccggcatcaccaaggtgcctgtgggggaccagcccccagacatcgagtaccagatcaaggacatgatcctgcagttcatcagccgggagagcagcctcatcctggccgtgaccccagccaacatggacctggccaacagtgatgccctgaagctggccaaggaggtggacccccagggcctgcggaccatcggggtcatcaccaagctggacctgatggatgagggcacagatgccagagatgtgctggagaacaagctgctgcccctgcggcggggctacatcggcgtggtgaacagaagccagaaggacatcgagggcaagaaggacatccgggccgccctggccgctgagaggaagttcttcctgagccacccagcctaccgccacatggctgacaggatgggcaccccccacctgcagaagaccctgaaccagcagctgaccaaccacatccgggagagcctgcctgccctgcggagcaagctgcagagccagctgctgagcctggagaaggaggtggaggagtacaagaacttccggccagatgaccccaccaggaagaccaaggccctgctgcagatggtgcagcagtttggagtggactttgagaagagaattgagggcagcggggaccaggtggacaccctggagctgtctggaggagcccgcatcaaccgcatcttccacgagcgcttcccctttgagctggtgaagatggagtttgatgagaaggacctgcggcgggagatctcctatgccatcaagaacatccacggcgtgaggacaggcctcttcaccccagacatggcctttgaggccatcgtgaagaagcagatcgtgaagctgaaggagcccagcctgaagtgtgtggacctggtggtgtctgagctggccaccgtcatcaagaagtgtgccgagaagctgagcagctacccccggctgcgggaggagacagaaagaattgtgaccacctacatccgggagcgggagggccgcaccaaggaccagatcctgctgctgattgatattgagcagagctacatcaacaccaaccacgaggacttcatcggctttgccaatgcccagcagaggagcacccagctgaacaagaagagggccatccccaaccagggcgagatcctggtgatccggcggggctggctgaccatcaacaacatcagcctgatgaagggcggcagcaaggagtactggtttgtgctgacagctgagagcctgtcctggtacaaggatgaggaggagaaggagaagaagtacatgctgcccctggacaacctgaagatcagagatgtggagaagggcttcatgagcaacaagcacgtgtttgccatcttcaacacagagcagagaaatgtgtacaaggacctgcggcagatcgagctggcctgtgacagccaggaggatgtggacagctggaaggccagcttcctgcgggccggcgtgtacccagagaaggaccaggctgaaaatgaagatggagcccaggagaacaccttctccatggacccccagctggagcggcaggtggagaccatccggaacctggtggacagctatgtggccatcatcaacaagagcatccgggacctgatgcccaagaccatcatgcacctgatgatcaacaacaccaaggccttcatccaccacgagctgctggcctacctgtacagcagcgctgaccagagcagcctgatggaggagagcgctgaccaggcccagaggagagatgacatgctgaggatgtaccacgccctgaaggaggccctgaacatcatcggggacatcagcaccagcacagtgtccacccctgtgcccccacctgtggatgacacctggctgcagagcgccagcagccacagccccaccccccagaggaggcctgtgagcagcatccaccccccaggccggcccccagctgtgcggggccccaccccaggccccccactcatccctgtgcctgtgggcgctgctgccagcttcagcgccccacccatccccagcaggcctggcccccagagcgtgtttgccaacagcgacctcttccctgccccaccccagatccccagcaggcctgtgcgcatccccccaggcatccccccaggagtgcccagcagaagacctcctgctgcccccagccggcccaccatcatccggcctgctgagcccagcctgctggactag

SEQ ID NO: 150618 - DNA, 2601 bp, synthetic construct
  misc_feature 1..2601: note = Description of Artificial Sequence: Synthetic coding sequence
  source 1..2601: mol_type = other DNA
atgggcaacagaggcatggaggagctgatccccctggtgaacaagctgcaggatgccttcagcagcatcggccagagctgccacctggacctgccccagattgctgtggtgggcggccagagcgctgggaagagctctgtgctggagaactttgtgggccgggacttcctgccccggggcagcggcatcgtgacccggcggcccctcatcctgcagctgatcttcagcaagacagagcacgccgagttcctgcactgcaagagcaagaagttcacagactttgatgaggtgcggcaggagattgaagctgagacagacagagtgacaggcaccaacaagggcatcagccctgtgcccatcaacctgcgggtgtacagcccccacgtgctgaacctgaccctgattgacctgcccggcatcaccaaggtgcctgtgggggaccagcccccagacatcgagtaccagatcaaggacatgatcctgcagttcatcagccgggagagcagcctcatcctggccgtgaccccagccaacatggacctggccaacagtgatgccctgaagctggccaaggaggtggacccccagggcctgcggaccatcggggtcatcaccaagctggacctgatggatgagggcacagatgccagagatgtgctggagaacaagctgctgcccctgcggcggggctacatcggcgtggtgaacagaagccagaaggacatcgagggcaagaaggacatccgggccgccctggccgctgagaggaagttcttcctgagccacccagcctaccgccacatggctgacaggatgggcaccccccacctgcagaagaccctgaaccagcagctgaccaaccacatccgggagagcctgcctgccctgcggagcaagctgcagagccagctgctgagcctggagaaggaggtggaggagtacaagaacttccggccagatgaccccaccaggaagaccaaggccctgctgcagatggtgcagcagtttggagtggactttgagaagagaattgagggcagcggggaccaggtggacaccctggagctgtctggaggagcccgcatcaaccgcatcttccacgagcgcttcccctttgagctggtgaagatggagtttgatgagaaggacctgcggcgggagatctcctatgccatcaagaacatccacggcgtgaggacaggcctcttcaccccagacatggcctttgaggccatcgtgaagaagcagatcgtgaagctgaaggagcccagcctgaagtgtgtggacctggtggtgtctgagctggccaccgtcatcaagaagtgtgccgagaagctgagcagctacccccggctgcgggaggagacagaaagaattgtgaccacctacatccgggagcgggagggccgcaccaaggaccagatcctgctgctgattgatattgagcagagctacatcaacaccaaccacgaggacttcatcggctttgccaatgcccagcagaggagcacccagctgaacaagaagagggccatccccaaccaggtgatccggcggggctggctgaccatcaacaacatcagcctgatgaagggcggcagcaaggagtactggtttgtgctgacagctgagagcctgtcctggtacaaggatgaggaggagaaggagaagaagtacatgctgcccctggacaacctgaagatcagagatgtggagaagggcttcatgagcaacaagcacgtgtttgccatcttcaacacagagcagagaaatgtgtacaaggacctgcggcagatcgagctggcctgtgacagccaggaggatgtggacagctggaaggccagcttcctgcgggccggcgtgtacccagagaaggaccaggctgaaaatgaagatggagcccaggagaacaccttctccatggacccccagctggagcggcaggtggagaccatccggaacctggtggacagctatgtggccatcatcaacaagagcatccgggacctgatgcccaagaccatcatgcacctgatgatcaacaacaccaaggccttcatccaccacgagctgctggcctacctgtacagcagcgctgaccagagcagcctgatggaggagagcgctgaccaggcccagaggagagatgacatgctgaggatgtaccacgccctgaaggaggccctgaacatcatcggggacatcagcaccagcacagtgtccacccctgtgcccccacctgtggatgacacctggctgcagagcgccagcagccacagccccaccccccagaggaggcctgtgagcagcatccaccccccaggccggcccccagctgtgcggggccccaccccaggccccccactcatccctgtgcctgtgggcgctgctgccagcttcagcgccccacccatccccagcaggcctggcccccagagcgtgtttgccaacagcgacctcttccctgccccaccccagatccccagcaggcctgtgcgcatccccccaggcatccccccaggagtgcccagcagaagacctcctgctgcccccagccggcccaccatcatccggcctgctgagcccagcctgctggactag

SEQ ID NO: 150619 - DNA, 1200 bp, synthetic construct
  misc_feature 1..1200: note = Description of Artificial Sequence: Synthetic coding sequence
  source 1..1200: mol_type = other DNA
atgctgcccctggagccctacctgacccagaccagcgctgtgccccagatgagccacttcatgtgccacagccccacccacaagccccagggcctgctgccctgggcccccttccaccaggcctctgtgtccctgtaccccatcagcccctggcccagcgagagcgtgtgcccccccacctgccctgggggcgccagctgctggttccctgctggaaatgcctgggacagagtggagctgggcttcctgggctttggagctggaggagtgtccattgctgtgcccggcttccccctgagctgtggccagggctgctgtgccggcggctggctgggccatggagcccgcttccctgccaagctgcgggccttcccccaggtgatcagaagaggctggctgaccatcaacaacatcagcctgatgaagggcggcagcaaggagtactggtttgtgctgacagctgagagcctgtcctggtacaaggatgaggaggagaaggagaagaagtacatgctgcccctggacaacctgaagatcagagatgtggagaagggcttcatgagcaacaagcacgtgtttgccatcttcaacacagagcagagaaatgtgtacaaggacctgcggcagatcgagctggcctgtgacagccaggaggatgtggacagctggaaggccagcttcctgcgggccggcgtgtacccagagaaggaccaggccgagaatgaagatggagcccaggagaacaccttctccatggacccccagctggagcggcaggtggagaccatccggaacctggtggacagctatgtggccatcatcaacaagagcatccgggacctgatgcccaagaccatcatgcacctgatgatcaacaacaccaaggccttcatccaccacgagctgctggcctacctgtacagcagcgctgaccagagcagcctgatggaggagagcgctgaccaggcccagaggagagatgacatgctgaggatgtaccacgccctgaaggaggccctgaacatcattggagacatcagcaccagcacagtgtccacccctgtgcccccacctgtggatgacacctggctgcagagcgccagcagccacagccccaccccccagaggaggcctgtgagcagcatccaccccccaggccggcccccagctgtgcggggccccaccccaggccccccatag

SEQ ID NO: 150620 - DNA, 13284 bp, synthetic construct
  misc_feature 1..13284: note = Description of Artificial Sequence: Synthetic coding sequence
  source 1..13284: mol_type = other DNA
atgagcagcaaggccgagaagaagcagaggctgagcggccggggcagcagccaggcctcctggagcggccgggccaccagggctgctgtggccacccaggagcagggcaatgccccagctgtgtctgagcctgagctgcaggccgagctgcccaaggaggagcctgagccccggctggagggcccccaggcccagagcgaggagagcgtggagcctgaggctgatgtgaagcccctcttcctgagccgggccgccctgaccggcctggctgatgctgtgtggacccaggagcatgatgccatcctggagcactttgcccaggaccccacagagagcatcctgaccatcttcatcgacccctgcttcggcctgaagctggagctgggcatgcctgtgcagacccagaaccagctggtgtacttcatccggcaggcccctgtgcccatcacctgggagaactttgaggccaccgtgcagtttggcaccgtgcggggcccctacatcccagccctgctgcggctgctgggcggcgtgtttgccccccagatctttgccaacacaggctggccagagagcatccggaaccactttgccagccacctgcacaagttcctggcctgcctgacagacacccgctacaagctggagggccacacagtgctgtacatcccagctgaggccatgaacatgaagccagagatggtgatcaaggacaaggagctggtgcagaggctggagacctccatgatccactggacccggcagatcaaggagatgctgagcgcccaggagaccgtggagaccggggagaacctgggccccctggaggagattgagttctggaggaaccgctgcatggacctgagcggcatcagcaagcagctggtgaagaagggcgtgaagcacgtggagagcatcctgcacctggccaagagcagctacctggcccccttcatgaagctggcccagcagatccaggacggcagccggcaggcccagagcaacctgaccttcctgagcatcctgaaggagccctaccaggagctggccttcatgaagcccaaggacatcagcagcaagctgcccaagctgatcagcctcatccgcatcatctgggtgaacagcccccactacaacacccgggagcggctgaccagcctcttcaggaaggtgtgtgactgccagtaccactttgcccgctgggaggatggcaagcagggccccctgccctgcttctttggagcccagggcccccagatcaccaggaacctgctggagattgaggacatcttccacaagaacctgcacaccctgcgggctgtgcggggcggcatcctggatgtgaagaacacctgctggcatgaggactacaacaagttccgggccggcatcaaggacctggaggtgatgacccagaacctgatcaccagcgcctttgagctggtgagagatgtgccccatggagtgctgctgctggacaccttccaccggctggccagccgggaggccatcaagaggacctatgacaagaaggctgtggacctgtacatgctgttcaacagcgagctggccctggtgaaccgggagaggaacaagaagtggccagacctggagccctacgtggcccagtacagcggcaaggcccgctgggtgcacatcctgcggaggagaattgacagagtgatgacctgcctggccggggcccacttcctgccccgcatcggcaccgggaaggagagcgtgcacacctaccagcagatggtgcaggccattgatgagctggtgaggaagaccttccaggagtggaccagcagcctggacaaggactgcatccggcggctggacacccccctgctgcgcatcagccaggagaaggccggcatgctggatgtgaactttgacaagagcctgctgatcctgtttgctgagattgactactgggagcggctgctgtttgagaccccccactacgtggtgaatgtggccgagagagctgaggacctgcgcatcctgcgggagaacctgctgctggtggcccgggactacaaccgcatcatcgccatgctgagcccagatgagcaggccctcttcaaggagcgcatccggctgctggacaagaagatccaccctggcctgaagaagctgcactgggccctgaagggggccagcgccttcttcatcacagaatgtcgcatccacgccagcaaggtgcagatgattgtgaatgagttcaaggccagcaccctgaccatcggctggagggcccaggagatgtctgagaagctgctggtgcgcatcagcggcaagagggtgtacagagacctggagtttgaggaggaccagcgggagcacagagctgctgtgcagcagaagctgatgaacctgcaccaggatgtggtgaccatcatgaccaacagctatgaggtgttcaagaatgatggccctgagatccagcagcagtggatgctgtacatgatccggctggacaggatgatggaggatgccctgcggctgaatgtgaagtggagcctgctggagctgagcaaggccatcaatggagatggcaagaccagccccaaccccctcttccaggtgctggtgatcctgaagaatgacctgcagggctctgtggcccaggtggagttcagccccaccctgcagaccctggccggcgtggtgaatgacatcggcaaccacctgttcagcaccatctctgtgttctgccacctgcctgacatcctgaccaagaggaagctgcaccgggagcccatccagacagtggtggagcaggatgaggacatcaagaagatccagacccagatcagcagcggcatgaccaacaatgccagcctgctgcagaactacctgaagacctgggacatgtaccgggagatctgggagatcaacaaggacagcttcatccaccgctaccagaggctgaacccccctgtgagcagctttgtggccgacatcgcccgctacacagaggtggccaacaacgtgcagaaggaggagaccgtgaccaacatccagtttgtgctgctggactgcagccacctgaagttcagcctggtgcagcactgcaatgagtggcagaacaagtttgccaccctgctgcgggagatggccgccggccgcctgctggagctgcacacctacctgaaggaaaatgctgagaagatcagccggcccccccagaccctggaggagctgggcgtgtccctgcagctggtggatgccctgaagcatgacctggccaacgtggagacccagatcccccccatccacgagcagtttgccatcctggagaagtatgaggtgcctgtggaggacagcgtgctggagatgctggacagcctgaatggagagtgggtggtgttccagcagaccctgctggacagcaagcagatgctgaagaagcacaaggagaagttcaagacaggcctcatccacagcgcagatgacttcaagaagaaggcccacaccctgctggaggactttgagttcaagggccacttcaccagcaatgtgggctacatgtctgccctggaccagatcacccaggtgcgggccatgctgatggccatgagggaggaggagaacagcctgcgggccaacctgggcatcttcaagattgagcagccccccagcaaggacctgcagaacctggagaaggagctggatgccctgcagcagatctgggagatcgcccgggactgggaggagaactggaatgagtggaagacaggccgcttcctgatcctgcagacagagaccatggagaccacagcccacggcctcttccggcggctgaccaagctggccaaggagtacaaggacaggaactgggagatcatcgagaccaccaggagcaagattgagcagttcaagaggaccatgcccctcatcagtgacctgagaaatcctgccctgcgggagcggcactgggaccaggtgagagatgagatccagcgggagtttgaccaggagagcgagagcttcaccctggagcagatcgtggagctgggcatggaccagcacgtggagaagattggagagatcagcgccagcgccaccaaggagctggccatcgaggtggccctgcagaacatcgccaagacctgggatgtgacccagctggacatcgtgccctacaaggacaagggccaccaccggctgcggggcacagaggaggtgttccaggccctggaggacaaccaggtggccctgagcaccatgaaggccagcagatttgtgaaggcctttgagaaggatgtggaccactgggagcgctgcctgagcctcatcctggaggtgattgagatgatcctgactgtgcagaggcagtggatgtacctggagaacatcttcctgggggaggacatcaggaagcagctgcccaatgaaagcaccctgtttgaccaggtgaacagcaactggaaggccatcatggacaggatgaacaaggacaacaatgccctgcggagcacccaccaccctggcctgctggacaccctgattgagatgaacaccatcctggaggacatccagaagagcctggacatgtacctggagaccaagaggcacatcttcccccgcttctacttcctgagcaatgatgacctgctggagatcctgggccagagcaggaaccctgaggccgtgcagccccacctgaagaagtgctttgacaacatcaagctgctgcgcatccagaaggtgggcggccccagcagcaagtgggaggccgtgggcatgttttctggagatggagagtacatcgacttcctgcacagcgtcttcctggagggccctgtggagagctggctgggagatgtggagcagaccatgagggtgaccctgcgggacctgctgaggaactgccacctggccctgaggaagttcctgaacaagagggacaagtgggtgaaggagtgggccggccaggtggtgatcacagccagccagatccagtggacagcagatgtgaccaagtgcctgctgacagccaaggagagagctgacaagaagatcctgaaggtgatgaagaagaaccaggtgtccatcctgaacaagtacagcgaggccatccggggcaacctgaccaagatcatgaggctgaagatcgtggccctggtgaccatcgagatccacgccagagatgtgctggagaagctgtacaagagcggcctgatggatgtgaacagctttgactggctgagccagctgcgcttctactgggagaaggacctggatgactgtgtgatccggcagaccaacacccagttccagtacaactatgagtacctgggcaacagcggccgcctggtgatcacccccctgacagaccgctgctacatgaccctgaccacagccctgcacctgcaccggggcggcagccccaagggccctgctggcaccgggaagacagagaccgtgaaggacctgggcaaggccctgggcatctacgtgattgtggtgaactgcagcgagggcctggactacaagtccatgggccgcatgtacagcggcctggcccagacaggagcctggggctgctttgatgagttcaaccgcatcaacatcgaggtgctgtctgtggtggcccaccagatcctgtgcatcctgagcgccctggccgccggcctgacccacttccactttgatggctttgagatcaacctggtgtggagctgtggcatcttcatcaccatgaaccctggctacgccggccgcacagagctgcctgagaacctgaagtccatgttccggcccatcgccatggtggtgcctgacagcaccctgattgctgagatcatcctgtttggagagggcttcggcaactgcaagatcctggccaagaaggtgtacaccctgtacagcctggccgtgcagcagctgagccggcaggaccactatgactttggcctgcgggccctgaccagcctgctgcgctatgccggcaagaagaggcggctgcagcctgacctgacagatgaggaggtgctgctgctgtccatgagggacatgaacatcgccaagctgacctctgtggatgcccccctcttcaatgccatcgtgcaggacctcttccccaacatcgagctgcctgtgattgattatggcaagctgcgggagaccgtggagcaggagatccgggacatgggcctgcagagcacccccttcaccctgaccaaggtgttccagctgtatgagaccaagaacagccgccacagcaccatgattgtgggctgcaccggcagcggcaagacagcctcctggaggatcctgcaggccagcctgagcagcctgtgcagagctggggaccccaacttcaacatcgtgcgggagttccccctgaaccccaaggccctgagcctgggggagctgtatggagaatatgacctgagcaccaatgagtggacagatggcatcctgagctctgtgatgaggacagcctgtgctgatgagaagccagatgagaagtggatcctgtttgatggccctgtggacaccctgtggattgagaacatgaacagcgtgatggatgacaacaaggtgctgaccctcatcaacggggagcgcatcgccatgcctgagcaggtgtccctgctgtttgaggtggaggacctggccatggccagccctgccaccgtgagccgctgtggcatggtgtacacagattatgctgacctgggctggaagccctacgtgcagagctggctggagaagaggcccaaggccgaggtggagcccctgcagaggatgtttgagaagctgatcaacaagatgctggccttcaagaaggacaactgcaaggagctggtgcccctgcctgagtacagcggcatcaccagcctgtgcaagctgtacagcgccctggccaccccagaaaatggagtgaacccagcagatggagaaaattatgtgaccatggtggagatgacctttgtgttctccatgatctggagcgtgtgtgcctctgtggatgaggagggcaggaagagaattgacagctacctgcgggagattgagggcagcttccccaacaaggacacagtgtatgagtactttgtggaccccaagatccgctcctggaccagctttgaggacaagctgcccaagtcctggagataccccccaaatgcccccttctacaagatcatggtgcccaccgtggacacagtgcgctacaactacctggtgagcagcctggtggccaaccagaaccccatcctgctggtgggccctgtgggcaccgggaagaccagcatcgcccagagcgtgctgcagagcctgcccagcagccagtggagcgtgctggtggtgaacatgtctgcccagaccaccagcaacaacgtgcagagcatcatcgagagccgggtggagaagaggaccaagggcgtgtatgtgccctttggaggcaagtccatgatcaccttcatggatgacctgaacatgcctgccaaggacatgtttggcagccagccccccctggagctgatccggctgtggattgattatggcttctggtatgacaggaccaagcagaccatcaagtacatccgggagatgttcctgatggccgccatgggccccccaggcggcggccgcaccgtcatcagcccccggctgcggagccgcttcaacatcatcaacatgaccttccccaccaagagccagatcatccgcatcttcggcaccatgatcaaccagaagctgcaggactttgaggaggaggtgaagcccatcggaaatgtggtgacagaggccaccctggacatgtacaacacagtggtgcagcgcttcctgcccacccccaccaagatgcactacctgttcaacctgcgggacatcagcaaggtgttccagggcatgctgcgggccaacaaggacttccatgacaccaagagcagcatcacccggctgtggattcatgagtgcttccgggtcttcagtgaccggctggtggatgctgctgacacagaggccttcatgggcatcatcagtgacaagctgggcagcttctttgacctgaccttccaccacctgtgccccagcaagaggcctcccatctttggagacttcctgaaggagcccaaggtgtatgaggacctgacagacctgactgtgctgaagacagtgatggagacagccctgaatgagtacaacctgagccccagcgtggtgcccatgcagctggtgctcttccgggaggccatcgagcacatcaccagaattgtgcgggtgattggccagccccggggcaacatgctgctggtgggcattggaggcagcggccggcagagcctggcccggctggccagcagcatctgtgactacaccaccttccagatcgaggtgaccaagcactacaggaagcaggagttcagagatgacatcaagaggctgtaccggcaggccggcgtggagctgaagaccaccagcttcatctttgtggacacccagattgctgatgagagcttcctggaggacatcaacaacatcctgagcagtggagaggtgcccaacctgtacaagccagatgaatttgaggagatccagagccacatcatcgaccaggcccgggtggagcaggtgcctgagagcagtgacagcctgtttgcctacctgattgagcgggtgcagaacaacctgcacatcgtgctgtgcctgagccccatgggagaccccttcaggaactggatccggcagtacccagccctggtgaactgcaccaccatcaactggttcagcgagtggccccaggaggccctgctggaggtggccgagaagtgcctgattggagtggacctgggcacccaggagaacatccacaggaaggtggcccagatctttgtgaccatgcactggagcgtggcccagtacagccagaagatgctgctggagctgcggcggcacaactacgtgacccccaccaagtacctggagctgctgagcggctacaagaagctgctgggggagaagaggcaggagctgctggcccaggccaacaagctgaggacaggcctcttcaagattgatgagacccgggagaaggtgcaggtgatgagcctggagctggaggatgccaagaagaaggtggccgagttccagaagcagtgtgaggagtacctggtgatcatcgtgcagcagaagcgggaggctgatgagcagcagaaggctgtgacagccaacagcgagaagattgctgtggaggagatcaagtgccaggccctggccgacaatgcccagaaggacctggaggaggccctgcctgccctggaggaggccatgagggccctggagagcctgaacaagaaggacatcggggagatcaagagctatggccggcccccagcccaggtggagatcgtgatgcaggccgtgatgatcctgcggggaaatgagcccacctgggccgaggccaagaggcagctgggggagcagaacttcatcaagagcctcatcaactttgacaaggacaacatcagtgacaaggtgctgaagaagatcggggcctactgtgcccagcctgacttccagcctgacatcatcggccgggtgtccctggccgccaagagcctgtgcatgtgggtgcgggccatggagctgtatggccgcctgtacagagtggtggagcccaagaggatccgcatgaatgctgccctggcccagctgcgggagaagcaggccgccctggccgaggcccaggagaagctgcgggaggtggccgagaagctggagatgctgaagaagcagtatgatgagaagctggcccagaaggaggagctgaggaagaagtctgaggagatggagctgaagctggagagagctggcatgctggtgtctggcctggccggggagaaggcccgctgggaggagaccgtgcagggcctggaggaggacctgggctacctggtgggggactgcctgctggccgccgccttcctgagctacatgggccccttcctgaccaactacagagatgagatcgtgaaccagatctggattggcaagatctgggagctgcaggtgccctgcagccccagctttgccatcgacaacttcctgtgcaaccccaccaaggtgcgggactggaacatccagggcctgcccagtgatgccttcagcacagaaaatggcatcatcgtgacccggggcaaccgctgggccctgatgattgacccccaggcccaggccctgaagtggatcaagaacatggagggcggccagggcctgaagatcatcgacctgcagatgtctgactacctgcgcatcctggagcacgccatccacttcggctaccctgtgctgctgcagaatgtgcaggagtacctggaccccaccctgaaccccatgctgaacaagtctgtggcccgcatcggcggccgcctgctgatgagaattggagacaaggaggtggagtacaacaccaacttccgcttctacatcaccaccaagctgagcaacccccactacagccctgagaccagcgccaagaccaccatcgtgaactttgctgtgaaggagcagggcctggaggcccagctgctgggcatcgtggtgaggaaggagaggcctgagctggaggagcagaaggacagcctggtgatcaacattgctgctgggaagaggaagctgaaggagctggaggatgagatcctgcggctgctgaatgaggccaccggcagcctgctggatgatgtgcagctggtgaacaccctgcacaccagcaagatcacagccacagaggtgacagagcagctggagaccagcgagaccacagagatcaacacagacctggcccgggaggcctaccggccctgtgcccagagggccagcatcctcttctttgtgctgaatgacatgggctgcatcgaccccatgtaccagttcagcctggatgcctacatcagcctcttcatcctgagcattgacaagagccacaggagcaacaagctggaggacagaattgactacctgaatgactaccacacctatgctgtgtaccgctacacctgcaggaccctgtttgagcggcacaagctgctcttctccttccacatgtgtgccaagatcctggagaccagcggcaagctgaacatggatgagtacaacttcttcctgcggggcggcgtggtgctggaccgggagggccagatggacaacccctgcagctcctggctggctgatgcctactgggacaacatcacagagctggacaagctgaccaacttccacggcctgatgaacagctttgagcagtacccccgggactggcacctgtggtacaccaatgctgcccctgagaaggccatgctgcccggggagtgggagaatgcctgcaatgagatgcagaggatgctgattgtgcgcagcctgcggcaggacagagtggccttctgtgtgaccagcttcatcatcaccaacctgggcagccgcttcatcgagccccctgtgctgaacatgaagtctgtgctggaggacagcacccccaggagccccctggtgttcatcctgagccctggggtggaccccaccagcgccctgctgcagctggccgagcacatgggcatggcccagcgcttccacgccctgagcctgggccagggccaggcccccatcgccgcccggctgctgcgggagggcgtgacccagggccactgggtgttcctggccaactgccacctgagcctgtcctggatgcccaacctggacaagctggtggagcagctgcaggtggaggacccccaccccagcttccggctgtggctgagcagcatcccccacccagacttccccatcagcatcctgcaggtgtccatcaagatgaccacagagccccccaagggcctgaaggccaacatgacccggctgtaccagctgatgtctgagccccagttcagccgctgcagcaagccagccaagtacaagaagctgctcttcagcctgtgcttcttccacagcgtgctgctggagaggaagaagttcctgcagctgggctggaacatcatctacggcttcaatgacagcgactttgaggtgtctgagaacctgctgagcctgtacctggatgaatatgaggagaccccctgggatgccctgaagtacctgattgctggcatcaactatggaggccacgtgacagatgactgggaccggcggctgctgaccacctacatcaatgactacttctgtgaccagagcctgagcacccccttccaccggctgagcgccctggagacctacttcatccccaaggatggcagcctggccagctacaaggagtacatcagcctgctgcccggcatggaccccccagaggccttcggccagcaccccaatgctgatgtggccagccagatcacagaggcccagaccctgtttgacaccctgctgagcctgcagccccagatcacccccaccagggctgggggccagacccgggaggagaaggtgctggagctggccgcagatgtgaagcagaagatccctgagatgattgattatgagggcacccagaagctgctggccctggaccccagccccctgaatgtggtgctgctgcaggagatccagcgctacaacaccctgatgcagaccatcctcttcagcctgacagacctggagaagggcatccagggcctcatcgtgatgagcaccagcctggaggagatcttcaactgcatctttgatgcccacgtgccccccctgtggggcaaggcctaccccagccagaagcccctggccgcctggacccgggacctggccatgagggtggagcagtttgagctgtgggccagccgggcccggccccctgtgatcttctggctgagcggcttcaccttccccaccggcttcctgacagctgtgctgcagagcagcgcccggcagaacaacgtgtctgtggacagcctgtcctgggagttcatcgtgtccacagtggatgacagcaacctggtgtacccacccaaggatggagtgtgggtgcggggcctgtacctggagggcgccggctgggacaggaagaacagctgcctggtggaggccgagcccatgcagctggtgtgcctgatgcccaccatccacttccggcctgctgagagcaggaagaagagcgccaagggcatgtacagctgcccctgctactactaccccaacagagctggcagcagtgaccgggccagctttgtgattggcatcgacctgcggagcggggccatgaccccagaccactggatcaagaggggcacagccctgctgatgagcctggacagctag

SEQ ID NO: 150621 - DNA, 1782 bp, synthetic construct
  misc_feature 1..1782: note = Description of Artificial Sequence: Synthetic coding sequence
  source 1..1782: mol_type = other DNA
atggagatcgtgtatgtgtatgtgaagaagagaagtgaatttgggaagcagtgcaacttcagtgaccggcaggccgagctgaacatcgacatcatgcccaaccctgagctggccgagcagtttgtggagaggaaccctgtggacaccggcatccagtgcagcatctccatgtctgagcacgaggccaacagcgagagatttgagatggagacccggggcgtgaaccacgtggagggcggctggcccaaggatgtgaaccccctggagctggagcagaccatccgcttcaggaagaaggtggagaaggatgagaactacgtgaatgccatcatgcagctgggcagcatcatggagcactgcatcaagcagaacaatgccatcgacatctatgaggagtacttcaatgatgaggaggccatggaggtgatggaggaggaccccagcgccaagaccatcaacgtgttccgggacccccaggagatcaagagagctgccacccacctgtcctggcacccagatggcaacaggaagctggccgtggcctacagctgcctggacttccagagggcccctgtgggcatgagcagtgacagctacatctgggacctggagaaccccaacaagccagagctggccctgaagcccagcagccccctggtgaccctggagttcaaccccaaggacagccacgtgctgctgggcggctgctacaacggccagatcgcctgctgggacaccaggaagggcagcctggtggccgagctgagcaccatcgagagcagccaccgggaccctgtgtatggcaccatctggctgcagagcaagacaggaacagagtgcttcagcgccagcacagatggccaggtgatgtggtgggacatcaggaagatgtctgagcccacagaggtggtgatcctggacatcaccaagaaggagcagctggagaatgccctgggcgccatcagcctggagtttgagagcaccctgcccaccaagttcatggtgggcacagagcagggcatcgtcatcagctgcaacaggaaggccaagaccagcgctgagaagatcgtgtgcaccttccctggccaccacggccccatctatgccctgcagaggaaccccttctaccccaagaacttcctgactgtgggggactggacagcccgcatctggagcgaggacagccgggagagcagcatcatgtggaccaagtaccacatggcctacctgacagatgctgcctggagccctgtgcggcccaccgtcttcttcaccaccaggatggatggcaccctggacatctgggacttcatgtttgagcagtgtgaccccaccctgagcctgaaggacaatggctgcctgattgcctgtggcagccagctgggcaccaccaccctgctggaggtgtccccaggcctgagcaccctgcagagaaatgagaagaatgtggccagctccatgtttgagcgggagacccggcgggagaagatcctggaggcccggcaccgggagatgaggctgaaggagaagggcaaggccgagggcagagatgaggagcagacagatgaggagctggccgtggacctggaggccctggtgtccaaggccgaggaggagttctttgacatcatctttgctgagctgaagaagaaggaggctgatgccatcaagctgacccctgtgccccagcagcccagccctgaggaggaccaggtggtggaggagggggaggaggccgccggggaggagggagatgaggaggtggaggaggacctggcctag

SEQ ID NO: 150622 - DNA, 2676 bp, synthetic construct
  misc_feature 1..2676: note = Description of Artificial Sequence: Synthetic coding sequence
  source 1..2676: mol_type = other DNA
gagaaggacaatggcctggatgtgttcaagctgagtgaccgggacttcctgcgctccatggagaatgccatccgctttgggaagccctgcctgctggagaatgtgggggaggagctggaccctgccctggagcctgtgctgctgaagcagacctacaagcagcagggcaacacagtgctgaagctgggggacaccgtcatcccctaccacgaggacttcaggatgtacatcaccaccaagctgcccaacccccactacaccccagagatcagcaccaagctgaccctcatcaacttcaccctgagccccagcggcctggaggaccagctgctgggccaggtggtggccgaggagaggccagacctggaggaggccaagaaccagctgatcatcagcaatgccaagatgaggcaggagctgaaggacatcgaggaccagatcctgtaccgcctgagcagcagcgagggcaaccctgtggatgacatggagctgatcaaggtgctggaggccagcaagatgaaggctgctgagatccaggccaaggtgagaattgctgagcagacagagaaggacatcgacctgaccaggatggagtacatccctgtggccatccgcacccagatcctcttcttctgtgtgtctgacctggccaacgtggaccccatgtaccagtacagcctggagtggttcctgaacatcttcctgagcggcatcgccaacagcgagagagctgacaacctgaagaagaggatcagcaacatcaaccgctacctgacctacagcctgtacagcaatgtgtgccgcagcctgtttgagaagcacaagctgatgtttgccttcctgctgtgtgtgcgcatcatgatgaatgaaggcaagatcaaccagagcgagtggagatacctgctgagcggcggcagcatcagcatcatgacagagaacccagccccagactggctgagtgaccgggcctggagggacatcctggccctgagcaacctgcccaccttcagcagcttcagcagtgactttgtgaagcacctgtctgagttccgggtcatctttgacagcctggagccccaccgggagcccctgcccggcatctgggaccagtacctggaccagttccagaagctgctggtgctgcgctgcctgcggggggacaaggtgaccaatgccatgcaggactttgtggccaccaacctggagccccgcttcatcgagccccagacagccaacctgtctgtggtgttcaaggacagcaacagcaccacccccctcatctttgtgctgagccctggaacagatcctgctgctgacctgtacaagtttgctgaggagatgaagttcagcaagaagctgagcgccatcagcctgggccagggccagggccccagggctgaggccatgatgaggagcagcattgaaagaggcaagtgggtgttcttccagaactgccacctggcccccagctggatgcctgccctggagcggctgattgagcacatcaacccagacaaggtgcaccgggacttccggctgtggctgaccagcctgcccagcaacaagtttcctgtgtccatcctgcagaatggcagcaagatgaccatcgagcccccccggggcgtgcgggccaacctgctgaagagctacagcagcctgggggaggacttcctgaacagctgccacaaggtgatggagttcaagagcctgctgctgagcctgtgcctcttccacggcaatgccctggagcggcacaagtttggccccctgggcttcaacatcccctatgagttcacagatggagacctgcgcatctgcatcagccagctgaagatgttcctggatgaatatgatgacatcccctacaaggtgctgaagtacacagctggggagatcaactacggcggccgggtgacagatgactgggaccggcgctgcatcatgaacatcctggaggacttctacaacccagatgtgctgagccctgagcacagctacagcgccagcggcatctaccaccagatcccccccacctatgacctgcacggctacctgagctacatcaagagcctgcccctgaatgacatgcctgagatcttcggcctgcatgacaatgccaacatcacctttgcccagaatgagacctttgccctgctgggcaccatcatccagctgcagcccaagagcagcagcgctggcagccagggccgggaggagatcgtggaggatgtgacccagaacatcctgctgaaggtgcctgagcccatcaacctgcagtgggtgatggccaagtaccctgtgctgtatgaggagagcatgaacacagtgctggtgcaggaggtgatccgctacaaccggctgctgcaggtgatcacccagaccctgcaggacctgctgaaggccctgaagggcctggtggtgatgagcagccagctggagctgatggccgccagcctgtacaacaacacagtgcctgagctgtggagcgccaaggcctaccccagcctgaagcccctgagctcctgggtgatggacctgctgcagaggctggacttcctgcaggcctggatccaggacggcatcccagctgtgttctggatcagcggcttcttcttcccccaggccttcaacagacacagcgctgagttctgcccccagatctgccacctgcactag

SEQ ID NO: 150623 - DNA, 12798 bp, synthetic construct
  misc_feature 1..12798: note = Description of Artificial Sequence: Synthetic coding sequence
  source 1..12798: mol_type = other DNA
atggagcagcccaacagcaagggctacagcctgggccgcaccccccagggcccagaatgtagcagcgccccagctgtgcaggtgggcacccaccggggcctggagtacaaccctgggaagatcctgcccggcagtgactatggcctgggcaaccccccagccctggaccccaagctgccccacctgcccctgcccccagccccacccaccctgagtgacctgggccagcccaggaagagccccctgactggaacagacaagaagtaccccctgatgaagcagaggggcttctacagcgacatcctgagccctggcaccctggaccagctgggggaggtgtgccggggccccaggatgagccagaacctgctgcggcaggccgacctggacaagttcaccccccgggtgggcagctttgaggtgcctgaggacttccaggagaggatggagcagcagtgcatcggcagcaccacccggctgctggcccagacagacttccccctgcaggcctatgagcccaagatgcaggtgcccttccaggtgctgcccggccagcaccccaggaagattgaaattgaaagaaggaagcagcagtacctgagcctggacatcgagcagctgctcttcagccagggcatcgacagcaacaagctgatgcccaggcacctggaccaccagcacccccagaccatcgagcagggccatgaccccatcttccccatctacctgcccctgaaggtgtttgacaatgaagattttgactgcaggaccccccgggagtggatcaacatgggcctggagcccggcagcctggacaggaagcctgtgcctgggaaggccctgctgcccacagatgacttcctgggccacgaggaccccaagagccagaagctgaagtacaagtggtgtgaggtgggcgtgctggactatgatgaggagaagaagctgtacctggtgcacaagacagatgagaagggcctggtgagagatgagatgggccggcccatcctgaatgctggggtgaccacagagggccggccccccctgcaggtgtgccagtactgggtgccccgcatccagctgctcttctgtgccgaggacccctgcatgtttgcccagagggtggtgcaggccaatgccctgaggaagaacacagaggccctgctgctgtacaacctgtatgtggactgcatgcccagtgatggccagcacgtgatcagcgagcagagcctgagcaagatcaagcagtgggccctgagcacccccaggatgaggaagggccccagcgtgctggagcacctgagcagcctggcccgggaggtgtccctggactatgaaagatccatgaacaagatcaactttgaccacgtggtgagcagcaagccagagaccttctcctatgtgaccctgcccaagaaggaggaggagcaggtgcctgagcggggcctggtgtctgtgcccaagtaccacttctgggagcagaaggaggacttcacctttgtgtccctgctgaccaggcctgaggtgatcacagccctgagcaaggtgcgggcagagtgcaacaaggtgacagccatgagcctcttccacagcagcctgagcaagtacagccacctggaggagtttgagcagatccagagccagaccttcagccaggtgcagatgttcctgaaggacagctggatcagcagcctgaaggtggccatgaggagcagcctgcgggacatgagcaagggctggtacaacctgtatgagaccaactgggaggtgtacctgatgagcaagctgaggaagctgatggagctggtgaagtacatgctgcaggacaccctgcgcttcctggtgcaggacagcctggccagcttcagccagttcatcagtgacacctgctgcagcgtgctgaactgcacagatgacatggtgtggggagatgacctgatcaacagcccctaccggcccaggaagaaccccctcttcatcatggacctggtgctggacagcagcggcgtgcactacagcacccccctggagcagtttgaggccagcctgctgaacctgtttgataaaggcatcctggccacccatgctgtgccccagctggagaagctggtgatggaggacatcttcatcagcggggaccccctgctggagagcgtgggcctgcacgagcccctggtggaggagctgcgggccaccatcgccagcgctgtgtccaaggccatgatccccctgcaggcctatgccaaggagtacaggaagtacctggagctgaacaacaatgacatcgccagcttcctgaagacctaccagacccagggcctgctggcccaggaggtgcgggaggtggtgctgacccacctgcgggagaaggagatcctggacagcagcctgcccagcagcatcatcatcggccccttctacatcaacacagacaacgtgaagcagagcctgagcaagaagaggaaggccctggccacctctgtgctggacatcctggccaagaacctgcacaaggaggtggacagcatctgtgaggagttccgcagcatcagcaggaagatctatgagaagcccaacagcattgaggagctggccgagctgcgggagtggatgaagggcatccctgagcggctggtgggcctggaggagagaattgtgaaggtgatggatgactaccaggtgatggatgagttcctgtacaacctgagcagtgatgacttcaatgacaagtggatcgccagcaactggcccagcaagatcctgggccagatcgagctggtgcagcagcagcacgtggaggatgaggagaagttcaggaagatccagatcatggaccagaacaacttccaggagaagctggagggcctgcagctggtggtggccggcttcagcatccacgtggagatcagccgggcccatgaaattgccaatgaggtgcggcgggtgaagaagcagctgaaggactgccagcagctggccatgctgtacaacaaccgggagcgcatcttcagcctgcccatcaccaactatgacaagctgagcaggatggtgaaggagttccagccctacctggacctgtggaccacagccagtgactggctgcgctggagcgagagctggatgaatgaccccctgagcgccattgatgctgagcagctggagaagaatgtggtggaggccttcaagaccatgcacaagtgtgtgaagcagttcaaggacatgcctgcctgccaggaggtggccctggacatccgggcccgcatcgaggagttcaagccctacatccccctcatccagggcctgaggaaccctggcatgaggatccgccactgggagaccctgagcaaccagatcaacatcaacgtgcggcccaaggccaacctgacctttgcccgctgcctggagatgaacctgcaggaccacatcgagagcatcagcaaggtggccgaggtggccggcaaggagtatgccatcgagcaggccctggacaagatggagaaggagtggagcaccatcctcttcaacgtgctgccctacaaggccacagacacctacatcctgaagagcccagatgaggccagccagctgctggatgaccacatcgtgatgacccagaacatgtccttcagcccctacaagaagccctttgagcagaggatcaacagctgggagaacaagctgaagctgacccaggaggtgctggaggagtggctgaactgccagaggtcctggctgtacctggagcccatcttcagcagcgaggacatcaaccagcagctgcctgtggagagcaagcgctaccagaccatggagcgcatctggaagaagatcatgaagaatgcctatgaaaatcgggaggtgatcaacgtgtgcagcgacctgaggatgctggacagcctgcgggactgcaacaagatcctggacctggtgcagaagggcctgtctgagtacctggagaccaagaggtctgccttcccccgcttctacttcctgagtgatgatgagctgctggagatcctgagccagaccaaggaccccacagctgtgcagccccacctgaggaaatgttttgagaacatcgcccggctgctcttccaggaggacctggagatcacccacatgtacagcgctgagggggaggaggtgcagctgtgcttcagcatctaccccagcagcaatgtggaggactggctgcgggaggtggagaggtccatgaaggcctctgtgcatgacatcatcgagaaggccatccgggcctaccccaccatgcccaggacccagtgggtgctgaactggccaggccaggtgaccatcgccggctgccagacctactggaccatggaggtggccgaggccctggaggccggcaacctgcggagccagctgttcccccagctgtgccagcagctgagtgacctggtggccctggtgcggggcaagctgagcaggatgcagagagctgtgctgagcgccctgattgtgattgaggtgcacgccaaggatgtggtgtccaagctgatccaggagaatgtggtgtctgtgaatgacttccagtggatcagccagctgcgctactactggaccaacaatgacctgtacatccgggctgtgaatgctgagttcatctacggctatgagtacctgggcaacagcggccgcctggtgatcacccccctgacagaccgctgctacctgaccctgaccggggccctgcacctgaagtttggaggagccccagctggccctgctggcaccgggaagacagagaccaccaaggacctgggcaaggccctggccatccagacagtggtgttcaactgcagcgaccagctggacttcatggccatgggcaagttcttcaagggcctggccagcgctggggcctgggcctgctttgatgagttcaacagaattgacatcgaggtgctgtctgtggtggcccagcagatcaccaccatccagaaggcccagcagcagagggtggagcgcttcatgtttgagggcgtggagatccccctggtgcccagctgtgctgtgttcatcaccatgaaccctggctacgccggccgcacagagctgcctgacaacctgaaggccctcttccggcctgtggccatgatggtgcctgactatgccatgatcacagagatcagcctgtacagctttggcttcaatgaggcctctgtgctggccaagaagatcaccaccaccttcaagctgagcagcgagcagctgagcagccaggaccactatgactttggcatgagagctgtgaagacagtcatctctgctgctggcaacctgaagcgggagaaccccagcatgaatgaggagctgatctgcctgcgggccatcagagatgtgaatgtgcccaagttcctgcaggaggacctgaagctgttcagcggcatcgtgtctgacctcttccccaccatcaaggaggaggacacagattatggcatcctggatgaggccatccgggaggcctgcaggaacagcaacctgaaggatgtggagggcttcctgaccaagtgcatccagctgtatgagaccaccgtggtgcgccacggcctgatgctggtgggccccaccggcagcggcaagagcacctgctacagagtgctggccgccgccatgaccagcctgaagggccagcccagcatcagcggcggcatgtatgaagctgtgaactactacgtgctgaaccccaagagcatcaccatgggccagctgtatggagaatttgacctgctgacccatgagtggacagatggcatcttcagcagcttcatccgggccggggccatcaccagtgacaccaacaagaagtggtacatgtttgatggccctgtggatgccatctggattgagaacatgaacacagtgctggatgacaacaagaagctgtgcctgagcagtggagagatcatcaagctgacagaggccatgaccatgatgtttgaggtgcaggacctggccgtggccagccctgccaccgtgagccgctgtggcatggtgtacctggagcccagcatcctgggcctgatgcccttcatcgagtgctggctgaggaagctgccccccctgctgaagccctatgaggagcacttcaaggccctgtttgtgtccttcctggaggagagcatcagctttgtgcgcagctctgtgaaggaggtgattgccagcaccaactgcaacctgaccatgagcctgctgaagctgctggactgcttcttcaagcccttcctgccccgggagggcctgaagaagatccccagcgagaagctgagcagaattgtggagctgattgagccctggttcatcttcagcctcatctggagcgtgggcgccaccggggacagcagcggccgcaccagcttcagccactggctgcggctgaagatggagaatgagcagctgaccctgctcttccctgaggagggcctggtgtttgactaccgcctggaggatgctggcatcagcggcaccaatgacagtgaagatgaggaggaggagtacaagcaggtggcctgggtgaagtggatggacagcagcgcccccttcaccatggtgcctgacaccaactactgcaacatcatcgtgcccaccatggacacagtgcagatgagccacctgctggacatgctgctgaccaacaagaagcctgtgctgtgcatcggccccactggaacaggcaagaccctgaccatcagtgacaagctgctgaagaacctggccctggactacatcagccacttcctgaccttcagcgcccggaccagcgccaaccagacccaggacttcatcgacagcaagctggacaagaggaggaagggcgtgtttggaccacccctgggcaggaacttcatcttcttcattgatgacctgaacatgcctgccctggagacctacggggcccagccccccatcgagctgctgcggcagtggatggaccatggaggctggtatgacaggaagatcatcggggccttcaagaacctggtggacatcaactttgtgtgtgccatgggccccccaggcggcggcaggaacacagtgaccccccggctgatgaggcacttcaactacctgagctttgctgagatggatgaggtgtccaagaagaggatcttcagcaccatcctgggcaactggctggatggcctgctgggggagaagagctaccgggagcgggtgcctggggccccccacatcgcccacttcacagagcccctggtggaggccaccatcatggtgtatgccaccatcaccagccagctgctgcccaccccagccaagagccactacaccttcaacctgcgggacctgagcaaggtgttccagggcatgctgatggctgaccctgccaaggtggaggaccaggtgcagctgctgcggctgtggtaccacgagaactgcagggtcttccgggaccggctggtgaatgaggaggaccgctcctggtttgaccagctgctgaagcgctgcatggagcagtgggaggtgaccttcaacaaggtgtgccccttccagcccatcctgtatggagacttcatgagccctggcagtgatgtgaagagctatgagctgatcaccagcgagagcaagatgatgcaggtgattgaggagtacatcgaggactacaaccagatcaacacagccaagctgaagctggtgctcttcatggatgccatgagccacatctgccgcatcagcaggaccctgcggcaggccctgggcaatgccctgctgctgggcgtgggcggcagcggccgcagcagcctgacccggctggccagccacatggccgagtatgagtgcttccagatcgagctgagcaagaactacggcatgtctgagtggagagatgatgtgaagaaggtgctgctgaaggccggcctgcagaacctgcccatcaccttcctgttcagtgacacccagatcaagaatgaaagcttcctggaggacatcaacaacgtgctgaacagcggggacatccccaacctgtacacagcagatgagcaggaccagatcgtgtccaccatgaggccctacatccaggagcagggcctgcagcccaccaaggccaacctgatggccgcctacacaggccgggtgcgcagcaacatccacatggtgctgtgcatgagccccatcggggaggtgttccgggcccggctgcggcagttccccagcctggtgaactgctgcaccatcgactggttcaatgagtggccagctgaggccctgaagtctgtggccaccgtcttcctgaatgagatccctgagctggagagcagccaggaggagatccagggcctcatccaggtgtgtgtgtacatccaccagagcgtgtccaagaagtgcatcgagtacctggccgagctgaccaggcacaactacgtgacccccaagagctacctggagctgctgcacatcttcagcatcctgattggccagaagaagctggagctgaagacagccaagaacaggatgaagagcggcctggacaagctgctgcggaccagtgaagatgtggccaagatgcaggaggacctggagagcatgcaccccctgctggaggaggccgccaaggacaccatgctgaccatggagcagatcaaggtggacacagccatcgccgaggagaccagaaattctgtgcagacagaggagatcaaggccaatgagaaggccaagaaggcccaggccatcgcagatgatgcccagaaggacctggatgaggccctgcctgccctggatgctgccctggccagcctgaggaacctgaacaagaatgatgtgacagaggtgcgggccatgcagaggcctcctcctggggtgaagctggtgattgaggccgtgtgcatcatgaagggcatcaagcccaagaaggtgcctggagagaagccaggcaccaaggtggatgactactgggagcccgggaagggcctgctgcaggaccccggccacttcctggagagcctcttcaagtttgacaaggacaacattggagatgtggtgatcaaggccatccagccctacatcgacaatgaggagttccagcctgccaccatcgccaaggtgtccaaggcctgcaccagcatctgccagtgggtgcgggccatgcacaagtaccactttgtggccaaggctgtggagcccaagaggcaggccctgctggaggcccaggatgacctgggcgtgacccagaggatcctggatgaggccaagcagaggctgcgggaggtggaggatggcatcgccaccatgcaggccaagtaccgggagtgcatcaccaagaaggaggagctggagctgaagtgtgagcagtgtgagcagaggctgggccgggccggcaagctgatcaatggcctgagtgatgagaaggtgcgctggcaggagaccgtggagaacctgcagtacatgctgaacaacatctctggagatgtgctggtggccgccggctttgtggcctacctgggccccttcaccggccagtacagaacagtgctgtatgacagctgggtgaagcagctgcggagccacaacgtgccccacaccagcgagcccaccctcatcggcaccctgggcaaccctgtgaagatccgctcctggcagattgctggcctgcccaatgacaccctgtctgtggagaatggagtcatcaaccagttcagccagcgctggacccacttcatcgacccccagagccaggccaacaagtggatcaagaacatggagaaggacaatggcctggatgtgttcaagctgagtgaccgggacttcctgcgctccatggagaatgccatccgctttgggaagccctgcctgctggagaatgtgggggaggagctggaccctgccctggagcctgtgctgctgaagcagacctacaagcagcagggcaacacagtgctgaagctgggggacaccgtcatcccctaccacgaggacttcaggatgtacatcaccaccaagctgcccaacccccactacaccccagagatcagcaccaagctgaccctcatcaacttcaccctgagccccagcggcctggaggaccagctgctgggccaggtggtggccgaggagaggccagacctggaggaggccaagaaccagctgatcatcagcaatgccaagatgaggcaggagctgaaggacatcgaggaccagatcctgtaccgcctgagcagcagcgagggcaaccctgtggatgacatggagctgatcaaggtgctggaggccagcaagatgaaggctgctgagatccaggccaaggtgagaattgctgagcagacagagaaggacatcgacctgaccaggatggagtacatccctgtggccatccgcacccagatcctcttcttctgtgtgtctgacctggccaacgtggaccccatgtaccagtacagcctggagtggttcctgaacatcttcctgtctggaattgccaacagcgagagagctgacaacctgaagaagaggatcagcaacatcaaccgctacctgacctacagcctgtacagcaatgtgtgccgcagcctgtttgagaagcacaagctgatgtttgccttcctgctgtgtgtgcgcatcatgatgaatgaaggcaagatcaaccagagcgagtggagatacctgctgagcggcggcagcatcagcatcatgacagaaaatcctgccccagactggctgagtgaccgggcctggagggacatcctggccctgagcaacctgcccaccttcagcagcttcagcagtgactttgtgaagcacctgtctgagttccgggtcatctttgacagcctggagccccaccgggagcccctgcccggcatctgggaccagtacctggaccagttccagaagctgctggtgctgcgctgcctgcggggggacaaggtgaccaatgccatgcaggactttgtggccaccaacctggagccccgcttcatcgagccccagacagccaacctgtctgtggtgttcaaggacagcaacagcaccacccccctcatctttgtgctgagccctggaacagatcctgctgctgacctgtacaagtttgctgaggagatgaagttcagcaagaagctgagcgccatcagcctgggccagggccagggccccagggctgaggccatgatgaggagcagcattgagcggggcaagtgggtgttcttccagaactgccacctggcccccagctggatgcctgccctggagcggctcatcgagcacatcaacccagacaaggtgcaccgggacttccggctgtggctgaccagcctgcccagcaacaagtttcctgtgtccatcctgcagaatggcagcaagatgaccatcgagcccccccggggcgtgcgggccaacctgctgaagagctacagcagcctgggggaggacttcctgaacagctgccacaaggtgatggagttcaagagcctgctgctgagcctgtgcctcttccatggaaatgccctggagcggcacaagtttggccccctgggcttcaacatcccctatgagttcacagatggagacctgcgcatctgcatcagccagctgaagatgttcctggatgaatatgatgacatcccctacaaggtgctgaagtacacagctggggagatcaactatggaggccgggtgacagatgactgggaccggcgctgcatcatgaacatcctggaggacttctacaacccagatgtgctgagccctgagcacagctacagcgccagcggcatctaccaccagatcccccccacctatgacctgcacggctacctgagctacatcaagagcctgcccctgaatgacatgcctgagatcttcggcctgcatgacaatgccaacatcacctttgcccagaatgagacctttgccctgctgggcaccatcatccagctgcagcccaagagcagcagcgctggcagccagggccgggaggagatcgtggaggatgtgacccagaacatcctgctgaaggtgcctgagcccatcaacctgcagtgggtgatggccaagtaccctgtgctgtatgaggagagcatgaacacagtgctggtgcaggaggtgatccgctacaaccggctgctgcaggtgatcacccagaccctgcaggacctgctgaaggccctgaagggcctggtggtgatgagcagccagctggagctgatggccgccagcctgtacaacaacacagtgcctgagctgtggagcgccaaggcctaccccagcctgaagcccctgagctcctgggtgatggacctgctgcagaggctggacttcctgcaggcctggatccaggacggcatcccagctgtgttctggatcagcggcttcttcttcccccaggccttcctgaccggcaccctgcagaactttgccaggaagtttgtgatcagcattgacaccatcagctttgacttcaaggtgatgtttgaggcccccagcgagctgacccagaggccccaggtgggctgctacatccacggcctcttcctggagggcgcccgctgggaccctgaggccttccagctggccgagagccagcccaaggagctgtacacagagatggccgtcatctggctgctgcccacccccaacaggaaggcccaggaccaggacttctacctgtgccccatctacaagaccctgaccagggctggcaccctgagcaccaccggccacagcaccaactacgtgattgctgtggagatccccacccaccagccccagaggcactggatcaagaggggcgtggccctgatctgtgccctggactactag

SEQ ID NO: 150624 - DNA, 13416 bp, synthetic construct
  misc_feature 1..13416: note = Description of Artificial Sequence: Synthetic coding sequence
  source 1..13416: mol_type = other DNA
atggtgcctgaggaggtggaggtggagattgatgagatccctgtgctgtctgaggagggggaggaggaggaggagacctacagccagaaggtggagagcgtggacaaggtgcgggccaagagggtgtccctgaggacagagagcctgggccagcccctgaaccgggaggatgaggagatggacaaggagatcagcgagaagctgcccagcaagaggacagccaagcacatcatggagaagatgcacctgcacatgctgtgcacccccctgcctgaggagttcctggaccagaatgtggtgttcttcctgaggaacaccaaggaggccatcagcgaggccacagacatgaaggaggccatggagatcatgcctgagaccctggagtatggcatcatcaatgccaacgtgctgcacttcctgaagaacatcatctgccaggtgttcctgcctgccctgtccttcaaccagcacaggaccagcaccaccgtgggcgtgaccagcggggaggtgagcaacagcagcgagcacgagagtgacctgccccccatgcctggagaggccgtggagtaccacagcatccagctgatcagagatgagttcctgatgaatgtgcagaagtttgccagcaacatccagaggaccatgcagcagctggagggggagatcaagctggagatgcccatcatctctgtggagggggaggtgtctgacctggccgctgaccctgagaccgtggacatcctggagcagtgtgtgatcaactggctgaaccagatcagcacagctgtggaggcccagctgaagaagaccccccagggcaagggccccctggccgagattgagttctggagggagagaaatgccaccctgagcgccctgcacgagcagaccaagctgcccatcgtgaggaaggtgctggatgtgatcaaggagagtgacagcatgctggtggccaacctgcagcccgtcttcacagagctgttcaagttccacacagaggccagtgacaacgtgcgcttcctgagcacagtggagcgctacttcaagaacatcacccacggcagcggcttccacgtggtgctggacaccatcccagccatgatgtctgccctgaggatggtgtggatcatcagccgccactacaacaaggatgagaggatgatccccctgatggagcgcatcgcctgggagattgctgagcgggtgtgccgggtggtgaacctgcggaccctcttcaaggagaacagagccagcgcccagagcaagaccctggaggccaggaacaccctgcggctgtggaagaaggcctactttgacacccgggccaagattgaggccagcggccgggaggaccgctgggagtttgacaggaagaggctgtttgagaggacagactacatggccaccatctgccaggacctgagtgatgtgctgcagatcctggaggagttctacaacatcttcggccctgagctgaaggctgtgactggagaccccaagagaattgatgatgtgctgtgccgggtggatggcctggtgacccccatggagaacctgacctttgaccccttcagcatcaagagcagccagttctggaagtatgtgatggatgagttcaagattgaggtgctgattgacatcatcaacaagatctttgtgcagaacctggagaacccccccctgtacaagaaccacccccctgtggccggggccatctactgggagaggagcctcttcttccgcatcaagcacaccatcctgcgcttccaggaggtgcaggagatcctggacagcgaccggggccaggaggtgaagcagaagtacctggaggtgggccgcaccatgaaggagtatgaggacagaaaatatgagcagtggatggaggtgacagagcaggtgctgcctgccctgatgaagaagagcctgctgaccaagagcagcatcgccacagaggagcccagcaccctggagagaggagctgtgtttgccatcaacttcagccctgccctgcgggagatcatcaatgagaccaagtacctggagcagctgggcttcaccgtgcctgagctggccagaaatgtggccctgcaggaggacaagttcctgcgctacacagctggcatccagaggatgctggaccactaccacatgctgattggcaccctgaatgatgctgagagcgtgctgctgaaggaccacagccaggagctgctgcgggtcttccgcagcggctacaagaggctgaactggaacagcctgggcattggagactacatcaccggctgcaagcaggccatcggcaagtttgagagcctggtgcaccagatccacaagaatgctgatgacatcagcagccggctgaccctcatcgaggccatcaacctcttcaagtacccagctgccaagtctgaggaggagctgcccggggtgaaggagttctttgagcacatcgagcgggagcgggccagtgatgtggaccacatggtgcgctggtacctggccatcggccccctgctgaccaaggtggagggcctggtggtgcacaccaacacaggcaaggcccccaagctggccagctactacaagtactgggagaagaagatctatgaggtgctgaccaagctgatcctgaagaacctgcagagcttcaacagcctcatcctgggcaatgtgcccctcttccacacagagaccatcctgacagcccctgagatcatcctgcaccccaacaccaatgaaattgacaagatgtgcttccactgtgtgaggaactgtgtggagatcaccaagcactttgtgcgctggatgaatggcagctgcatcgagtgccccccccagaagggggaggaggaggaggtggtgatcatcaacttctacaatgacatcagcctgaacccccagatcatcgagcaggccgtgatgatcccccagaatgtgcaccgcatcctgatcaacctgatgaagtacctgcagaagtggaagcgctaccggcccctgtggaagctggacaaggccatcgtgatggagaagtttgctgccaagaagccaccctgtgtggcctatgatgagaagctgcagttctacagcaagatcgcctatgaggtgatgaggcaccccctcatcaaggatgagcactgcatccggctgcagctgcggcacctggccaacacagtgcaggagaatgccaagtcctgggtgatcagcctgggcaagctgctgaatgaaagtgccaaggaggagctgtacaacctgcacgaggagatggagcacctggccaagaacctgaggaagatccccaacaccctggaggacctgaagtttgtgctggccaccatcgccgagatccgcagcaagagcctggtgatggagctgcgctacagagatgtgcaggagcgctaccgcaccatggccatgtacaacctcttccccccagatgctgagaaggagctggtggacaagattgagagcatctggagcaacctcttcaatgattctgtgaatgtggagcacgccctgggggacatcaagaggaccttcacagagctgaccagaggagagatcatgaactacagagtgcagatcgaggagtttgccaagcgcttctacagcgagggccctggctctgtgggagatgacctggacaagggcgtggagctgctgggcgtgtatgagcgggagctggcccggcatgagaagagccggcaggagctggccaatgctgagaagctgtttgacctgcccatcaccatgtacccagagctgctgaaggtgcagaaggagatgagcggcctgaggatgatctatgagctgtatgagggcctgaaggtggccaaggaggagtggagccagaccctgtggatcaacctgaatgtgcagatcctgcaggagggcatcgagggcttcctgcgggccctgaggaagctgcccaggcctgtgcggggcctgtctgtgacctactacctggaggccaagatgaaggccttcaaggacagcatccccctgctgctggacctgaagaatgaggccctgcgggacagacactggaaggagctgatggagaagaccagcgtcttctttgagatgacagagaccttcaccctggagaacatgtttgccatggagctgcacaagcacacagatgtgctgaatgaaattgtgacagctgccatcaaggaggtggccatcgagaaggctgtgaaggagatcctggacacctgggagaacatgaagttcaccgtggtgaagtactgcaagggcacccaggagcggggctacatcctgggctctgtggatgagatcatccagagcctggatgacaacaccttcaacctgcagagcatcagcggcagcagatttgtgggccccttcctgcagacagtgcacaagtgggagaagaccctgagcctcatcggggaggtgattgagatctggatgctggtgcagaggaagtggatgtacctggagagcatcttcatcggcggggacatccgcagccagctgcctgaggaggccaagaagtttgacaacatcgacaaggtgttcaagaggatcatgggagagaccctgaaggaccctgtgatcaagcgctgctgtgaggcccccaaccggctgagtgacctgcagaatgtgtctgagggcctggagaagtgccagaagagcctgaatgactacctggacagcaagagaaatgccttcccccgcttcttcttcatcagtgatgatgagctgctgagcatcctgggcagcagtgaccccctgtgtgtgcaggagcacatgatcaagatgtatgacaacatcgccagcctgcgcttcaatgatggagacagcggggagaagctggtgtctgccatgatctctgctgagggggaggtgatggagttcaggaagatcctgcgggcagagggccgggtggaggactggatgacagctgtgctgaatgagatgaggaggaccaacagactcatcaccaaggaggccatcttccgctactgtgaagatagaagccgggtggactggatgctgctgtaccagggcatggtggtgctggccgccagccaggtgtggtggacctgggaggtggaggatgtgttccacaaggcccagaagggggagaagcaggccatgaagaactacggcaggaagatgcaccggcagattgatgagctggtgacccgcatcaccatgcccctgagcaagaatgacaggaagaagtacaacacagtgctgatcattgatgtgcacgcccgggacatcgtggacagcttcatccggggcagcatcctggaggcccgggagtttgactgggagagccagctgcgcttctactgggaccgggagccagatgagctgaacatccggcagtgcaccggcaccttcggctacggctatgagtacatgggcctgaatggccgcctggtgatcacccccctgacagaccgcatctacctgaccctgacccaggccctgtccatgtacctgggcggggccccagctggccctgctggcaccgggaagacagagaccaccaaggacctggccaaggccctgggcctgctgtgtgtggtgaccaactgtggggagggcatggactacagagctgtgggcaagatcttcagcggcctggcccagtgtggggcctggggctgctttgatgagttcaacagaattgatgcctctgtgctgagcgtcatcagcagccagatccagaccatcagaaatgccctgatccaccagctgaccaccttccagtttgagggccaggagatcagcctggacagcaggatgggcatcttcatcaccatgaaccctggctacgccggccgcacagagctgcctgagagcgtgaaggccctcttccggcctgtggtggtgattgtgcctgacctgcagcagatctgtgagatcatgctgttcagcgagggcttcctggaggccaagaccctggccaagaagatgacagtgctgtacaagctggcccgggagcagctgagcaagcagtaccactatgactttggcctgcgggccctgaagtctgtgctggtgatggccggggagctgaagaggggcagcagtgacctgcgggaggatgtggtgctgatgagggccctgcgggacatgaacctgcccaagtttgtgtttgaagatgtgcccctcttcctgggcctcatcagtgacctcttccctggcctggactgcccccgggtgcgctacccagacttcaatgatgctgtggagcaggtgctggaggagaatggctatgctgtgctgcccatccaggtggacaaggtggtgcagatgtttgagaccatgctgaccaggcacaccaccatggtggtgggccccacccggggcggcaagtctgtggtgatcaacaccctgtgccaggcccagaccaagctgggcctgaccaccaagctgtacatcctgaaccccaaggctgtgtctgtcatcgagctgtatggcatcctggaccccaccacccgggactggacagatggagtgctgagcaacatcttccgggagatcaacaagcccacagacaagaaggagaggaagtacatcctgtttgatggagatgtggatgccctgtgggtggagaacatgaacagcgtgatggatgacaaccggctgctgaccctggccaatggagagcgcatccggctgcaggcccactgtgccctgctgtttgaggtgggggacctgcagtatgccagccctgccaccgtgagccgctgtggcatggtgtatgtggaccccaagaacctgaagtaccggccctactggaagaagtgggtgaaccagatccccaacaaggtggagcagtacaacctgaacagcctgtttgagaagtatgtgccctacctgatggatgtgattgtggagggcatcgtggatggccggcaggccgagaagctgaagaccatcgtgccccagacagacctgaacatggtgacccagctggccaagatgctggatgccctgctggagggggagattgaggacctggacctgctggagtgctacttcctggaggccctgtactgcagcctgggcgccagcctgctggaggatggccgcatgaagtttgatgagtacatcaagaggctggccagcctgagcacagtggacacagaaggagtgtgggccaaccctggagagctgcccggccagctgcccaccctgtatgacttccactttgacaacaagaggaaccagtgggtgccctggagcaagctggtgcctgagtacatccacgcccctgagaggaagttcatcaacatcctggtgcacacagtggacaccaccaggaccacctggatcctggagcagatggtgaagatcaagcagcccgtcatctttgtgggggagagcggcaccagcaagacagccaccacccagaacttcctgaagaacctgtctgaggagaccaacatcgtgctgatggtgaacttcagcagcaggaccacctccatggacatccagaggaacctggaggccaacgtggagaagaggaccaaggacacctacggcccccccatgggcaagaggctgctggtgttcatggatgacatgaacatgccccgggtggatgaatatggcacccagcagcccatcgccctgctgaagctgctgctggagaagggctacctgtatgaccggggcaaggagctgaactgcaagagcatccgggacctgggcttcatcgccgccatgggcaaggccggcggcggcagaaatgaggtggacccccgcttcatcagcctcttcagcgtcttcaacgtgcccttccccagcgaggagagcctgcacctgatctacagcagcatcctgaagggccacaccagcaccttccacgagagcatcgtggccgtgtctgggaagctgaccttctgcaccctggccctgtacaagaacatcgtgcaggacctgccccccacccccagcaagttccactacatcttcaacctgcgggacctgagcagggtcttcaacggcctggtgctgaccaaccctgagcgcttccagacagtggcccagatggtgcgggtgtggagaaatgaatgtctgcgggtcttccatgacaggctcatcagcgagacagacaagcagctggtgcagcagcacatcggcagcctggtggtggagcacttcaaggatgatgtggaggtggtgatgagggaccccatcctgtttggagacttccagatggccctgcatgaaggagagccccgcatctatgaggacatccaggactatgaggccgccaaggccctcttccaggagatcctggaggagtacaatgaaagcaacaccaagatgaacctggtgctgtttgatgatgccctggagcacctgaccagggtgcaccgcatcatccgcatggaccggggccacgccctgctggtgggcgtgggcggcagcggcaagcagagcctgagccggctggccgccttcaccgccagctgtgaggtgtttgagatcctgctgagccggggctacagtgaaaattccttccgggaggacctgaagagcctgtacctgaagctgggcatcgagaacaaggccatgatcttcctgttcacagatgcccacgtggccgaggagggcttcctggagctgatcaacaacatgctgaccagcggcatcgtgcctgccctcttcagcgaggaggagaaggagagcatcctgagccagatcggccaggaggccctgaagcagggcatgggccctgccaaggagagcgtgtggcagtactttgtgaacaagagcgccaacaacctgcacatcgtgctgggcatgagccctgtgggggacaccctgcggacctggtgcaggaacttccctggcatggtgaacaacacaggcatcgactggttcatgccctggccaccccaggccctgcatgctgtggccaagagcttcctgggctacaaccccatgatcccagctgagaacattgaaaatgtggtgaagcacgtggtgctggtgcaccagagcgtggaccactacagccagcagttcctgcagaagctgcggcgcagcaactacgtgacccccaagaactacctggacttcatcaacacctacagcaagctgctggatgagaagacccagtgcaacatcgcccagtgcaagaggctggatggcggcctggacaagctgaaggaggccaccatccagctggatgagctgaaccagaagctggccgagcagaagatcgtgctggccgagaagtctgctgcctgtgaggccctgctggaggagattgctgtgaacacagctgtggccgaggagaagaagaagctggccgaggagaaggccatggagattgaggagcagaacaaggtgattgccatggagaaggccgaggccgagaccaccctggccgaggtgatgcccatcctggaggccgccaagctggagctgcagaagctggacaagagtgatgtgacagagatccgcagctttgccaagccacccaagcaggtgcagacagtgtgtgagtgcatcctgatcatgaagggctacaaggagctgaactggaagacagccaagggcgtgatgtctgaccccaacttcctgcggagcctgatggagattgactttgacagcatcacccagagccaggtgaagaacatcaagggcctgctgaagaccctgaacaccaccacagaggagatggaggccgtgtccaaggccggcctgggcatgctgaagtttgtggaggccgtgatgggctactgtgatgtgttccgggagatcaagcccaagcgggagaaggtggcccggctggagaggaacttctacctgaccaagcgggagctggagcgcatccagaatgagctggccgccatccagaaggagctggagaccctgggcgccaagtatgaggccgccatcctggagaagcagaagctgcaggaggaggccgagatcatggagcggcggctgattgctgctgacaagctgatcagcggcctgggcagcgagaacatccgctggctgaatgacctggatgagctgatgcaccggcgggtgaagctgctgggggactgcctgctgtgtgccgccttcctgtcctatgaaggagccttcacctgggagttcagagatgagatggtgaaccgcatctggcagaatgacatcctggagcgggagatccccctgagccagcccttccggctggagagcctgctgacagatgatgtggagatcagccgctggggcagccagggcctgcccccagatgagctgtctgtgcagaatggcatcctgaccacccgggccagccgcttccccctgtgcatcgacccccagcagcaggccctgaactggatcaagaggaaggaggagaagaacaacctgcgggtggccagcttcaatgaccctgacttcctgaagcagctggagatgagcatcaagtatggcacccccttcctgttcagagatgtggatgagtacatcgaccccgtcatcgacaacgtgctggagaagaacatcaaggtgtcccagggccggcagttcatcatcctgggggacaaggaggtggactatgacagcaacttccggctgtacctgaacaccaagctggccaacccccgctacagccccagcgtgtttgggaaggccatggtgatcaactacacagtgaccctgaagggcctggaggaccagctgctgtctgtgctggtggcctatgaaagaagagagctggaggagcagcgggagcacctgatccaggagaccagcgagaacaagaacctgctgaaggacctggaggacagcctgctgcgggagctggccaccagcacaggcaacatgctggacaacgtggacctggtgcacaccctggaggagaccaagagcaaggccacagaggtgtctgagaagctgaagctggccgagaagacagccctggacatcgaccggctgagagatggctacagacctgctgccaggagaggagccatcctcttctttgtgctgtctgagatggccctggtgaacagcatgtaccagtacagcctgattgccttcctggaggtgttccggctgagcctgaagaagagcctgcctgacagcatcctgatgaagaggctgaggaacatcatggacaccctgaccttcagcatctacaaccacggctgcaccggcctgtttgagcggcacaagctgctcttctccttcaacatgaccatcaagattgagcaggccgagggccgggtgccccaggaggagctggacttcttcctgaagggcaacatcagcctggagaagagcaagaggaagaagccctgtgcctggctgagtgaccagggctgggaggacatcatcctgctgtctgagatgttcagtgacaactttggccagctgcctgatgatgtggagaacaaccagacagtgtggcaggagtggtatgacctggacagcctggagcagtttcctgtgcccctgggctatgacaacaacatcacccccttccagaagctgctgatcctgcgctgcttccgggtggacagagtgtacagagctgtgacagattatgtgacagtgaccatgggagagaagtatgtgcagccccccatgatcagctttgaggccatctttgagcagagcaccccccacagccccatcgtgttcatcctgagccctggcagtgaccctgccacagacctgatgaagctggccgagaggagcggctttggaggcaaccggctgaagttcctggccatgggccagggccaggagaaggtggccctgcagctgctggagacagctgtggcccggggccagtggctgatgctgcagaactgccacctgctggtgaagtggctgaaggacctggagaagagcctggagcgcatcaccaagccccacccagacttccggctgtggctgaccacagaccccaccaagggcttccccatcggcatcctgcagaagagcctgaaggtggtgacagagcccccaaatggcctgaagctgaacatgagggccacctacttcaagatcagccatgagatgctggaccagtgcccccacccagccttcaagcccctggtgtatgtgctggccttcttccacgctgtggtgcaggagaggaggaagtttgggaagattggctggaatgtgtactatgacttcaatgaaagtgacttccaggtgtgcatggagatcctgaacacctacctgaccaaggccttccagcagagggacccccgcatcccctggggcagcctgaagtacctgattggagaggtgatgtatggaggccgggccatcgacagctttgaccggcgcatcctgaccatctacatggatgagtacctgggggacttcatctttgacaccttccagcccttccacttcttcaggaacaaggaggtggactacaagatccctgtgggagatgagaaggagaagtttgtggaggccatcgaggccctgcccctggccaacaccccagaggtgtttggcctgcaccccaatgctgagatcggctactacacccaggccgcccgggacatgtgggcccacctgctggagctgcagccccagacaggagagagcagcagcggcatcagcagagatgactacatcggccaggtggccaaggagattgagaacaagatgcccaaggtgtttgacctggaccaggtgaggaagaggctgggcaccggcctgagccccacctctgtggtgctgctgcaggagctggagcgcttcaacaagctggtggtgaggatgaccaagagcctggccgagctgcagagggccctggccggggaggtgggcatgagcaatgagctggatgatgtggcccggagcctcttcatcggccacatccccaacatctggaggcggctggccccagacaccctgaagagcctgggcaactggatggtgtacttcctgcggcgcttcagccagtacatgctgtgggtgacagagagcgagcccagcgtgatgtggctgagcggcctgcacatccctgagagctacctgacagccctggtgcaggccacctgcaggaagaatggctggcccctggacaggagcaccctcttcacccaggtgaccaagttccaggatgctgatgaggtgaatgaaagagctggccagggctgctttgtgtctggcctgtacctggagggcgctgactgggacatcgagaagggctgcctgatcaagagcaagcccaaggtgctggtggtggacctgcccatcctgaagatcatccccatcgaggcccaccggctgaagctgcagaacaccttccgcacccctgtgtacaccacctccatgagaagaaatgccatgggcgtgggcctggtgtttgaggccgacctcttcaccaccaggcacatcagccactgggtgctgcagggcgtgtgcctgaccctgaacagcgactag

SEQ ID NO: 150625 - DNA, 13572 bp, synthetic construct
  misc_feature 1..13572: note = Description of Artificial Sequence: Synthetic coding sequence
  source 1..13572: mol_type = other DNA
atggccgcccaggtggccgcccgggaggcccgggacttccgggaggcccccaccctgcggctgaccagcggggccggcctggaggccgtgggcgctgtggagctggaggaggaggaggagaatgaggaggaggccgccgcccggcgggcccggagctttgcccaggatgcccgggtgcgcttcctgggcggccgcctggccatgatgctgggcttcacagaggagaagtggagccagtacctggagagcgaggacaaccggcaggtgctgggggagttcctggagagcaccagccctgcctgcctggtgttctcctttgctgccagcggccgcctggccgccagccaggagatccccagagatgccaaccacaagctggtgttcatcagcaagaagatcacagagagcattggagtgaatgacttcagccaggtggtgctgtttggagagctgcctgccctgagcctgggccacgtgtctgccttcctggatgagatcctggtgcctgtgctgagcaacaagaacaaccacaagtcctggagctgcttcaccagccaggacatggagtaccacatcgaggtgatgaagaagaagatgtacatcttccggggcaagatgagcaggaggaccctgctgcccatccccaccgtggccggcaagatggacctggaccagaactgcagcgagaacaagccacccagcaatgaaagaatcatcctgcacgccattgaatctgtggtgattgagtggagccaccagatccaggagatcatcgagcgggacagcgtgcagaggctgctgaatggcctgcacctgagcccccaggccgagctggacttctggatgatgaggcgggagaacctgagctgcatctatgaccagctgcaggcccctgtggtgctgaagatggtgaagatcctgaccaccaagcagagcagctacttccccaccctgaaggacatcttcctggccgtggagaatgccctgctggaggcccaggatgtggagctgtacctgcggcccctgcggcggcacatccagtgcctgcaggagacagagttcccccagacccgcatcctgattgcccccctcttccacaccatctgcctgatctggagccacagcaagttctacaacaccccagcccgggtgattgtgctgctgcaggagttctgcaacctcttcatcaaccaggccacagcctacctgagccctgaggacctgctgcggggggagattgaggagagcctggagaaggtgcaggtggccgtgaacatcctgaagaccttcaagaacagcttcttcaactacaggaagaagctggccagctacttcatgggcaggaagctgcggccctgggacttccagagccacctggtgttctgccgctttgacaagttcctggacaggctcatcaagattgaggacatctttgccaccaccctggagtttgagaagctggagcggctggagtttggaggcaccaagggggccatcctgaatggccaggtgcatgagatgtctgaggagctgatggagctgtgcaagctgttcaagcagagcacctatgaccccagcgactgcaccaacatggagtttgaaagtgactatgtggccttcaagagcaagaccctggagtttgaccggcggctgggcaccatcatctgtgaggccttcttcaactgcaatggcctggaggccgccttcaagctgctgaccatctttggaaacttcctggagaagcctgtggtgatggagatcttcagcctgcactacagcaccctggtgcacatgttcaacacagagctggatgtgtgcaagcagctgtacaatgagcacatgaagcagattgaatgtggccacgtggtgctgaacaagaacatgcccttcaccagcggcaacatgaagtgggcccagcaggtgctgcagaggctgcagatgttctggagcaactttgccagcctgcgctacctgttcctgggcaacccagaccacgccctggtgtaccagaagtatgtggagatgaccaccctgctggaccagtttgagagccgcatctacaatgagtggaagagcaatgtggatgagatctgtgagttcaacctgaaccagcccctggtgaagttcagcgccatcaatggcctgctgtgtgtgaactttgaccccaagctggtggccgtgctgcgggaggtgaagtacctgctgatgctgaagaagcaggacatcccagattctgccctggccatcttcaagaagaggaacaccatcctgaagtacatcggcaacctggacctgctggtgcagggctacaacaagctgaagcagaccctgctggaggtggagtaccccctgattgaagatgagctgcgggccattgatgagcagctgacagctgccaccacctggctgacctggcaggatgactgctggggctacatcgagcgggtgcgggccgccaccagcgagctggagcaccgggtggagaggacccagaagaatgtgaaggtgatccagcagaccatgaggggctgggcccgctgtgtgctgcccccccggcgggagcaccggcgggaggccgccttcaccctggaggacaagggggacctcttcaccaagaagtacaagctgatccagggagatggctgcaagatccacaacctggtggaggagaacaggaagctgttcaaggccaaccccagcctggacacctggaagatctacgtggagttcattgatgacatcgtggtggagggcttcttccaggccatcatgcatgacctggacttcttcctgaagaacacagagaagcagctgaagccagcccccttcttccaggcccagatgatcctgctgcccccagaaattgtgttcaagcccagcctggaccgggaggccggagatggcttctatgacctggtggaggagatgctgtgcaacagcttcaggatgtctgcccagatgaaccgcatcgccacccacctggagatcaagaactaccagaatgacatggacaacatgctgggcctggccgaggtgcggcaggagatcatgaacagagtggtgaatgtcatcaacaaggtgctggacttcaggaacaccctggagacccacacctacctgtgggtggatgacagagctgagttcatgaagcacttcctgctgtatggccatgctgtgtccagtgatgagatggatgcccacgccaatgaggagatccctgagcagccccccaccctggagcagttcaaggagcagattgacatctatgaggccctgtatgtgcagatgagcaagtttgaggacttccgggtgtttgacagctggttcaaggtggacatgaagcccttcaaggtgtccctgctgaccatcatcaagaagtggagctggatgttccaggagcacctgctgcgcttcgtcatcgacagcctgaatgagctgcaggagttcatcaaggagacagattctggcctgcagcgggagctgaatgaaggagaccatgatggcctggtggacatcatggtgcacctgctggccgtgcgcagccggcagagggccacagatgagctgtttgagcccctgaaggagaccatcaccctgctggagagctatggccagaagatgcctgagcaggtgtacatccagctggaggagctgcctgagcgctgggagaccaccaagaagattgctgccaccgtgagacatgaggtgagccccctgcacaatgctgaggtgaccctcatcaggaagaagtgcatcctgtttgatgccaagcaggccgagttccgggagcgcttccgccactacgcccccctgggcttcaatgctgagaacccctacacagccctggacaaggccaatgaggagctggaggccctggaggaggagatgctgcagatgcaggagagcacccggctgtttgaggtggccctgcctgagtacaagcagatgaagcagtgcaggaaggagatcaagctgctgaagggcctgtgggatgtgatcatctacgtgagaagaagcattgacaactggaccaagacccagtggaggcagatccacgtggagcagatggatgtggagctgcggagatttgccaaggccagcagcatcacagagatctggagcctgaacaaggaggtgcgggtgtgggatgcctacacaggcctggagggcaccgtgaaggacatgacagccagcctgcgggccatcacagagctgcagagccctgccctgcgggacagacactggcaccagctgatgaaggccatcggcgtgaagttcctgatcaatgaggccaccaccctggccgacctgctggccctgcggctgcaccgggtggaggatgatgtgcggcgcatcgtggacaaggctgtgaaggagctgggcacagagaaggtgatcacagagatcagccagacctgggccaccatgaagttctcctatgaggtgcactacagaacaggcatccccctgctgaagagtgatgagcagctgtttgagaccctggagcacaaccaggtgcagctgcagaccctgctgcagagcaaatatgtggagtacttcatcgagcaggtgctgtcctggcagaacaagctgaacattgctgacctggtgatcttcacctggatggaggtgcagaggacctggagccacctggagagcatctttgtgtgcagcgaggacatccgcatccagctggtgaaggatgccaggagatttgatggagtggatgctgagttcaaggagctgatgttcaagacagccaaggtggagaatgtgctggaggccacctgccggcccaacctgtatgagaagctgaaggacctgcagagccggctgagcctgtgtgagaaggccctggccgagtacctggagaccaagagaattgccttcccccgcttctactttgtgagcagcgctgacctgctggacatcctgagcaaaggagcccagcccaagcaggtgacctgccacctggccaagctgtttgacagcattgctgacctgcagtttgaggacaaccaggatgtgtctgcccacagagctgtgggcatgtacagcaaggagaaggagtatgtgcccttccaggctgaatgtgaatgtgtgggccacgtggagacctggctgctgcagctggagcagaccatgcaggagaccgtgcgccacagcatcacagaggccatcgtggcctatgaggagaagccccgggagctgtggatctttgacttccctgcccaggtggccctgaccagcagccagatctggtggaccacagatgtgggcatcgccttcagccggctggaggagggctatgaaacagccctgaaggacttccacaagaagcagatcagccagctgaacaccctcatcaccctgctgctgggggagctgcccccaggggaccggcagaagatcatgaccatctgcaccattgatgtgcacgccagagatgtggtggccaagctgatcagccagaagcaggtggtggtgagcccccaggccttcacctggctgagccagctgcggcaccgctgggaggacacccagaagcactgctttgtgaacatctgtgatgcccagttccagtacttctatgagtacctgggcaacagcccccggctggtgatcacccccctgacagaccgctgctacatcaccctgacccagagcctgcacctgaccatgtctggggccccagctggccctgctggcaccgggaagacagagaccaccaaggacctgggccgggccctgggcatgatggtgtatgtgttcaactgcagcgagcagatggactacaagagcatcggcaacatctacaagggcctggtgcagacaggagcctggggctgctttgatgagttcaaccgcatctctgtggaggtgctgtctgtggtggccgtgcaggtgaagatgattcatgatgccatccggaacaggaagaagagatttgtgttcctgggggaggccatcaccctgaagcccagcgtgggcatcttcatcaccatgaaccctggctacgccggccgcacagagctgcctgagaacctgaaggccctcttccggccctgtgccatggtggccccagacatcgagctgatctgtgagatcctgctggtggccgagggctttgtggatgcccgggccctggccaggaagttcatcaccctgtacaccctgtgcaaggagctgctgagcaagcaggaccactatgactggggcctgcgggccatcaagtctgtgctggtggtggccggcagcctgaagagaggagacaagaacagacctgaggaccaggtgctgatgagggccctgcgggacttcaacatgcccaagatcgtgacagatgacatccctgtgttcctgggcctggtgggggacctcttccctgccctggatgtgcccaggaggaggaagctgcactttgagcagatggtgcggcagagcaccctggagctgcggctgcagcctgaggagagcttcatcctgaaggtggtgcagctggaggagctgctggccgtgcgccacagcgtgtttgtggtgggcaatgccggcaccgggaagagcaagatcctgcggaccctgaacagaacctacgtgaacatgaagcagaagcctgtgtggaatgacctgaaccccaaggctgtgaccacagatgagctgtttggcttcatccaccacgccacccgggagtggaaggatggcaagatcgtgtacagctacttcatcggcctcttcagcagcatcctgcgggagcaggccaacctgaagcatgatggccccaagtggatcgtgctggatggagacatcgaccccatgtggattgagagcctgaacacagtgatggatgacaacaaggtgctgaccctggccagcaatgaaagaattgccctgacccccttcatgaggctgctgtttgagatccaccacctgcggagcgccaccccagccaccgtgtccagagctggcatcctgtatgtgaacccccaggacctgggctggaacccctacgtggcctcctggattgacagaagaagacaccagagcgagaaggccaacctgaccatcctgtttgacaagtatgtgcctgcctgcctggacaagctgcggaccagcttcaagaccatcaccagcatccctgagagcagcctggtgcagaccctgtgtgtgctgctggagtgcctgctgaccccagaaaatgtgcccagcgacagccccaaggaggtgtatgaggtgtactttgtgtttgcctgcatctgggcctttggaggcaccctgctgcaggaccagatcagtgactaccaggccgacttcagccgctggtggcagaaggagatgaaggctgtgaagttccccagccagggcaccatctttgactactacgtggaccacaagaccaagaagctgctgccctgggccgacaagatcgcccagttcaccatggaccctgatgtgcccctgcagacagtgctggtgcacaccacagaaacagcccggctgcgctacttcatggagctgctgctggagaagggcaagcccctgatgctggtgggcaatgccggcgtgggcaagacagtgtttgtgggggacaccctggccagcctgtctgaggactacatcgtgtcccgggtgcccttcaactactacaccaccagcacagccctgcagaagatcctggagaagcccctggagaagaaggccggccacaactacggccctgggggcaacaagaagctgatctacttcattgatgacatgaacatgcctgaggtggacctgtatggaacagtgcagccccacaccctcatccggcagcacatcgactatggccactggtatgaccggcagaaggtgatgctgaaggagatccacaactgccagtatgtggcctgcatgaaccccatggtgggcagcttcaccatcaacccccggctgcagaggcacttcaccgtgtttgccttcaacttccccagcctggatgccctgaacaccatctacggccagatcttctccttccacttccagcagcaggcctttgcccccagcatcctgcggagcggccccaccctcatccaggccaccatcgccttccaccagaccatgatgtgcaacttcctgcccacagccatcaagttccactacatcttcaacctgcgggacctgagcaatgtgttccagggcatcctgtttgccagcccagaatgtctgaagggccccctggacctgatccacctgtggctgcatgaaagtgcccgggtgtatggagacaagctgattgacaagaaggactgtgacctcttccagaggaggatgctggagacagcctacaagtactttgagggcatcgacagccacatgctgctgcagcagcccctcatctactgccactttgctgaccggggcaaggacccccactacatgcctgtgaaggactgggaggtgctgaagaccatcctgacagagaccctggacaactacaatgagctgaatgctgccatgcacctggtgctgtttgaagatgccatgcagcacgtgtgccgcatcagccgcatcctgcggaccccccagggctgtgccctgctggtgggcgtgggcggcagcggcaagcagagcctgagccggctggccgcctacctgcggggcctggaggtgttccagatcaccctgacagagggctacggcatccaggagctgcgggtggacctggccaacctgtacatcagaactggagccaagaacatgcccaccgtcttcctgctgacagatgcccaggtgctggatgagagcttcctggtgctgatcaatgacctgctggccagcggggagatcccagacctcttcagtgatgaagatgtggacaagatcatcagcggcatccacaatgaggtgcacgccctgggcatggtggacagccgggagaactgctggaagttcttcatggcccgggtgcggctgcagctgaagatcatcctgtgcttcagccctgtgggccgcaccctgcgggtgcgggccaggaagtttcctgccatcgtgaactgcacagccatcgactggttccacgcctggccccaggaggccctggtgtctgtgtcccggcgcttcatcgaggagaccaagggcatcgagcctgtgcacaaggacagcatcagcctcttcatggcccacgtgcacaccaccgtgaatgagatgagcacccgctactaccagaatgaaagaagacacaactacaccacccccaagagcttcctggagcagatcagcctcttcaagaacctgctgaagaagaagcagaatgaggtgtctgagaagaaggagcggctggtgaatggcatccagaagctgaagaccacagccagccaggtgggggacctgaaggcccggctggccagccaggaggccgagctgcagctgagaaatcatgatgctgaggccctgatcaccaagattggcctgcagacagagaaggtgtcccgggagaagaccatcgcagatgctgaggagaggaaggtgacagccatccagacagaggtgttccagaagcagcgggagtgtgaggccgacctgctgaaggccgagcccgccctggtggccgccacagctgccctgaacaccctgaacagagtgaacctgtctgagctgaaggccttccccaacccccccatcgctgtgaccaacgtgacagctgctgtgatggtgctgctggccccccggggccgggtgcccaaggaccgctcctggaaggccgccaaggtgttcatgggcaaggtggatgacttcctgcaggccctgatcaactatgacaaggagcacatccctgagaactgcctgaaggtggtgaatgagcactacctgaaggaccctgagttcaaccccaacctgatccgcaccaagagctttgctgctgctggcctgtgtgcctgggtgatcaacatcatcaagttctatgaggtgtactgtgatgtggagcccaagaggcaggccctggcccaggccaacctggagctggccgccgccacagagaagctggaggccatcaggaagaagctggtggacctggacaggaacctgagccggctgacagccagctttgagaaggccacagctgagaaggtgcgctgccaggaggaggtgaaccagaccaacaagaccatcaagctggccaaccggctggtgaaggagctggaggccaagaagatccgctggggccagagcatcaagagctttgaggcccaggagaagaccctgtgtggagatgtgctgctgacagctgcctttgtgtcctatgtgggccccttcacccggcagtaccggcaggagctggtgcactgcaagtgggtgcccttcctgcagcagaaggtgtccatccccctgacagagggcctggacctgatctccatgctgacagatgatgccaccatcgccgcctggaacaatgaaggcctgcccagcgacaggatgagcacagaaaatgctgccatcctgacccactgtgagcgctggcccctggtgattgacccccagcagcagggcatcaagtggatcaagaacaagtatggcatggacctgaaggtgacccacctgggccagaagggcttcctgaatgccattgaaacagccctggcctttggagatgtgatcctgattgagaacctggaggagaccatcgaccctgtgctggaccccctgctgggcaggaacaccatcaagaagggcaagtacatcagaattggagacaaggaatgtgagttcaacaagaacttccgcctcatcctgcacaccaagctggccaacccccactacaagccagagctgcaggcccagaccaccctgctgaacttcaccgtgacagaagatggcctggaggcccagctgctggccgaggtggtgtccattgaaagaccagacctggagaagctgaagctggtgctgaccaagcaccagaatgacttcaagattgagctgaagtacctggaggatgacctgctgctgcggctgtctgctgctgagggcagcttcctggatgacaccaagctggtggagcggctggaggccaccaagaccaccgtggccgagattgagcacaaggtgattgaggccaaggaaaatgaaaggaagatcaatgaggcccgggagtgctacagacctgtggccgcccgggccagcctgctgtacttcgtcatcaatgacctgcagaagatcaaccccctgtaccagttcagcctgaaggccttcaacgtgctcttccaccgggccatcgagcaggccgacaaggtggaggacatgcagggccgcatcagcatcctgatggagagcatcacccatgctgtgttcctgtacaccagccaggccctgtttgagaaggacaagctgaccttcctgagccagatggccttccagatcctgctgaggaagaaggagattgaccccctggagctggacttcctgctgcgcttcaccgtggagcacacccacctgagccctgtggacttcctgaccagccagagctggagcgccatcaaggccatcgctgtgatggaggagttccggggcatcgacagagatgtggagggcagcgccaagcagtggaggaagtgggtggagagcgagtgcccagagaaggagaagctgccccaggagtggaagaagaagagcctcatccagaagctgatcctgctgcgggccatgaggccagacaggatgacctacgccctgaggaactttgtggaggagaagctgggcgccaagtatgtggagaggacccggctggacctggtgaaggcctttgaggagagcagccctgccacccccatcttcttcatcctgagccctggggtggatgccctgaaggacctggagatcctgggcaagaggctgggcttcaccattgattctgggaagttccacaacgtgtccctgggccagggccaggagaccgtggccgaggtggccctggagaaggccagcaagggcggccactgggtgatcctgcagaatgtgcacctggtggccaagtggctgggcaccctggagaagctgctggagcgcttcagccagggcagccaccgggactacagagtcttcatgtctgctgagagcgcccccaccccagatgagcacatcatcccccagggcctgctggagaacagcatcaagatcaccaatgaaccacccaccggcatgctggccaacctgcatgctgccctgtacaactttgaccaggacaccctggagatctgcagcaaggagcaggagttcaagagcatcctcttcagcctgtgctacttccacgcctgtgtggccggccgcctgcgcttcggcccccagggctggagccgcagctaccccttcaaccctggggacctgaccatctgtgcctctgtgctgtacaactacctggaggccaacagcaaggtgccctgggaggacctgcgctacctgtttggagagatcatgtatggaggccacatcacagatgactgggacaggaagctgtgccgggtgtacctggaggagttcatgaaccccagcctgacagaagatgagctgatgctggcccctggctttgctgccccaccctacctggactatgccggctaccaccagtacatcgaggagatgctgcccccagagagccctgccctgtatggcctgcaccccaatgctgagattgagttcctgactgtgaccagcaacaccctcttccgcaccctgctggagatgcagcccagaaatgccctgtctggagatgagctgggccagagcacagaggagaaggtgaagaatgtgctggatgacatcctggagaagctgcctgaggagttcaacatggccgagatcatgcagaagaacagcaacagaagcccctacgtgctggtgtgcttccaggagtgtgagaggatgaacatcctgatccgggagatccgcatcagcctggagcagctggacctgagcctgaagggggagctggccctgagccctgctgtggaggcccagcagtttgccctgtcctatgacacagtgcctgacacctggagcaagctggcctaccccagcacctacggcctggcccagtggttcaatgacctgctgctgcgctgccgggagctggacacctggacccaggacctgaccctgcctgctgtggtgtggctgagcggcttcttcaacccccagagcttcctgacagccatcatgcagaccatggccaggaagaatgagtggcccctggacaagacccggctgacagcagatgtgaccaagaagaccaaggaggactatggccaccccccccgggagggcgcctacctgcacggcctcttcatggagggcgcccgctgggacacccaggccggcaccatcgtggaggcccggctgaaggagctggcctgccccatgcctgtgatctttgccaaggccacccctgtggaccggcaggagaccaagcagacctatgagtgccctgtgtaccgcaccaagctgcggggccccagctacatctggaccttccggctgaagtctgaggagaagacagccaagtgggtgctggccggcgtggccctgctgctggaggcctag

SEQ ID NO: 150626 - DNA, 1374 bp, synthetic construct
  misc_feature 1..1374: note = Description of Artificial Sequence: Synthetic coding sequence
  source 1..1374: mol_type = other DNA
atgtctgatgccaacaaggccgccatcgctgctgagaaggaggccctgaacctgaagctgccccccatcgtgcacctgcctgagaacatcggcgtggacacccccacccagagcaagctgctgaagtaccgccgcagcaaggagcagcagcagaagatcaaccagctggtgattgatggagccaagaggaacctggacaggaccctgggcaagaggacccccctgctgcccccaccagactacccccagaccatgaccagcgagatgaagaagaagggcttcaactacatctacatgaagcagtgtgtggagagcagccccctggtgcccatccagcaggagtggctggaccacatgctgcggctcatccctgagagcctgaaggagggcaaggagcgggaggagctgctggagagcctcatcaatgaggtgtccagtgactttgaaaattccatgaagcgctacctggtgcagagcgtgctggtgaagccccctgtgaagagcctggaggatgaaggaggccccctgcctgagagccctgtgggcctggactacagcaacccctggcacagcagctatgtgcaggccaggaaccagatcttcagcaacctgcacatcatccaccccaccatgaagatgctgctggacctgggctacaccacctttgctgacacagtgctgctggacttcaccggcatccgggccaagggccccatcgactgtgagagcctgaagacagacctgagcatccagaccagaaatgctgaggagaagatcatgaacacctggtaccccaaggtgatcaacctcttcaccaagaaggaggccctggagggcgtgaagccagagaagctggatgccttctacagctgtgtgtccaccctgatgagcaaccagctgaaggacctgctgcggaggacagtggagggctttgtgaagctgtttgaccccaaggaccagcagaggctgcccatcttcaagattgagctgacctttgatgatgacaagatggagttctaccccaccttccaggacctggaggacaacgtgctgagcctggtggagagaattgctgaggccctgcagaatgtgcagaccatccccagctggctgagcggcaccagcacccctgtgaacctggacacagagctgcctgagcacgtgctgcactgggccgtggacaccctgaaggctgctgtgcacaggaacctggagggcgccaggaagcactatgagacctacgtggagaagtacaactggctgctggatggaacagctgtggagaacatcgagaccttccagacagaggaccacacctttgatgagtacacagaggagctggactgctgggtggtgtgggaggtgtacttctag

SEQ ID NO: 150627 - DNA, 2040 bp, synthetic construct
  misc_feature 1..2040: note = Description of Artificial Sequence: Synthetic coding sequence
  source 1..2040: mol_type = other DNA
atgttcctgctgactggaggagtgtccctgaagtctgctgagaagaacccagaccccacctggctgcaggacaagtcctgggaggagatctgccgggccagcgagttccctgccttccggggcctgcggcagcacttctgtgagcacatctatgagtggagggagatctatgacagcaaggagccccacaatgccaagtttcctgcccccatggacaagaacctgaatgagctgcagaagatcatcatcctgcgctgcctgcggccagacaagatcaccccagccatcaccaactacgtgacagacaagctgggcaagaagtttgtggagcccccaccatttgacctgaccaagagctacctggacagcaactgcaccatccccctcatctttgtgctgagccctggagctgaccccatggccagcctgctgaagtttgccaatgacaagtccatgagcggcaacaagttccaggccatcagcctgggccagggccagggccccatcgccgccaagatgatcaaggccgccatcgaggagggcacctgggtgtgcctgcagaactgccacctggccgtgtcctggatgcccatgctggagaagatctgtgaggacttcaccagcgagacctgcaacagcagcttccggctgtggctgaccagctaccccagcagcaagtttcctgtgaccatcctgcagaatggagtgaagatgaccaatgagccccccaccggcctgcggctgaacctgctgcagagctacctgacagatcctgtgtctgaccctgagttcttcaagggctgccggggcaaggagctgctcttcatcaatgaatatgacaccatcccctttgaggccatctcctacctgactggagagtgcaactacggcggccgggtgacagatgactgggaccggcggctgctgctgaccatgctggccgacttctacaacctgtacatcgtggagaacccccactacaagttcagccccagcggcaactactttgccccacccaagggcacctatgaggactacatcgagttcatcaagaagctgcccttcacccagcaccctgagatcttcggcctgcatgaaaatgtggacatcagcaaggacctgcagcagaccaagaccctgtttgagagcctgctgctgacccagggcggcagcaagcagacaggagccagcggcagcacagaccagatcctgctggagatcaccaaggacatcctgaacaagctgcccagcgactttgatattgagatggccctgaggaagtaccctgtgcgctatgaggagagcatgaacacagtgctggtgcaggagatggagcgcttcaacaacctgatcatcaccatccggaacaccctgcgggacctggagaaggccatcaagggcgtggtggtgatggattctgccctggaggccctgagcggcagcctgctggtgggcaaggtgcctgagatctgggccaagaggagctaccccagcctgaagcccctgggcagctacatcacagacttcctggcccggctgaacttcctgcaggactggtacaacagcggcaagccctgtgtgttctggctgagcggcttcttcttcacccaggccttcctgactggagccatgcagaactatgccaggaagtacaccacccccatcgacctgctgggctatgaatttgaggtgatccccagcgacaccagtgacaccagcccagaagatggagtgtacatccacggcctgtacctggatggagcccgctgggaccgggagagcggcctgctggccgagcagtaccccaagctgctgtttgacctgatgcccatcatctggatcaagcccacccagaagagccgcatcatcaagagtgatgcctacgtgtgccccctgtacaagaccagcgagaggaagggcaccctgagcaccaccggccacagcaccaactttgtgattgccatgctgctgaagacagaccagcccaccaggcactggatcaagaggggcgtggccctgctgtgccagctggatgactag

SEQ ID NO: 150628 - DNA, 9279 bp, synthetic construct
  misc_feature 1..9279: note = Description of Artificial Sequence: Synthetic coding sequence
  source 1..9279: mol_type = other DNA
atgtctgatgccaacaaggccgccatcgctgctgagaaggaggccctgaacctgaagctgccccccatcgtgcacctgcctgagaacatcggcgtggacacccccacccagagcaagctgctgaagtaccgccgcagcaaggagcagcagcagaagatcaaccagctggtgattgatggagccaagaggaacctggacaggaccctgggcaagaggacccccctgctgcccccaccagactacccccagaccatgaccagcgagatgaagaagaagggcttcaactacatctacatgaagcagtgtgtggagagcagccccctggtgcccatccagcaggagtggctggaccacatgctgcggctcatccctgagagcctgaaggagggcaaggagcgggaggagctgctggagagcctcatcaatgaggtgtccagtgactttgaaaattccatgaagcgctacctggtgcagagcgtgctggtgaagccccctgtgaagagcctggaggatgaaggaggccccctgcctgagagccctgtgggcctggactacagcaacccctggcacagcagctatgtgcaggccaggaaccagatcttcagcaacctgcacatcatccaccccaccatgaagatgctgctggacctgggctacaccacctttgctgacacagtgctgctggacttcaccggcatccgggccaagggccccatcgactgtgagagcctgaagacagacctgagcatccagaccagaaatgctgaggagaagatcatgaacacctggtaccccaaggtgatcaacctcttcaccaagaaggaggccctggagggcgtgaagccagagaagctggatgccttctacagctgtgtgtccaccctgatgagcaaccagctgaaggacctgctgcggaggacagtggagggctttgtgaagctgtttgaccccaaggaccagcagaggctgcccatcttcaagattgagctgacctttgatgatgacaagatggagttctaccccaccttccaggacctggaggacaacgtgctgagcctggtggagagaattgctgaggccctgcagaatgtgcagaccatccccagctggctgagcggcaccagcacccctgtgaacctggacacagagctgcctgagcacgtgctgcactgggccgtggacaccctgaaggctgctgtgcacaggaacctggagggcgccaggaagcactatgagacctacgtggagaagtacaactggctgctggatggaacagctgtggagaacatcgagaccttccagacagaggaccacacctttgatgagtacacagagttcatcgagaagttcctgagcctggccagcgagatcatgctgctgccccagtggatccactacaccatggtgcggctggactgtgaggacctgaagacaggcctgaccaacaaggccaaggcctttgccaacatcctgctgaatgacatcgccagcaagtacagaaaagaaaatgaatgcatctgcagcgagtttgaggccatcaaggagcacgccctgaaggtgcctgagaccacagaggagatgatggacctgatctcctatgtggagaaggccaggacagtgggcatcgaggagctgatcctgcgcatccaggagagcaagaggcagatgagctacttcctggatgtgttcctgttcccccaggaggacctggccctgaatgccaccgtgctgatgtggcccaggaagatcaaccccatctttgatgaaaatgatgagctgattgaaaatgccaagcacaagaaggaaaatgagctgatggccaagcgggagaagctgatcctggagattgagaaggagagcaggaggatggaggagttcacagaatttgctgagctggagaggatgcagcagtatgtgacagatgtgcggcagctgcagaagaggatccaggagagcgaggaggccgtgcagttcatcaacaaggaggaggagctgttcaagtgggagctgaccaagtacccagagctggacaagctgaaggtgaacatcgagccctaccagaagttcttcaactttgtgctgaagtggcagaggtctgagaagcgctggatggatggcggcttcctggacctgaatggagagagcatggaggctgatgtggaggagttcagccgggagatcttcaagaccctgaagttcttccagaccaagctgaagaaggagctgcaggagaagaggaaggccgccaggaagaggagcctggaggaggagaagattgaggaggagcccaaggacaatgccaccatcaccatgtgcaggatgagggcccggcactggaagcagatcagcgagatcgtgggctatgacctgaccccagacagcggcaccaccctgaggaaggtgctgaagctgaacctgaccccctacctggagcagtttgaagtcatctctgctggggccagcaaggagttcagcctggagaaggccatgaacaccatgattggcacctgggaggacatcgccttccacatcagcctgtacagagacaccggggtgtgcatcctgagctctgtggatgagatccaggccatcctggatgaccagatcatcaagacccagaccatgaggggcagccccttcatcaagccctttgagcacgagatcaaggcctgggaggacaggctcatccgcatccaggagaccattgatgagtggctgaaggtgcaggcccagtggctgtacctggagcccatcttctgcagcgaggacatcatgcagcagatgcctgaggagggccggcagttccagacagtggacagacactggagggacatcatgaagttctgtgccaaggaccccaaggtgctggccgccaccagcctgaccggcctgctggagaagctgcagaactgcaatgagctgctggagaagatcatgaagggcctgaatgcctacctggagaagaagaggctcttcttcccccgcttcttcttcctgagcaatgatgagatgctggagatcctgtctgagaccaaggaccccctgcgggtgcagccccacctgaagaagtgctttgagggcatcgccaagctggagttcctgcccaacctggacatcaaggccatgtacagcagcgagggggagcgggtggagctgattgccctgatcagcaccagcgctgcccggggagctgtggagaagtggctgatccaggtggaggacctgatgctgcggtctgtgcatgatgtgattgctgctgcccggctggcctacccagagagcgcccggcgggactgggtgcgggagtggccaggccaggtggtgctgtgcatcagccagatgttctggaccagcgagacccaggaggtgatcagcggcggcacagagggcctgaagaagtactacaaggagctgcagaaccagctgaatgaaattgtggagctggtgcggggcaagctgagcaagcagaccaggaccaccctgggcgccctggtgaccattgatgtgcacgccagagatgtggtgatggacatgatcaagatgggcgtgtcccatgacacagacttcctgtggctggcccagctgcgctactactgggagaatgaaaatgcccgggtgcgcatcatcaactgcaatgtgaagtatgcctatgagtacctgggcaacagcccccggctggtgatcacccccctgacagaccgctgctaccgcaccctcatcggggccttctacctgaacctgggcggggcccctgagggccctgctggcaccgggaagacagagaccaccaaggacctggccaaggccctggccgtgcagtgtgtggtgttcaactgcagtgatggcctggactacctggccatgggcaagttcttcaagggcctggccagcagcggggcctgggcctgctttgatgagttcaaccgcatcgagctggaggtgctgtctgtggtggcccagcagatcctgtgcatccagagggccatccagcagaagctggtggtgtttgtgtttgagggcacagagctgaagctgaaccccaactgctttgtggccatcaccatgaaccctggctacgccggccgctctgagctgcctgacaacctgaaggtgctcttcagaacagtggccatgatggtgcccaactatgccctgattgctgagatcagcctgtacagctatggcttcctgaatgcccggcccctgtctgtgaagatcgtgatgacctaccgcctgtgcagcgagcagctgagcagccagttccactatgactatggcatgagagctgtgaaggctgtgctggtggccgccggcaacctgaagctgaagtacccaaatgaaaatgaagacatcctgctgctgcggagcatcaaggatgtgaatgagcccaagttcctgagccatgacatccccctcttcaacggcatcaccagtgacctcttccctggcatcaagctgcctgaggccgactaccacgagttcctggagtgtgcccacgaggcctgcaatgtgcacaacctgcagcctgtgaagttcttcctggagaagatcatccagacctatgagatgatgattgtgcgccacggcttcatgctggtgggggagccctttgctgccaagaccaaggtgctgcacgtgctggccgacaccctgaccctgatgaatgaacatggctatggagaggaggagaaggtgatctacagaacagtgaaccccaagagcatcaccatgggccagctgtttggccagtttgatcctgtgtcccatgagtggacagatggcatcgtggccaacaccttccgggagtttgccctgtctgagaccccagacaggaagtgggtggtgtttgatggccccatcgacaccctgtggattgaatccatgaacacagtgctggatgacaacaagaagctgtgcctgatgtctggagagatcatccagatgagcccccagatgagcctcatctttgagaccatggacctgagccaggccagccctgccaccgtgagccgctgtggcatgatctacctggagcccagccagctgggctgggagcccctggtgtcctcctggctgaacagcctgaagggccccctgtgtgagcctgagtaccaggccctgctgcggggcctgtttgcctggctgatcccccccagcctgaaccagagggtggagctgttccagctgaactacctgtacaccaccatcgtgtccaagatcctgaagatcctgatcaccttccgcatcagcaactacttcaagtatgtgcccctgaagacccagtgcaccttcatcaagttcttcctgcaccagcaggcctgcttcatcttcagcctcatctggagcattggaggcagctgtgacacagatggccggcgggtgtttgacaccttcatccgcctcatcatcctgggcaaggatgatgaaaatcctgtgcctgattctgtgggcaagtgggagtgcccctttgatgagaagggcctggtgtatgactacatgtatgagctgaagaacaagggccgctgggtgcactggaatgagctgatcaagaacaccaacctgggggacaagcagatcaagatccaggacatcatcgtgcccaccatggacaccatccgctacaccttcctgatggacctgagcatcacctacgccaagcccctgctgtttgtgggccccaccggcaccgggaagtctgtgtatgtgaaggacaagctgatgaaccacctggagaaggaccagtacttccccttctacatcaacctgagcgcccggaccagcgccaaccaggtgcagaacatcatcatggcccggctggacaagaggaggaagggcgtgtttggaccacccatgggcaagaagtgcatcatcttcattgatgacatgaacatgcctgccctggagaagtacggggcccagccccccatcgagctgctgcggcagttctttgactgtggccactggtatgacctgaaggacaccagcaagatcaccctggtggacatcgagctgattgctgccatgggccccccaggcggcggcagaaatcctgtgaccccccgctgcatccgccacttcaacatctgcagcatcaacagcttcagtgatgagaccatggtgcgcatcttcagcagcatcgtggccttctacctgcggacccatgagttccccccagagtactttgtgattggcaaccagatcgtgaatggcaccatggagatctacaagcagagcgtggagaacctgctgcccacccccaccaagagccactacaccttcaacctgcgggacttcagcagggtcatccggggctgcctgctgattgaaagagatgctgtggccaacaagcacaccatgatccggctgtttgtgcatgaggtgctgcgggtcttctatgacaggctcatcaatgatgatgaccggcgctggctgttccagctgaccaagacagtcatcaaggaccacttcaaggagagcttccacagcatcttcagccacctgaggaagcagaatgcccctgtgacagaggaggacctgaggaacctgatgtttggagactacatgaacccagacctggagggagatgacagagtgtacatcgagatccccaacatccaccacttcagtgatgtggtggaccagtgcctggatgagtacaaccagacccacaagaccaggatgaacctggtgatcttccgctacgtgctggagcacctgagccgcatctgccgggtgctgaagcagagcggcggcaatgccctgctggtgggcctgggcggcagcggccggcagagcctgacccggctggccacctccatggccaagatgcacatcttccagcctgagatcagcaagagctatggcatgaatgagtggagggaggacatgaagagcttcatcgctgtgcctgtgaccaaccgcatcgtggacaacaagagcaagatcctggagaagaggctgcgctacctgaatgaccacttcacctacaacctgtactgcaacatctgccgcagcctgtttgagaaggacaagctgctcttctccttcctgctgtgtgccaacctgctgctggccaggaaggagattgagtaccaggagctgatgttcctgctgaccggcggcgtgtccctgaagtctgctgagaagaacccagaccccacctggctgcaggacaagtcctgggaggagatctgccgggccagcgagttccctgccttccggggcctgcggcagcacttctgtgagcacatctatgagtggagggagatctatgacagcaaggagccccacaatgccaagtttcctgcccccatggacaagaacctgaatgagctgcagaagatcatcatcctgcgctgcctgcggccagacaagatcaccccagccatcaccaactacgtgacagacaagctgggcaagaagtttgtggagcccccaccatttgacctgaccaagagctacctggacagcaactgcaccatccccctcatctttgtgctgagccctggagctgaccccatggccagcctgctgaagtttgccaatgacaagtccatgagcggcaacaagttccaggccatcagcctgggccagggccagggccccatcgccgccaagatgatcaaggccgccatcgaggagggcacctgggtgtgcctgcagaactgccacctggccgtgtcctggatgcccatgctggagaagatctgtgaggacttcaccagcgagacctgcaacagcagcttccggctgtggctgaccagctaccccagcagcaagtttcctgtgaccatcctgcagaatggagtgaagatgaccaatgaaccacccaccggcctgcggctgaacctgctgcagagctacctgacagatcctgtgtctgaccctgagttcttcaagggctgccggggcaaggagctggcctgggagaagctgctgtttggagtgtgcttcttccacgccctggtgcaggagaggaagaagtttggccccctgggctggaacatcccctacggcttcaatgaaagtgacctgcgcatcagcatccggcagctgcagctgttcatcaatgaatatgacaccatcccctttgaggccatctcctacctgaccggggagtgcaactatggaggccgggtgacagatgactgggaccggcggctgctgctgaccatgctggccgacttctacaacctgtacatcgtggagaacccccactacaagttcagccccagcggcaactactttgccccacccaagggcacctatgaggactacatcgagttcatcaagaagctgcccttcacccagcaccctgagatcttcggcctgcatgaaaatgtggacatcagcaaggacctgcagcagaccaagaccctgtttgagagcctgctgctgacccagggcggcagcaagcagacaggagccagcggcagcacagaccagatcctgctggagatcaccaaggacatcctgaacaagctgcccagcgactttgacatcgagatggccctgaggaagtaccctgtgcgctatgaggagagcatgaacacagtgctggtgcaggagatggagcgcttcaacaacctgatcatcaccatccggaacaccctgcgggacctggagaaggccatcaagggcgtggtggtgatggacagcgccctggaggccctgagcggcagcctgctggtgggcaaggtgcctgagatctgggccaagaggagctaccccagcctgaagcccctgggcagctacatcacagacttcctggcccggctgaacttcctgcaggactggtacaacagcggcaagccctgtgtgttctggctgagcggcttcttcttcacccaggccttcctgaccggggccatgcagaactatgccaggaagtacaccacccccatcgacctgctgggctatgaatttgaagtcatccccagcgacaccagtgacaccagcccagaagatggagtgtacatccacggcctgtacctggatggagcccgctgggaccgggagagcggcctgctggccgagcagtaccccaagctgctgtttgacctgatgcccatcatctggatcaagcccacccagaagagccgcatcatcaagagtgatgcctacgtgtgccccctgtacaagaccagcgagaggaagggcaccctgagcaccaccggccacagcaccaacttcgtcatcgccatgctgctgaagacagaccagcccaccaggcactggatcaagaggggcgtggccctgctgtgccagctggatgactag

SEQ ID NO: 150629 - DNA, 2355 bp, synthetic construct
  misc_feature 1..2355: note = Description of Artificial Sequence: Synthetic coding sequence
  source 1..2355: mol_type = other DNA
atgtctgatgccaacaaggccgccatcgctgctgagaaggaggccctgaacctgaagctgccccccatcgtgcacctgcctgagaacatcggcgtggacacccccacccagagcaagctgctgaagtaccgccgcagcaaggagcagcagcagaagatcaaccagctggtgattgatggagccaagaggaacctggacaggaccctgggcaagaggacccccctgctgcccccaccagactacccccagaccatgaccagcgagatgaagaagaagggcttcaactacatctacatgaagcagtgtgtggagagcagccccctggtgcccatccagcaggagtggctggaccacatgctgcggctcatccctgagagcctgaaggagggcaaggagcgggaggagctgctggagagcctcatcaatgaggtgtccagtgactttgaaaattccatgaagcgctacctggtgcagagcgtgctggtgaagccccctgtgaagagcctggaggatgaaggaggccccctgcctgagagccctgtgggcctggactacagcaacccctggcacagcagctatgtgcaggccaggaaccagatcttcagcaacctgcacatcatccaccccaccatgaagatgctgctggacctgggctacaccacctttgctgacacagtgctgctggacttcaccggcatccgggccaagggccccatcgactgtgagagcctgaagacagacctgagcatccagaccagaaatgctgaggagaagatcatgaacacctggtaccccaaggtgatcaacctcttcaccaagaaggaggccctggagggcgtgaagccagagaagctggatgccttctacagctgtgtgtccaccctgatgagcaaccagctgaaggacctgctgcggaggacagtggagggctttgtgaagctgtttgaccccaaggaccagcagaggctgcccatcttcaagattgagctgacctttgatgatgacaagatggagttctaccccaccttccaggacctggaggacaacgtgctgagcctggtggagagaattgctgaggccctgcagaatgtgcagaccatccccagctggctgagcggcaccagcacccctgtgaacctggacacagagctgcctgagcacgtgctgcactgggccgtggacaccctgaaggctgctgtgcacaggaacctggagggcgccaggaagcactatgagacctacgtggagaagtacaactggctgctggatggaacagctgtggagaacatcgagaccttccagacagaggaccacacctttgatgagtacacagagttcatcgagaagttcctgagcctggccagcgagatcatgctgctgccccagtggatccactacaccatggtgcggctggactgtgaggacctgaagacaggcctgaccaacaaggccaaggcctttgccaacatcctgctgaatgacatcgccagcaagtacagaaaagaaaatgaatgcatctgcagcgagtttgaggccatcaaggagcacgccctgaaggtgcctgagaccacagaggagatgatggacctgatctcctatgtggagaaggccaggacagtgggcatcgaggagctgatcctgcgcatccaggagagcaagaggcagatgagctacttcctggatgtgttcctgttcccccaggaggacctggccctgaatgccaccgtgctgatgtggcccaggaagatcaaccccatctttgatgaaaatgatgagctgattgaaaatgccaagcacaagaaggaaaatgagctgatggccaagcgggagaagctgatcctggagattgagaaggagagcaggaggatggaggagttcacagaatttgctgagctggagaggatgcagcagtatgtgacagatgtgcggcagctgcagaagaggatccaggagagcgaggaggccgtgcagttcatcaacaaggaggaggagctgttcaagtgggagctgaccaagtacccagagctggacaagctgaaggtgaacatcgagccctaccagaagttcttcaactttgtgctgaagtggcagaggtctgagaagcgctggatggatggcggcttcctggacctgaatggagagagcatggaggctgatgtggaggagttcagccgggagatcttcaagaccctgaagttcttccagaccaagctgaagaaggagctgcaggagaagaggaaggccgccaggaagaggagcctggaggaggagaagattgaggaggagcccaaggacaatgccaccatcaccatgtgcagcacagtgatggagcagatcaaggccttcaaggtgtag

SEQ ID NO: 150630 - DNA, 687 bp, synthetic construct
  misc_feature 1..687: note = Description of Artificial Sequence: Synthetic coding sequence
  source 1..687: mol_type = other DNA
atggagaccttcatccccatcgacctgaccacagagaaccaggagatggacaaggaggagaccaagaccaagccccggctgctgcgctatgaggagaagaagtatgaagatgtgaagcccctggagacccagcctgctgagattgctgagaaggagaccctggagtacaagacagtgaggaccttcagcgagagcctgaagtctgagaagacagaggactacctgcgggagagcatcatccagcagcacatggtgtccccagagcccgccagcctgaaggagaagggcaagagcaggaggaagaaggaccagacccacgcctgccccaacgtgaggaaggcccggcctgtgtcctatgacagaacagagcccaaggatgatgatgtgatccggaacatcatccggctgcgggagaagctgggctggcagaccatcctgccccagcacagcctgaagtatggcagcagcaagatcgccatccagaagatcaccctgaagaagcccctggaggatgatggagaatttgtgtactgcctgcccaggaagagccccaagagcctgtacaacccctatgacctgcaggtggtgtctgcccacacagccaagcactgcaaggagttctgggtgatcacagccagcttcatcagcaagcgctacctggtgatctgtggggctgtgtacatctag

SEQ ID NO: 150631 - DNA, 687 bp, synthetic construct; identical to SEQ ID NO: 150630
  misc_feature 1..687: note = Description of Artificial Sequence: Synthetic coding sequence
  source 1..687: mol_type = other DNA

SEQ ID NO: 150632 - DNA, 1362 bp, synthetic construct
  misc_feature 1..1362: note = Description of Artificial Sequence: Synthetic coding sequence
  source 1..1362: mol_type = other DNA
atggagaccttcatccccatcgacctgaccacagagaaccaggagatggacaaggaggagaccaagaccaagccccggctgctgcgctatgaggagaagaagtatgaagatgtgaagcccctggagacccagcctgctgagattgctgagaaggagaccctggagtacaagacagtgaggaccttcagcgagagcctgaagtctgagaagacagaggactacctgcgggagagcatcatccagcagcacatggtgtccccagagcccgccagcctgaaggagaagggcaagagcaggaggaagaaggaccagacccacgcctgccccaacgtgaggaaggcccggcctgtgtcctatgacagaacagagcccaaggatgatgatgtgatccggaacatcatccggctgcgggagaagctgggctggcagaccatcctgccccagcacagcctgaagtatggcagcagcaagatcgccatccagaagatcaccctgaagaagcccctggaggatgatggagaatttgtgtactgcctgcccaggaagagccccaagagcctgtacaacccctatgacctgcaggtggtgtctgcccacacagccaagcactgcaaggagttctgggtgatcacagccagcttcatcagcaaggtgatcaacatcgtgggctctgtgaaggaggtggagctgatccccaccctggagtggctgtctgagcggcggcactactacctgctgcggcagttcaagatcttcagtgacttcaggatgaacaaggcctttgtgacctggaagctgaatgtgaagaggatcaagacagagaagagccgctccttcctgtaccaccacctgttcctggctgatgacctcttccagacctgcctggtgtacatccggggcctgtgtgaagatgccatcaacctgaagaactacaatgaccacgagaacaacctgagcgccatctgcctggtgaagctggacagcagcaggacctacagcctggatgagttctgtgaggagcagctgcagcaggccacccaggccctgaagcagctggaggacatccggaacaaggccatcagcgagatgaagagcaccttcctgaaggtggccgagaagaatgagatcaaggagtactttgagagcaagctgtctgaagatgacaccacccacttcaagctgcccaagtaccgccgcctgctggagaccttcttcaagtttgtgatgctggtggactacatcttccaggagctgatccggcagctgatgaacacagctgtgaccctgctgctggagctgttcaatggatctgctggcatgcccttctctgtggagaagaagaatgaaaatctcatcagatag

SEQ ID NO: 150633 - DNA, 13548 bp, synthetic construct
  misc_feature 1..13548: note = Description of Artificial Sequence: Synthetic coding sequence
  source 1..13548: mol_type = other DNA
atggagaccttcatccccatcgacctgaccacagagaaccaggagatggacaaggaggagaccaagaccaagccccggctgctgcgctatgaggagaagaagtatgaagatgtgaagcccctggagacccagcctgctgagattgctgagaaggagaccctggagtacaagacagtgaggaccttcagcgagagcctgaagtctgagaagacagaggactacctgcgggagagcatcatccagcagcacatggtgtccccagagcccgccagcctgaaggagaagggcaagagcaggaggaagaaggaccagacccacgcctgccccaacgtgaggaaggcccggcctgtgtcctatgacagaacagagcccaaggatgatgatgtgatccggaacatcatccggctgcgggagaagctgggctggcagaccatcctgccccagcacagcctgaagtatggcagcagcaagatcgccatccagaagatcaccctgaagaagcccctggaggatgatggagaatttgtgtactgcctgcccaggaagagccccaagagcctgtacaacccctatgacctgcaggtggtgtctgcccacacagccaagcactgcaaggagttctgggtgatcacagccagcttcatcagcaaggtgatcaacatcgtgggctctgtgaaggaggtggagctgatccccaccctggagtggctgtctgagcggcggcactactacctgctgcggcagttcaagatcttcagtgacttcaggatgaacaaggcctttgtgacctggaagctgaatgtgaagaggatcaagacagagaagagccgctccttcctgtaccaccacctgttcctggctgatgacctcttccagacctgcctggtgtacatccggggcctgtgtgaagatgccatcaacctgaagaactacaatgaccacgagaacaacctgagcgccatctgcctggtgaagctggacagcagcaggacctacagcctggatgagttctgtgaggagcagctgcagcaggccacccaggccctgaagcagctggaggacatccggaacaaggccatcagcgagatgaagagcaccttcctgaaggtggccgagaagaatgagatcaaggagtactttgagagcaagctgtctgaagatgacaccacccacttcaagctgcccaagtaccgccgcctgctggagaccttcttcaagtttgtgatgctggtggactacatcttccaggagctgatccggcagctgatgaacacagctgtgaccctgctgctggagctgttcaatggatctgctggcatgcccttctctgtggagaagaagaatgaaaatctcatccgcaccttcaaggacaacagcttccccaccgggaagaccaccaatgactgtgaggagctggtggacaacagcaagctgcacgccatctctgtgcagaagtctgaggtgaagacagacacagacatcaatgagatcctgaacagcgtggaggtgggcaaggacctgaggaagacctacgcccccatctttgaggtgaacctgtgcctgcgcatcccagctgagagtgacagcagcgagaacagcaaagaaaacttccacgagagtgaccagtgcccagaggagtgtgtgatgtttgaagatgagatgtctgagaacaaggacaactgtgtgaagaagcacagcagcgaggagctgctgcccaaggccaagaagagcaaggagatctcctacaacctggaggacatcatcagtgacacagaaattgaaacagaatttgagaacaagtacatgtactatgagttccctgagttccccaccaacctcttcatcgaccccaaccggctggagttctctgtgaagatccagaacatgctgaccaacatggagaagtgcatcaccaccatcacccccctgtgccaggacccccagctgagcatcttcatcgacctggtgtccatcatggacctgcccaacaagacaggcagcatcatccactacaaggagcagacccgctggccagactgccacatcctgtttgaaacagatcctgcctaccagaacatcatcgtgaacctgctgaccatcatcggcaacagcatgggcctggtgaatgcctacagccacaagttcatcaagtactgcaccatgacagagaaggccaagatcatgtccatgaagatcagctccatgggagagctgaccagcaaggagtttgaggccatcctgaaccgcttcaggaactacttccgccacatcgtgaacatggccatcgagaagagaattggcatcttcaacgtggtgtccctggactaccagagtgaatgtctgctgtacatcgacaacgtcatccacatgagccacaccctcatccagagcgtgattgagaagaagaacaagaacctgctggaggtggtggagagcagcctgcagcagctggagtgtgaccccacagaaattgaggagttcctggagcacttcatcttcctgaatgccatcagcagcaagatcagcaagctggagaaggagttcctgaccatgagccagctgtacagcgtggccaagcaccaccagatccacatcagcgaggagcagatcgccatcttccaggtgctgctgctgaagttcagccagctgaagagctccatgaagctgagcaagatcaacaaggacacagccatcaccaagttccgggacaacctggaggcctgcatcagcggcctgcacgtggatgtgggcaacctgaaggccaagatccgcacccccctgctgctgtgtgccggcacccaggtgtccacagccatggagatgatccagaccctgagcggggaggccgccagcctgaccaacaaggccaaggcctacagccactaccaggactgcttcagtgacagccagagccacatgcacagcgtgaatgtggaggagatcacccagatcgtgctgtctgagatcagtgacatcgagggggacctgaccctgaggaagaagctgtgggaggcccaggaggagtggaagagggcctcctgggagtggaggaacagcagcctgcagagcattgatgtggagagcgtgcagagaaatgtgtccaagctgatgcacatcatctctgtgctggagaagggcctgcccaagagtgacatggtgacccacctgaagcaggtggtgacagagttcaagcaggagctgcccatcatcatcgccctgggcaacccctgcctgaagcccaggcactgggaggccctgcaggagatcatcggcaagtctgtgcccctggacaagaactgcaaggtggagaacctgctggccctgaagatgttccagtatgaaaatgagatcaatgacatgagcaccagcgccaccaatgaggccgccctggagaagatgctgttcaagatcatcgacttctggaacaccacccccctgcccctcatcctgcaccacacagagatctacagcatcttcatcatccccagcattgatgacatcagcgcccagctggaggagagccaggtgatcctggccaccatcaagggcagcccccacatcggccccatcaaggacctggtgaatgagtgggaccagaacctgaccctcttctcctacaccctggaggagtggatgaactgccagaggaactggctgtacctggagcctgtgttccacagcagcgagatccggcggcagctgcctgctgagacagagctgttcagccaggtgatctccatgtggaagaagatcatgagcaagatccagaacaagcagaatgccctgcagatcaccaccagcgctggggtgctggagatcctgcagaactgcaacatccacctggagcacatcaagaagagcctggaggactacctggaggtgaagaggctcatcttcccccgcttctacttcctgagcaatgctgagctgctggacatcctggccgacagcaggaaccctgagagcgtgcagccccacctggtgaagtgctttgagaacatcaagcagctgctgatctggaagcaggacatcggccccccagctgtgaagatgctgatctctgctgagggggagggcctggtgctgcccaagaagatccgggtgcgctctgctgtggagcagtggctggtgaatgtggagaagtccatgtttgatgtgctgaagaaggagcgctacatctacaacatcatcctgctcttccagagccagatcatgttctacaatgactgtgtgaagagctttgtgtcctcctacagccgggagaagctggagaaggtgcacgccggcctgatgtgccacctggaggaggtggccgacctggtggtgctggacaccagcaacagcaggaccaaggccatcctgggcgccctgctgatcctgtatgtgcactgccgggacatcgtcatcaacctgctgctgaagaacatcttcaatgctgaggactttgagtggaccaggcacctgcagtacaagtggaatgagaagcagaagctgtgctacgtgtcccagggcaatgccagcttcacctacggctatgagtacctgggctgcaccagccggctggtgatcacccccctgacagaccgctgctggctgaccctgatggaggccctgcacctgaacctgggcggctgcccagctggccctgctggcaccgggaagacagaaacagtgaaggacctggccaagagcctgggcaagcactgtgtggtgttcaactgctttgaggacctggactacaagatcgtgaggaagttcttcttcggcctggtgcagagcggggcctggagctgctttgatgagttcaacctgattgacctggaggtgctgtctgtgattgccagccagatcctgaccatcaaggccgccaaggacaactacagcgccaggtttgtgctggagggcaaggagatccgcatcaacatgagctgtgctgtgttcatcaccatgaaccccaggtatggaggcggcgtggagctgcctgacaacctgaagagcctcttccggcctgtggccatgatggtgccccactaccagatgattgctgagatcatcctcttctcctttggcttcaagagcgccaacagcctgagcggcaagctgaccaacctgtatgagctggccaggaagcagctgagccagcaggaccactacaactttggcctgcggagcctgaagatcgtgctgatcatggccggcaccaagaagcgggagttcaagtgcctgtctgaggctgatgagaccctcatcgtcatcgaggccatccgggaggccagcctgcccaagtgccccccagaagatgtgcccctgtttgagaacatcattggagacatcttccctgaggtgacagtgctgaaggtgaaccagctggccctggagaaggtgatctacacagccacccagcagctgggcctgcagaactggagcagccagaaggagaagatcatccagttctacaaccagctgcaggtgtgtgtgggcgtgatgctggtgggccccaccggcggcggcaagaccaccgtgcggcgcatcctggagaaggccctgaccctgctgcccatcgctgacttcctgtctgtggccgagaggaagagcgccagcaagatcagcgagaggaagggcaaggtggacatctgtgtgctgaaccccaagtgtgtgaccctgtctgagctgtatggccagctggaccccaacaccatggagtggacagatggcctgctgagcgccaccatccgctcctatgtgtacttcaacacccccaagaacaccaagaaggacatcgacctgcggctgaagagccgcatcagtgacctgagcaatgtgttcaagctggacagcagtgacaccacagaaacagatgacaacatctttgaggagattgagaaggtggtgaagatccctgagaaccacaactttgactggcagtggatcatcctggatggccctgtggacaccttctgggtggagaacctgaacagcgtgctggatgacaccaggaccctgtgcctggccaacagcgagagaattgccctgaccaacaagatccgggtcatctttgaggtggacaacctgagccaggccagccctgccaccgtgagccgctgtgccatggtgtacatggaccctgtggacctgggctgggagccctacgtgaagtcctggctgctgaagaccagcaagatcatcagccagagcggcgtggactgcctggagttcatgatcaagaacagcgtgacagatggcctgcagttcatccggaaccggcagaagttccagccctaccccatggaggacatcaccgtggtgatcaccctgtgccgcatcctggatgccttctttgacttcatgggcaagaatggaggctttgagcagagtgatgacctgaatgacaccagcagcaaggaggccaacagccagcgggagagcgtgaccttcaaggacatcgagaagagagatgagaacacctggtacccagagaagaacccagacaagctgaccaagatcatccagaagctgtttgtgtttgccttcacctgggcctttggaggagccctgaaccgggaggatgagcaccgggagaacatccccttctgccccagcctggagccagacagcctggccaaggtgacctatgactttgacaagctggtgcatgagctgtttggaaacagcagccaggtgggctggaagcactggggccagagccagggcagaagaagaaaaggaaactgcatcaacctgcccactggagaatgttccatcttcggctactttgtggacatcgagcagtgtgagttcatcccctggagcgacctggtgcccaatgaccagaccctcatccagaggggcaccagcctgctgaccaacctgcagaggtctgggggcaacttcctgaagatcacagaatgtggggagtgcatcaactacacagccacccgggacaccacctgcctgtccttcctgatgagcctgctgctgaagaacagctgccctgtgctgctgactggagagagcggcgtgggcaagacagctgccatcaaccagatgctggagaagctggagggccctggggcctttgacatcaagcacggcagcatcctgggggacaccctgctgtacagcgagatcaagaagagcagcagcctgaagcagaacatcaccatcctgatccctgagacccacaagacagccaccggcagcagtgacaaccccaccaagaagccagaggtgaggaccaacaagaagctgctgaagaacaatgaccacaagggcgtggtggtgtccaccatcaacttcagcaccaacgtgacagctgccaagaccaaggagatgatcctgaagaagctgatccggaggaccaaggacaccctgggcgcccccaagaacaaccgcatcctgatcttcattgatgacatgaacatgcctgtgtctgacatgtacggggcccagccccccctggagctgatccggcagctgctggacctgggcggcgtgtatgacacagagaagaacacctggaagaacatccaggacctgagcatcgtggccgcctgtgtgcctgtggtgaatgacatcagcccccggctgctgaagcacttctccatgctggtgctgccccaccccagccaggacatcctgtgcaccatcttccaggcccacctgggcatctacttcagcatcaacaacttcaccccagaggtgcagaagagcaaggaccagatcatcagctgcagcctggccatctaccaccaggtgcggcagaacatgctgcccacccccaccaagtgccactacatgttcaacctgcgggacatgttcaagctgctgctgggcctgctgcaggccgacagaacagtggtgaacagcaaggagatggccgccctgctgtttgtgcatgaggccaccagggtcttccatgaccggctgattgacttcacagacaagagcctcttctaccgcctgctgagccgggagctggagaactgcttccagattggaattgatggctgtgggaagaagacctgtgccaccctggcctgctacctgacagacaacaagctgtacagagtgcccatcagccacaagtgtgcctacatcgagttcaaggaggtgttcaagaaggtgttcatccacgccggcctgaagggcaagcccaccgtgctgatggtgcccaacctgaacatcgagcaggacagcttcctggaggacctgaactacatcatcagcagcggccgcatcccagacctgtttgaaaatgtggagctggacagcatcgccatgaagatccgctacctgacagagcagagcggccacatggacaaccggcagagcctgctgtccttcttccagaagaggatctacaagaacctgcacatctttgtgatcatgagccctgagggccccagcttccggcagaactgccgggtgtaccccagcatgatcagcagctgcaccatcgactggtatgagcgctggccagaggaggccctgctgattgtggccaacagcttcctgaaggagaaggtgaactttgaaaatcgggagaacctgaaggagaagctggcccccacctgtgtgcagatccacaagtccatgaaggacctgaacaggaagtactttgaggagaccggccgcttctactacaccacccccaacagctacctgcagttcatggagacctttgcccacatcctgcgggcccgggaggaggagatgcagaccaagagggaccgcttccacatgggcctgagcaccatcctggaggccaccaccctggtgacagagatgcaggaggagctgctgatcctgggcccccaggtggagcagaagaccaaggagacagagaccctgatggagaagctgaggaaggacagccaggtggtggagaaggtgcagatgctggtgaagcaggatgaggagatcgtggccgaggaggtgagaattgtggaggactatgcccagaagacagccaatgagctgaagtctgtgctgcctgcctttgacaaggccatcgtggccctgaatgccctggacaaggcagatgtggccgagctgcgggtgtacacccggccccccttcctggtgctgactgtgatgaatgctgtgtgcatcctgctgcagaagaagcccaactgggccacagccaagctgctgctgtctgaaacaggcttcctgaagaagctgatcaacctggacaaggacagcatcccagacaaggtgtttgtgaagctgaagaagatcgtgaccctgcctgacttcaacccccacaagatcagcctggtgtctgtggcctgctgcagcctgtgccagtgggtgattgccctgaacaactaccacgaggtgcagaaggtggtgggccccaagcagatccaggtggccgaggcccagaatgtgctgaagatcgcccggcagaggctggccgagaagcagaggggcctgcagctggtggaggagcacctgctcttcctgcaggccgcctacaaggacacagtggccgagaagcagctgctggccaacaggaagaccatggccagccgccgcttccagtgtgcctctgtgctgctgactgtgctggaggatgagaagacccgctggcaggagaccatcaaccagattgacaacaagctggagggcatcctgggggacatcctgctgtctgctgcctgcatcgtgtacagcggcatcctgaccccagagttccggcagctgattgtgaacaagtgggagaccttctgcattgaaaatggcatcagcctgagcagcaagttcagcctcatcaaggtgatggcccagaagtatgagatcagccgctggcacaaccagggcctgccccacggccagtacagcgtggagaatgccatcctgatcaagaatggccagcagtggcccctgctgattgacccccaccggcaggcccacaagtggatccggcagatggagggcagccggctgcagaagctgagcattgaggacagcaactacaccaagaagattgaaaatgccatgaagacaggaggctctgtgctgctgcagaacctgctggagaccctggcccctggcctgaaggccatcctgaagaaggacatctaccagaagaagggccactacttcatccgggtgggagatgctgagtttgagtacaacagcaacttccggctgtacctgagcacagaaattgacaacccccacttcctgcccagcgtgtacaactttgtgaccatgatcaacttcaccgtgaccttccagggcctgcaggaccagctgctgagcacagtggtgacccatgaggtgccccacctggaggaccagaggagcaagctgctggagagcatcagcctggatgccatcaccctggaggagctggaggagaagaccctgaacctgctgcagaaggccctgggcagcatcctggatgatgacaagatcgtggacaccctgaggaagagcaagatgaccagcaatgagatcagcaagagaattgaggccaccaagaaggccgagagcgagatccaggccatcaggaagaactacctgcccatcgccaccaggggggccctgctgtacttcctggtggccgacctgacccagatcaactacatgtaccagttcagcctggactggttccaccaggtgtttgtgtcctctgtggtgtccaagagcaaggagcaggagcacagcttcaagcgggagaaggtgagccccaaggaggtgcatgagttcatcagcatcagcaaggagcccaacctggagaatgagaagaacctgctggacaagcacatcaagagcgccatcgacatgctgaccaagagcatcttcaaggtggtgagcagcgccctcttcaatgaagacaagctgtgcttctccttccggctgtgcaccgtcatcatgcagaacaatgccaacggcaacctgatccaggatgacatcggcttcctgcctgaggaggagtggaacatcttcctgtacagcggcatcctgatcaacatcaagagcgccctgagccagagccggctgaccagcacctttgaaattggagagagccagcacctgcagtggctgagtgacagccgctggaggcagtgccagtatgtgtccacccacctggagcccttcagcctgctgtgcaagagcctgctgagcaatgtgtcccagtgggacaccttcaagaacagcaaggctgtgtacagcctcatcagcacccccttcagcagtgaaaatgccagcctggaggagaacaccaagcccccagaggagacagagctgctgaatgaaaacaaggagacctgcaaccccatcaacttcccctgggagaagctgaccagcttccagaggctcatcctggtgaaggtgctgcggcctgagagcctgaacaacagcgtgaggaagttcatcacagagaagatgggcaacaagtacctgcagaggactggagtgaacctgaaggatgcctacaagggcagcaatgcccggacccccctcatcctgatccagacccacggcatcgacctgaccaacatcctgctgcgctttgcccaggagctgaagggcaccacccaccacgtgaccatcatcagcctgggccgggaccaggccgccaaggccgaggacctgatcctgaaggccctgaccaagacccagcagtgggtgttcctgcagaactgccacctggccaccagcttcatgccccggctgtgcaccatcgtggagagcttcaacagccccaacgtgaccattgatcctgagttccggctgtggctgagcagcaagagctacagcagcttccccatccctgtgctgaagaagggcctgaagattgctgtggagagcccccagggcctgaagagcaacctgctgcagaccttcggctgcaccggcagcggggaggtgacagaggagatctttgagaacccagactgtggccagtggtggaagaagctgctcttcagcctgtgcttcttcaatgctgtgatcaatgaaaggaagaactacggcatcctgggctggaacatcgcctacaagttcaacagcagtgacctgggcgtggccatcaaggtgctggagaacagcctgcggggccagcccagcatctcctggcaggccctgcgctacctgattggagaggtgatctatggaggccgggtcatcgacaactgggacaagcgctgcctgaagaccctgctgtacaagttctgcaaccctgaggtgctgaaggatgacttctccttcagccgcagcgccagcatcaaggactacatccacatcatccagagcctgcctgatgatgacctgcctgaggtgctgggcatccaccctgaggccatccgcagctgctgggagacccagggcgagaagttcatcgagaacctgattgccatgcagcccaagaccaccacagccaacctgatgatccggcctgagcagagcaaggatgagctggtgatggagatcctgagtgacctgctgaagaggctgcccctgactgtggagaaggaggagattgctgtgggcacccccagcaccctgaagtccatgatgagcagcagcatctgggagagcctgagcaagaacctgaaggaccatgaccccctcatccactgtgtgctgctgaccttcctgaagcaggagatcaagagatttgacaagctgctgtttgtgatccacaagagcctgaaggacctgcagctggccatcaagggggagatcatcctgacccaggagctggaggagatcttcaacagcttcctgaacatgagggtgcccaccctgtggcagaagcacgcctaccgcagctgcaagcccctgagctcctggattgatgacctgatccagaggctgaacttcttcaacacctgggccaaggtggcctacacagccatccagaggcgctacatgagatttgtgacagtgtggaagcagagcatccccagcaccagccagaagtgcaagcaccctgaggacagcgagaacaacttctttgagggcttccccagccgctactggctgcctgccttcttcttcccccaggccttcctggccgctgtgctgcaggactatggccgcagccggggcattgctgtggatgccctgaccttcacccaccacgtgatcagcaacaccacagacaaggatgagaagttcagcgtcttcatgcccaagaagctgaacatcgtgagaagagccttcaagggcagcgccagcagccacactggagtgtacatcttcggcctcttcattgaaggagcccgctggaaccgggagcagaagatcctggaggacagcctgcccctggagatgtgctgtgacttcccagacatctacttcctgcccaccaagatcagcaccaagaccccaaatgccagcaaccagacagacagcgagctgtatgcctttgagtgccctgtgtaccagaccccagagaggagccgcatcctggccaccaccggcctgcccaccaacttcctgacctctgtgtacctgagcaccaagaagccacccagccactggatcaccatgagggtggccctgctgtgtgagaagaatgagaagtag

SEQ ID NO: 150634 - DNA, 13548 bp, synthetic construct; identical to SEQ ID NO: 150633
  misc_feature 1..13548: note = Description of Artificial Sequence: Synthetic coding sequence
  source 1..13548: mol_type = other DNA

SEQ ID NO: 150635 - DNA, 10524 bp, synthetic construct
  misc_feature 1..10524: note = Description of Artificial Sequence: Synthetic coding sequence
  source 1..10524: mol_type = other DNA
atgggcagaagaagccagtggatctgggccatgcgctgccagatgctggtgcctgtgctgagcctgcacatcggcctggcccgggccctgggctgcggctgcatcgccagcaagattgagtgcctgatccgctgcaatgcccccttccccctgctggatgctgtgggctctgtggccagccaggagctgcagagcctgactggaacagtgggcgtgaccagcggggctgctgcctacccccgctggaacctggcccgggcccgggccccaccccacctgcccggcacccaggaccccctgcggcgggtgcgggaccccacccccatcgtggccagcagccctggaagaagaagaggctcctggagcggcggctacggccaggaggccagcgagcccggggtggtgggcctgtgctgtgctgtgctgcccatccaccccagcctggccctggccggcgtgggcggccctgacctgcggcgcttccaggagggcccccagaggcccagcgaccatggagctgctgagaagcacatggagaccttcatccccatcgacctgaccacagagaaccaggagatggacaaggaggagaccaagaccaagccccggctgctgcgctatgaggagaagaagtatgaagatgtgaagcccctggagacccagcctgctgagattgctgagaaggagaccctggagtacaagacagtgaggaccttcagcgagagcctgaagtctgagaagacagaggagcccaaggatgatgatgtgatccggaacatcatccggctgcgggagaagctgggctggcagaccatcctgccccagcacagcctgaagtatggcagcagcaagatcgccatccagaagatcaccctgaagaagcccctggaggatgatggagaatttgtgtactgcctgcccaggaagagccccaagagcctgtacaacccctatgacctgcaggtggtgtctgcccacacagccaagcactgcaaggagttctgggtgatcacagccagcttcatcagcaagctggacagcagcaggacctacagcctggatgagttctgtgaggagcagctgcagcaggccacccaggccctgaagcagctggaggacatccggaacaaggccatcagcgagatgaagagcaccttcctgaaggtggccgagaagaatgagatcaaggagtactttgagagcaagctgtctgaagatgacaccacccacttcaagctgcccaagtacagaaggctgctggagaccttcttcaagtttgtgatgctggtggactacatcttccaggagctgatccggcagctgatgaacacagctgtgaccctgctgctggagctgttcaacggcagcgctggcatgcccttctctgtggagaagaagaatgaaaacctgatccgcaccttcaaggacaacagcttccccaccgggaagaccaccaatgactgtgaggagctggtggacaacagcaagctgcacgccatctctgtgcagaagtctgaggtgaagacagacacagacatcaatgagatcctgaacagcgtggaggtgggcaaggacctgaggaagacctacgcccccatctttgaggtgaacctgtgcctgcgcatcccagctgagagtgacagcagcgagaacagcaaggagaacttccatgaaagtgaccagtgcccagaagaatgtgtgatgtttgaagatgagatgtctgagaacaaggacaactgtgtgaagaagcacagcagcgaggagctgctgcccaaggccaagaagagcaaggagatctcctacaacctggaggacatcatcagcgccaccatcacccccctgtgccaggacccccagctgagcatcttcatcgacctggtgtccatcatggacctgcccaacaagacaggcagcatcatccactacaaggagcagacccgctggccagactgccacatcctgtttgaaacagatcctgcctaccagaacatcatcgtgaacctgctgaccatcatcggcaacagcatgggcctggtgaatgcctacagccacaagttcatcaagtactgcaccatgacagagaaggccaagatcatgtccatgaagatcagctccatgggagagctgaccagcaaggagtttgaggccatcctgaaccgcttcaggaactacttccgccacatcgtgaacatggccatcgagaagagaattggcatcttcaacgtggtggtggagagcagcctgcagcagctggagtgtgaccccacagaaattgaggagttcctggagcacttcatcttcctgaatgccatcagcagcaagatcagcaagctggagaaggagttcctgaccatgagccagctgtacagcgtggccaagcaccaccagatccacatcagcgaggagcagatcgccatcttccaggtgctgctgctgaagttcagccagctgaagagctccatgaagctgagcaagatcaacaaggacacagccatcaccaagttccgggacaacctggaggcctgcatcagcggcctgcacgtggatgtgggcaacctgaaggccaagatccgcacccccctgctgctgtgtgccggcacccaggtgtccacagccatggagatgatccagaccctgagcggggaggccgccagcctgaccaacaaggccaaggcctacagccactaccaggactgcttcagtgacagccagagccacatgcacagcgtgaatgtggaggagatcacccagatcgtgctgtctgagatcagtgacatcgagggggacctgaccctgaggaagaagctgtgggaggcccaggaggagtggaagagggcctcctgggagtggaggaacagcagcctgcagagcattgatgtggagagcgtgcagagaaatgtgtccaagctgatgcacatcatctctgtgctggagaaggagatctacagcatcttcatcatccccagcattgatgacatcagcgcccagctggaggagagccaggtgatcctggccaccatcaagggcagcccccacatcggccccatcaagagccagatcatgttctacaatgactgtgtgaagagctttgtgtcctcctacagccgggagaagctggagaaggtgcacgccggcctgatgtgccacctggaggaggtggccgacctggtggtgctggacaccagcaacagcaggaccaaggccatcctgggcgccctgctgatcctgtatgtgcactgccgggacatcgtcatcaacctgctgctgaagaacatcttcaatgctgaggactttgagtggaccaggcacctgcagtacaagtggaatgagaagcagaagctgtgctacgtgtcccagggcaatgccagcttcacctacggctatgagtacctgggctgcaccagccggctggtgatcacccccctgacagaccgctgctggctgaccctgatggaggccctgcacctgaacctgggcggctgcccagctggccctgctggcaccgggaagacagaaacagtgaaggacctggccaagtgtgccctgtttgccttcaagtgcaacacagccctgatcaagctgcccaacagcctgattgtgctgacctgcttcggcctggagaagacagtgctggtgatgaacacagtgatgtccttccgctttgtgctggagggcaaggagatccgcatcaacatgagctgtgctgtgttcatcaccatgaaccccaggtatggaggcggcgtggagctgcctgacaacctgaagagcctcttccggcctgtggccatgatggtgccccactaccagatgattgctgagatcatcctcttctcctttggcttcaagagcgccaacagcctgagcggcaagctgaccaacctgtatgagctggccaggaagcagctgagccagcaggaccactacaactttggcctgcggagcctgaagatcgtgctgatcatggccggcaccaagaagcgggagttcaagtgtgacaccagtgacagcctgtctgaggctgatgagaccctgattgtgattgaggccatccgggaggccagcctgcccaagtgccccccagaagatgtgcccctgtttgagaacatcatcggggacatcttccctgaggtgacagtgctgaaggtgaaccagctggccctggagaaggtgatctacacagccacccagcagctgggcctgcagaactggagcagccagaaggagaagatcatccagttctacaaccagctgcaggtgtgtgtgggcgtgatgctggtgggccccactggaggcggcaagaccaccgtgcggcgcatcctggagaaggccctgaccctgctgcccatcgctgacttcctgtctgtggccgagaggaagagcgccagcaagatcagcgagaggaagggcaaggtggacatctgtgtgctgaaccccaagtgtgtgaccctgtctgagctgtatggccagctggaccccaacaccatggagtggacagatggcctgctgagcgccaccatccgctcctatgtgtacttcaacacccccaagaacaccaagaaggacatcgacctgcggctgaagagccgcatcagtgacctgagcaatgtgttcaagctggacagcagtgacaccacagaaacagatgacaacatctttgaggagattgagaaggtggtgaagatccctgagaaccacaactttgactggcagtggatcatcctggatggccctgtggacaccttctgggtggagaacctgaacagcgtgctggatgacaccaggaccctgtgcctggccaacagcgagcgcatcgccctgaccaacaagatccgggtcatctttgaggtggacaacctgagccaggccagccctgccaccgtgagccgctgtgccatggtgtacatggaccctgtggacctgggctgggagccctacgtgaagtcctggctgctgaagaccagcaagatcatcagccagagcggcgtggactgcctggagttcatgatcaagaacagcgtgacagatggcctgcagttcatccggaaccggcagaagttccagccctaccccatggaggacatcaccgtggtgatcaccctgtgccgcatcctggatgccttctttgacttcatgggcaagaatggaggctttgagcagagtgatgacctgaatgacaccagcagcaaggaggccaacagccagcgggagagcgtgaccttcaaggacatcgagaagagagatgagaacacctggtacccagagaagaacccagacaagctgaccaagatcatccagaagctgtttgtgtttgccttcacctgggccttcggcggggccctgaacagagaagatgagcaccgggagaacatccccttctgccccagcctggagccagacagcctggccaaggtgacctatgactttgacaagctggtgcatgagctgtttggaaacagcagccaggtgggcatcaacctgcccaccggggagtgcagcatcttcggctactttgtggacatcgagcagtgtgagttcatcccctggagcgacctggtgcccaatgaccagaccctcatccagagggacaaccccaccaagaagccagaggtgaggaccaacaagaagctgctgaagaacaatgaccacaagggcgtggtggtgtccaccatcaacttcagcaccaacgtgacagctgccaagaccaaggagatgatcctgaagaagctgatccggaggaccaaggacaccctgggcgcccccaagaacaaccgcatcctgatcttcattgatgacatgaacatgcctgtgtctgacatgtacggggcccagccccccctggagctgatccggcagctgctggacctgggcggcgtgtatgacacagagaagaacacctggaagaacatccaggacctgagcatcgtggccgcctgtgtgcctgtggtgaatgacatcagcccccggctgctgaagcacttctccatgctggtgctgccccaccccagccaggacatcctgtgcaccatcttccagatcggcattgatggctgcggcaagaagacctgtgccaccctggcctgctacctgacagacaacaagctgtacagagtgcccatcagccacaagtgtgcctacatcgagttcaaggaggtgttcaagaaggtgttcatccatgctggcctgaagggcaagcccaccgtgctgatggtgcccaacctgaacatcgagcaggacagcttcctggaggacctgaactacatcatcagcagcggccgcatcccagacctgtttgaaaatgtggagctggacagcatcgccatgaagatccgctacctgacagagcagagcggccacatggacaaccggcagagcctgctgtccttcttccagaagaggatctacaagaacctgcacatcttcgtcatcatgagccctgagggccccagcttccggcagaactgccgggtgtaccccagcatgatcagcagctgcaccatcgactggtatgagcgctggccagaggaggccctgctgattgtggccaacagcttcctgaaggagaaggtgaactttgagaaccgggagaacctgaaggagaagctggcccccacctgtgtgcagatccacaagtccatgaaggacctgaacaggaagtactttgaggagaccggccgcttctactacaccacccccaacagctacctgcagttcatggagacctttgcccacatcctgcgggcccgggaggaggagatgcagaccaagagggaccgcttccacatgggcctgagcaccatcctggaggccaccaccctggtgacagagatgcaggaggagctgctgatcctgggcccccaggtggagcagaagaccaaggagacagagaccctgatggagaagctgaggaaggacagccaggtggtggagaaggtgcagatgctggtgaagcaggatgaggagatcgtggccgaggaggtgcgcatcgtggaggactatgcccagaagacagccaatgagctgaagtctgtgctgcctgcctttgacaaggccatcgtggccctgaatgccctggacaaggcagatgtggccgagctgcgggtgtacaccaggcctcccttcctggtgctgactgtgatgaatgctgtgtgcatcctgctgcagaagaagcccaactgggccacagccaagctgctgctgtctgagaccggcttcctgaagaagctgatcaacctggacaaggacagcatcccagacaaggtgtttgtgaagctgaagaagatcgtgaccctgcctgacttcaacccccacaagatcagcctggtgtctgtggcctgctgcagcctgtgccagtgggtgattgccctgaacaactaccacgaggtgcagaaggtggtgggccccaagcagatccaggtggccgaggcccagaatgtgctgaagatcgcccggcagaggctggccgagaagcagaggggcctgcagctgatcagccgctggcacaaccagggcctgccccacggccagtacagcgtggagaatgccatcctgatcaagaatggccagcagtggcccctgctgattgacccccaccggcaggcccacaagtggatccggcagatggagggcagccggctgcagaagctgagcattgaggacagcaactacaccaagaagattgaaaatgccatgaagacaggaggctctgtgctgctgcagagctgccaggccagcacctggaggaagaagctgtacctgagcacagaaattgacaacccccacttcctgcccagcgtgtacaactttgtgaccatgatcaacttcaccgtgaccttccagggcctgcaggaccagctgctgagcacagtggtgacccatgaggtgccccacctggaggaccagaggagcaagctgctggagagcatcagcctggatgccatcaccctggaggagctggaggagaagaccctgaacctgctgcagaaggccctgggcagcatcctggatgatgacaagatcgtggacaccctgaggaagagcaagatgaccagcaatgagatcagcaagagaattgaggccaccaagaaggccgagagcgagatccaggccatcaggaagaactacctgcccatcgccaccaggggggccctgctgtacttcctggtggccgacctgacccagatcaactacatgtaccagttcagcctggactggttccaccaggtgtttgtgtcctctgtggtgtccaagagcaaggagcaggagcacagcttcaagcgggagaaggtgagccccaaggaggtgcatgagttcatcagcatcagcaaggagcccaacctggagaatgagaagaacctgctggacaagcacatcaagagcgccatcgacatgctgaccaagagcatcttcaaggtggtgtcctctgccctcttcaatgaagacaagctgtgcttctccttccggctgtgcaccgtcatcatgcagaacaatgccaatggaaacctgatccaggatgacatcggcttcctgcctgaggaggagtggaacatcttcctgtacagcggcatcctgatcaacatcaagagcgccctgagccagagccggctgaccagcacctttgagatcggggagagccagcacctgcagtggctgagtgacagccgctggaggcagtgccagtatgtgtccacccacctggagcccttcagcctgctgtgcaagagcctgctgagcaatgtgtcccagtgggacaccttcaagaacagcaaggctgtgtacagcctcatcagcacccccttcagcagtgaaaatgccagcctggaggagaacaccaagcccccagaggagaagcacaccttctgcctgctgctgcgggccatcaaccacactggaacagacctgggccctgtgggccggggccagtggctgaccagcacagcctgtgacagacacacagatgtgtgcagcttctcctttgccctgaatgatggagtgcctgatgtggagcacgtgcaggacatcttctacggccactgtgtggacaagtaccacgtgaaggtgctgcggcctgagagcctgaacaacagcgtgaggaagttcatcacagagaagatgggcaacaagtacctgcagaggactggagtgaacctgaaggatgcctacaagggcagcaatgcccggacccccctcatcctgatccagacccacggcagcgccagcatcaaggactacatccacatcatccagagcctgcctgatgatgacctgcctgaggtgctgggcatccaccctgaggccatccgcagctgctgggagacccagggcgagaagttcatcgagaacctgattgccatgcagcccaagaccaccacagccaacctgatgatccggcctgagcagagcaaggatgagctggtgatggagatcctgagtgacctgctgaagaggctgcccctgactgtggagaaggaggagattgctgtgggcacccccagcaccctgaagtccatgatgagcagcagcatctgggagagcctgagcaagaacctgaaggaccatgaccccctcatccactgtgtgctgctgaccttcctgaagcaggagatcaagagatttgacaagctgctgtttgtgatccacaagagcctgaaggacctgcagctggccatcaagggggagatcatcctgacccaggagctggaggagatcttcaacagcttcctgaacatgagggtgcccaccctgtggcagaagcacgcctaccgcagctgcaagcccctgagctcctggattgatgacctgatccagaggctgaacttcttcaacacctgggccaaggtggcctacacagccatccagaggcgctacatgagatttgtgacagtgtggaagcagagcatccccagcaccagccagaagtgcaagcaccctgaggacagcgagaacaacttctttgagggcttccccagccgctactggctgcctgccttcttcttcccccaggccttcctggccgctgtgctgcaggactatggccgcagccggggcattgctgtggatgccctgaccttcacccaccacgtgatcagcaacaccacagacaaggatgagaagttcagcgtcttcatgcccaagaagctgaacatcgtgagaagagccttcaagggcagcgccagcagccacactggagtgtacatcttcggcctcttcattgaaggagcccgctggaaccgggagcagaagatcctggaggacagcctgcccctggagatgtgctgtgacttcccagacatctacttcctgcccaccaagatcagcaccaagaccccaaatgccagcaaccagacagacagcgagctgtatgcctttgagtgccctgtgtaccagaccccagagaggagccgcatcctggccaccaccggcctgcccaccaacttcctgacctctgtgtacctgagcaccaagaagccacccagccactggatcaccatgagggtggccctgctgtgtgagaagaatgagaagtag

SEQ ID NO: 150636 - DNA, 2619 bp, synthetic construct
  misc_feature 1..2619: note = Description of Artificial Sequence: Synthetic coding sequence
  source 1..2619: mol_type = other DNA
atgagcagcaaggccgagaagaagcagaggctgagcggccggggcagcagccaggcctcctggagcggccgggccaccagggctgctgtggccacccaggagcagggcaatgccccagctgtgtctgagcctgagctgcaggccgagctgcccaaggaggagcctgagccccggctggagggcccccaggcccagagcgaggagagcgtggagcctgaggctgatgtgaagcccctcttcctgagccgggccgccctgaccggcctggctgatgctgtgtggacccaggagcatgatgccatcctggagcactttgcccaggaccccacagagagcatcctgaccatcttcatcgacccctgcttcggcctgaagctggagctgggcatgcctgtgcagacccagaaccagctggtgtacttcatccggcaggcccctgtgcccatcacctgggagaactttgaggccaccgtgcagtttggcaccgtgcggggcccctacatcccagccctgctgcggctgctgggcggcgtgtttgccccccagatctttgccaacacaggctggccagagagcatccggaaccactttgccagccacctgcacaagttcctggcctgcctgacagacacccgctacaagctggagggccacacagtgctgtacatcccagctgaggccatgaacatgaagccagagatggtgatcaaggacaaggagctggtgcagaggctggagacctccatgatccactggacccggcagatcaaggagatgctgagcgcccaggagaccgtggagaccggggagaacctgggccccctggaggagattgagttctggaggaaccgctgcatggacctgagcggcatcagcaagcagctggtgaagaagggcgtgaagcacgtggagagcatcctgcacctggccaagagcagctacctggcccccttcatgaagctggcccagcagatccaggacggcagccggcaggcccagagcaacctgaccttcctgagcatcctgaaggagccctaccaggagctggccttcatgaagcccaaggacatcagcagcaagctgcccaagctgatcagcctcatccgcatcatctgggtgaacagcccccactacaacacccgggagcggctgaccagcctcttcaggaagatgagcaatgagatcatccggctgtgctgccacgccatcagcctggaccgcatctttgagggctacgtgagcagcagcaaggaggacctgcagggctgcatcctgtgctgccacgcctggaaggaccactacgtgcaggccgtgcagatgcacatccagttcagcagccggggctgggtgctggaccagaccagcatctttgcccaggtggatgcctttgtgcagcgctgcaaggacctgattgaggtgtgtgactgccagtaccactttgcccgctgggaggatggcaagcagggccccctgccctgcttctttggagcccagggcccccagatcaccaggaacctgctggagattgaggacatcttccacaagaacctgcacaccctgcgggctgtgcggggcggcatcctggatgtgaagaacacctgctggcatgaggactacaacaagttccgggccggcatcaaggacctggaggtgatgacccagaacctgatcaccagcgcctttgagctggtgagagatgtgccccatggagtgctgctgctggacaccttccaccggctggccagccgggaggccatcaagaggacctatgacaagaaggctgtggacctgtacatgctgttcaacagcgagctggccctggtgaaccgggagaggaacaagaagtggccagacctggagccctacgtggcccagtacagcggcaaggcccgctgggtgcacatcctgcggaggagaattgacagagtgatgacctgcctggccggggcccacttcctgccccgcatcggcaccgggaaggagagcgtgcacacctaccagcagatggtgcaggccattgatgagctggtgaggaagaccttccaggagtggaccagcagcctggacaaggactgcatccggcggctggacacccccctgctgcgcatcagccaggagaaggccggcatgctggatgtgaactttgacaagtaccgcagccacctggcccccttcccctacacccccctgctgcagctgagccaggagttccacagccacctgctgacccccctcttcatcatcctgagcctgagccacaccatctgcctgctgagcagcttctacttcttcttcagcagcttcatctttgtgagcccccacctgcccccctgctaccagcacttcaacttcaccacctacctgaagacccagcagaacaagaccatgattggccaggcccgctggctgacccctgtgatcccagccctgtgggaggccgaggtgggcgccagcctggagcccaggagcctgaggacagcctgggccacctggcagaaccctgtgtctgccaagaacaccaagatctcctgggcctggtggcacaagcctgtggtgtctgccacctgggagggggaggtgggcggcagccctgagcccggccggcagaggctgcagtag

SEQ ID NO: 150637 - DNA, 12591 bp, synthetic construct
  misc_feature 1..12591: note = Description of Artificial Sequence: Synthetic coding sequence
  source 1..12591: mol_type = other DNA
atgagcagcaaggccgagaagaagcagaggctgagcggccggggcagcagccaggcctcctggagcggccgggccaccagggctgctgtggccacccaggagcagggcaatgccccagctgtgtctgagcctgagctgcaggccgagctgcccaaggaggagcctgagccccggctggagggcccccaggcccagagcgaggagagcgtggagcctgaggctgatgtgaagcccctcttcctgagccgggccgccctgaccggcctggctgatgctgtgtggacccaggagcatgatgccatcctggagcactttgcccaggaccccacagagagcatcctgaccatcttcatcgacccctgcttcggcctgaagctggagctgggcatgcctgtgcagacccagaaccagctggtgtacttcatccggcaggcccctgtgcccatcacctgggagaactttgaggccaccgtgcagtttggcaccgtgcggggcccctacatcccagccctgctgcggctgctgggcggcgtgtttgccccccagatctttgccaacacaggctggccagagagcatccggaaccactttgccagccacctgcacaagttcctggcctgcctgacagacacccgctacaagctggagggccacacagtgctgtacatcccagctgaggccatgaacatgaagccagagatggtgatcaaggacaaggagctggtgcagaggctggagacctccatgatccactggacccggcagatcaaggagatgctgagcgcccaggagaccgtggagaccggggagaacctgggccccctggaggagattgagttctggaggaaccgctgcatggacctgagcggcatcagcaagcagctggtgaagaagggcgtgaagcacgtggagagcatcctgcacctggccaagagcagctacctggcccccttcatgaagctggcccagcagatccaggacggcagccggcaggcccagagcaacctgaccttcctgagcatcctgaaggagccctaccaggagctggccttcatgaagcccaaggacatcagcagcaagctgcccaagctgatcagcctcatccgcatcatctgggtgaacagcccccactacaacacccgggagcggctgaccagcctcttcaggaaggtgtgtgactgccagtaccactttgcccgctgggaggatggcaagcagggccccctgccctgcttctttggagcccagggcccccagatcaccaggaacctgctggagattgaggacatcttccacaagaacctgcacaccctgcgggctgtgcggggcggcatcctggatgtgaagaacacctgctggcatgaggactacaacaagttccgggccggcatcaaggacctggaggtgatgacccagaacctgatcaccagcgcctttgagctggtgagagatgtgccccatggagtgctgctgctggacaccttccaccggctggccagccgggaggccatcaagaggacctatgacaagaaggctgtggacctgtacatgctgttcaacagcgagctggccctggtgaaccgggagaggaacaagaagtggccagacctggagccctacgtggcccagtacagcggcaaggcccgctgggtgcacatcctgcggaggagaattgacagagtgatgacctgcctggccggggcccacttcctgccccgcatcggcaccgggaaggagagcgtgcacacctaccagcagatggtgcaggccattgatgagctggtgaggaagaccttccaggagtggaccagcagcctggacaaggactgcatccggcggctggacacccccctgctgcgcatcagccaggagaaggccggcatgctggatgtgaactttgacaagagcctgctgatcctgtttgctgagattgactactgggagcggctgctgtttgagaccccccactacgtggtgaatgtggccgagagagctgaggacctgcgcatcctgcgggagaacctgctgctggtggcccgggactacaaccgcatcatcgccatgctgagcccagatgagcaggccctcttcaaggagcgcatccggctgctggacaagaagatccaccctggcctgaagaagctgcactgggccctgaagggggccagcgccttcttcatcacagaatgtcgcatccacgccagcaaggtgcagatgattgtgaatgagttcaaggccagcaccctgaccatcggctggagggcccaggagatgtctgagaagctgctggtgcgcatcagcggcaagagggtgtacagagacctggagtttgaggaggaccagcgggagcacagagctgctgtgcagcagaagctgatgaacctgcaccaggatgtggtgaccatcatgaccaacagctatgaggtgttcaagaatgatggccctgagatccagcagcagtggatgctgtacatgatccggctggacaggatgatggaggatgccctgcggctgaatgtgaagtggagcctgctggagctgagcaaggccatcaatggagatggcaagaccagccccaaccccctcttccaggtgctggtgatcctgaagaatgacctgcagggctctgtggcccaggtggagttcagccccaccctgcagaccctggccggcgtggtgaatgacatcggcaaccacctgttcagcaccatctctgtgttctgccacctgcctgacatcctgaccaagaggaagctgcaccgggagcccatccagacagtggtggagcaggatgaggacatcaagaagatccagacccagatcagcagcggcatgaccaacaatgccagcctgctgcagaactacctgaagacctgggacatgtaccgggagatctgggagatcaacaaggacagcttcatccaccgctaccagaggctgaacccccctgtgagcagctttgtggccgacatcgcccgctacacagaggtggccaacaacgtgcagaaggaggagaccgtgaccaacatccagtttgtgctgctggactgcagccacctgaagttcagcctggtgcagcactgcaatgagtggcagaacaagtttgccaccctgctgcgggagatggccgccggccgcctgctggagctgcacacctacctgaaggaaaatgctgagaagatcagccggcccccccagaccctggaggagctgggcgtgtccctgcagctggtggatgccctgaagcatgacctggccaacgtggagacccagatcccccccatccacgagcagtttgccatcctggagaagtatgaggtgcctgtggaggacagcgtgctggagatgctggacagcctgaatggagagtgggtggtgttccagcagaccctgctggacagcaagcagatgctgaagaagcacaaggagaagttcaagacaggcctcatccacagcgcagatgacttcaagaagaaggcccacaccctgctggaggactttgagttcaagggccacttcaccagcaatgtgggctacatgtctgccctggaccagatcacccaggtgcgggccatgctgatggccatgagggaggaggagaacagcctgcgggccaacctgggcatcttcaagattgagcagccccccagcaaggacctgcagaacctggagaaggagctggatgccctgcagcagatctgggagatcgcccgggactgggaggagaactggaatgagtggaagacaggccgcttcctgatcctgcagacagagaccatggagaccacagcccacggcctcttccggcggctgaccaagctggccaaggagtacaaggacaggaactgggagatcatcgagaccaccaggagcaagattgagcagttcaagaggaccatgcccctcatcagtgacctgagaaatcctgccctgcgggagcggcactgggaccaggtgagagatgagatccagcgggagtttgaccaggagagcgagagcttcaccctggagcagatcgtggagctgggcatggaccagcacgtggagaagattggagagatcagcgccagcgccaccaaggagctggccatcgaggtggccctgcagaacatcgccaagacctgggatgtgacccagctggacatcgtgccctacaaggacaagggccaccaccggctgcggggcacagaggaggtgttccaggccctggaggacaaccaggtggccctgagcaccatgaaggccagcagatttgtgaaggcctttgagaaggatgtggaccactgggagcgctgcctgagcctcatcctggaggtgattgagatgatcctgactgtgcagaggcagtggatgtacctggagaacatcttcctgggggaggacatcaggaagcagctgcccaatgaaagcaccctgtttgaccaggtgaacagcaactggaaggccatcatggacaggatgaacaaggacaacaatgccctgcggagcacccaccaccctggcctgctggacaccctgattgagatgaacaccatcctggaggacatccagaagagcctggacatgtacctggagaccaagaggcacatcttcccccgcttctacttcctgagcaatgatgacctgctggagatcctgggccagagcaggaaccctgaggccgtgcagccccacctgaagaagtgctttgacaacatcaagctgctgcgcatccagaaggtgggcggccccagcagcaagtgggaggccgtgggcatgttttctggagatggagagtacatcgacttcctgcacagcgtcttcctggagggccctgtggagagctggctgggagatgtggagcagaccatgagggtgaccctgcgggacctgctgaggaactgccacctggccctgaggaagttcctgaacaagagggacaagtgggtgaaggagtgggccggccaggtggtgatcacagccagccagatccagtggacagcagatgtgaccaagtgcctgctgacagccaaggagagagctgacaagaagatcctgaaggtgatgaagaagaaccaggtgtccatcctgaacaagtacagcgaggccatccggggcaacctgaccaagatcatgaggctgaagatcgtggccctggtgaccatcgagatccacgccagagatgtgctggagaagctgtacaagagcggcctgatggatgtgaacagctttgactggctgagccagctgcgcttctactgggagaaggacctggatgactgtgtgatccggcagaccaacacccagttccagtacaactatgagtacctgggcaacagcggccgcctggtgatcacccccctgacagaccgctgctacatgaccctgaccacagccctgcacctgcaccggggcggcagccccaagggccctgctggcaccgggaagacagagaccgtgaaggacctgggcaaggccctgggcatctacgtgattgtggtgaactgcagcgagggcctggactacaagtccatgggccgcatgtacagcggcctggcccagacaggagcctggggctgctttgatgagttcaaccgcatcaacatcgaggtgctgtctgtggtggcccaccagatcctgtgcatcctgagcgccctggccgccggcctgacccacttccactttgatggctttgagatcaacctggtgtggagctgtggcatcttcatcaccatgaaccctggctacgccggccgcacagagctgcctgagaacctgaagtccatgttccggcccatcgccatggtggtgcctgacagcaccctgattgctgagatcatcctgtttggagagggcttcggcaactgcaagatcctggccaagaaggtgtacaccctgtacagcctggccgtgcagcagctgagccggcaggaccactatgactttggcctgcgggccctgaccagcctgctgcgctatgccggcaagaagaggcggctgcagcctgacctgacagatgaggaggtgctgctgctgtccatgagggacatgaacatcgccaagctgacctctgtggatgcccccctcttcaatgccatcgtgcaggacctcttccccaacatcgagctgcctgtgattgattatggcaagctgcgggagaccgtggagcaggagatccgggacatgggcctgcagagcacccccttcaccctgaccaaggtgttccagctgtatgagaccaagaacagccgccacagcaccatgattgtgggctgcaccggcagcggcaagacagcctcctggaggatcctgcaggccagcctgagcagcctgtgcagagctggggaccccaacttcaacatcgtgcgggagttccccctgaaccccaaggccctgagcctgggggagctgtatggagaatatgacctgagcaccaatgagtggacagatggcatcctgagctctgtgatgaggacagcctgtgctgatgagaagccagatgagaagtggatcctgtttgatggccctgtggacaccctgtggattgagaacatgaacagcgtgatggatgacaacaaggtgctgaccctcatcaacggggagcgcatcgccatgcctgagcaggtgtccctgctgtttgaggtggaggacctggccatggccagccctgccaccgtgagccgctgtggcatggtgtacacagattatgctgacctgggctggaagccctacgtgcagagctggctggagaagaggcccaaggccgaggtggagcccctgcagaggatgtttgagaagctgatcaacaagatgctggccttcaagaaggacaactgcaaggagctggtgcccctgcctgagtacagcggcatcaccagcctgtgcaagctgtacagcgccctggccaccccagaaaatggagtgaacccagcagatggagaaaattatgtgaccatggtggagatgacctttgtgttctccatgatctggagcgtgtgtgcctctgtggatgaggagggcaggaagagaattgacagctacctgcgggagattgagggcagcttccccaacaaggacacagtgtatgagtactttgtggaccccaagatccgctcctggaccagctttgaggacaagctgcccaagtcctggagataccccccaaatgcccccttctacaagatcatggtgcccaccgtggacacagtgcgctacaactacctggtgagcagcctggtggccaaccagaaccccatcctgctggtgggccctgtgggcaccgggaagaccagcatcgcccagagcgtgctgcagagcctgcccagcagccagtggagcgtgctggtggtgaacatgtctgcccagaccaccagcaacaacgtgcagagcatcatcgagagccgggtggagaagaggaccaagggcgtgtatgtgccctttggaggcaagtccatgatcaccttcatggatgacctgaacatgcctgccaaggacatgtttggcagccagccccccctggagctgatccggctgtggattgattatggcttctggtatgacaggaccaagcagaccatcaagtacatccgggagatgttcctgatggccgccatgggccccccaggcggcggccgcaccgtcatcagcccccggctgcggagccgcttcaacatcatcaacatgaccttccccaccaagagccagatcatccgcatcttcggcaccatgatcaaccagaagctgcaggactttgaggaggaggtgaagcccatcggaaatgtggtgacagaggccaccctggacatgtacaacacagtggtgcagcgcttcctgcccacccccaccaagatgcactacctgttcaacctgcgggacatcagcaaggtgttccagggcatgctgcgggccaacaaggacttccatgacaccaagagcagcatcacccggctgtggattcatgagtgcttccgggtcttcagtgaccggctggtggatgctgctgacacagaggccttcatgggcatcatcagtgacaagctgggcagcttctttgacctgaccttccaccacctgtgccccagcaagaggcctcccatctttggagacttcctgaaggagcccaaggtgtatgaggacctgacagacctgactgtgctgaagacagtgatggagacagccctgaatgagtacaacctgagccccagcgtggtgcccatgcagctggtgctcttccgggaggccatcgagcacatcaccagaattgtgcgggtgattggccagccccggggcaacatgctgctggtgggcattggaggcagcggccggcagagcctggcccggctggccagcagcatctgtgactacaccaccttccagatcgaggtgaccaagcactacaggaagcaggagttcagagatgacatcaagaggctgtaccggcaggccggcgtggagctgaagaccaccagcttcatctttgtggacacccagattgctgatgagagcttcctggaggacatcaacaacatcctgagcagtggagaggtgcccaacctgtacaagccagatgaatttgaggagatccagagccacatcatcgaccaggcccgggtggagcaggtgcctgagagcagtgacagcctgtttgcctacctgattgagcgggtgcagaacaacctgcacatcgtgctgtgcctgagccccatgggagaccccttcaggaactggatccggcagtacccagccctggtgaactgcaccaccatcaactggttcagcgagtggccccaggaggccctgctggaggtggccgagaagtgcctgattggagtggacctgggcacccaggagaacatccacaggaaggtggcccagatctttgtgaccatgcactggagcgtggcccagtacagccagaagatgctgctggagctgcggcggcacaactacgtgacccccaccaagtacctggagctgctgagcggctacaagaagctgctgggggagaagaggcaggagctgctggcccaggccaacaagctgaggacaggcctcttcaagattgatgagacccgggagaaggtgcaggtgatgagcctggagctggaggatgccaagaagaaggtggccgagttccagaagcagtgtgaggagtacctggtgatcatcgtgcagcagaagcgggaggctgatgagcagcagaaggccctggagagcctgaacaagaaggacattggagagatcaagagctatggccggcccccagcccaggtggagatcgtgatgcaggccgtgatgatcctgcggggaaatgagcccacctgggccgaggccaagaggcagctgggggagcagaacttcatcaagagcctcatcaactttgacaaggacaacatcagtgacaaggtgctgaagaagattggagcctactgtgcccagcctgacttccagcctgacatcatcggccgggtgtccctggccgccaagagcctgtgcatgtgggtgcgggccatggagctgtatggccgcctgtacagagtggtggagcccaagaggatccgcatgaatgctgccctggcccagctgcgggagaagcaggccgccctggccgaggcccaggagaagctgcgggaggtggccgagaagctggagatgctgaagaagcagtatgatgagaagctggcccagaaggaggagctgaggaagaagtctgaggagatggagctgaagctggagcgggccggcatgctggtgtctggcctggccggggagaaggcccgctgggaggagaccgtgcagggcctggaggaggacctgggctacctggtgggggactgcctgctggccgccgccttcctgagctacatgggccccttcctgaccaactacagagatgaaattgtgaaccagatctggattggcaagatctgggagctgcaggtgccctgcagccccagctttgccatcgacaacttcctgtgcaaccccaccaaggtgcgggactggaacatccagggcctgcccagtgatgccttcagcacagaaaatggcatcatcgtgacccggggcaaccgctgggccctgatgattgacccccaggcccaggccctgaagtggatcaagaacatggagggcggccagggcctgaagatcatcgacctgcagatgtctgactacctgcgcatcctggagcacgccatccacttcggctaccctgtgctgctgcagaatgtgcaggagtacctggaccccaccctgaaccccatgctgaacaagtctgtggccagaattggaggccgcctgctgatgagaattggagacaaggaggtggagtacaacaccaacttccgcttctacatcaccaccaagctgagcaacccccactacagccctgagaccagcgccaagaccaccatcgtgaactttgctgtgaaggagcagggcctggaggcccagctgctgggcatcgtggtgaggaaggagaggcctgagctggaggagcagaaggacagcctggtgatcaacattgctgctgggaagaggaagctgaaggagctggaggatgagatcctgcggctgctgaatgaggccaccggcagcctgctggatgatgtgcagctggtgaacaccctgcacaccagcaagatcacagccacagaggtgacagagcagctggagaccagcgagaccacagagatcaacacagacctggcccgggaggcctaccggccctgtgcccagagggccagcatcctcttctttgtgctgaatgacatgggctgcatcgaccccatgtaccagttcagcctggatgcctacatcagcctcttcatcctgagcattgacaagagccacaggagcaacaagctggaggacagaattgactacctgaatgactaccacacctatgctgtgtaccgctacacctgcaggaccctgtttgagcggcacaagctgctcttctccttccacatgtgtgccaagatcctggagaccagcggcaagctgaacatggatgagtacaacttcttcctgcggggcggcgtggtgctggaccgggagggccagatggacaacccctgcagctcctggctggctgatgcctactgggacaacatcacagagctggacaagctgaccaacttccacggcctgatgaacagctttgagcagtacccccgggactggcacctgtggtacaccaatgctgcccctgagaaggccatgctgcctggagagtgggagaatgcctgcaatgagatgcagaggatgctgattgtgcgcagcctgcggcaggacagagtggccttctgtgtgaccagcttcatcatcaccaacctgggcagccgcttcatcgagccccctgtgctgaacatgaagtctgtgctggaggacagcacccccaggagccccctggtgttcatcctgagccctggggtggaccccaccagcgccctgctgcagctggccgagcacatgggcatggcccagcgcttccacgccctgagcctgggccagggccaggcccccatcgccgcccggctgctgcgggagggcgtgacccagggccactgggtgttcctggccaactgccacctgagcctgtcctggatgcccaacctggacaagctggtggagcagctgcaggtggaggacccccaccccagcttccggctgtggctgagcagcatcccccacccagacttccccatcagcatcctgcaggtgtccatcaagatgaccacagagccccccaagggcctgaaggccaacatgacccggctgtaccagctgatgtctgagccccagttcagccgctgcagcaagccagccaagtacaagaagctgctcttcagcctgtgcttcttccacagcgtgctgctggagaggaagaagttcctgcagctgggctggaacatcatctacggcttcaatgacagcgactttgaggtgtctgagaacctgctgagcctgtacctggatgaatatgaggagaccccctgggatgccctgaagtacctgattgctggcatcaactacggcggccacgtgacagatgactgggaccggcggctgctgaccacctacatcaatgactacttctgtgaccagagcctgagcacccccttccaccggctgagcgccctggagacctacttcatccccaaggatggcagcctggccagctacaaggagtacatcagcctgctgcccggcatggaccccccagaggccttcggccagcaccccaatgctgatgtggccagccagatcacagaggcccagaccctgtttgacaccctgctgagcctgcagccccagatcacccccacccgggccggcggccagacccgggaggagaaggtgctggagctggccgcagatgtgaagcagaagatccctgagatgattgattatgagggcacccagaagctgctggccctggaccccagccccctgaatgtggtgctgctgcaggagatccagcgctacaacaccctgatgcagaccatcctcttcagcctgacagacctggagatccccagctgtgtgagccacaagtctgagcgggtggtgctggagctgtctgctgtgaagcacccccggcagtag

SEQ ID NO: 150638 - DNA, 13284 bp, synthetic construct; identical to SEQ ID NO: 150620
  misc_feature 1..13284: note = Description of Artificial Sequence: Synthetic coding sequence
  source 1..13284: mol_type = other DNA

SEQ ID NO: 150639 - DNA, 12351 bp, synthetic construct
  misc_feature 1..12351: note = Description of Artificial Sequence: Synthetic coding sequence
  source 1..12351: mol_type = other DNA
atgggcgccaccggccgcctggagctgaccctggccgccccaccccaccctggccctgccttccagaggagcaaggcccgggagacccagggcgaggaggagggcagcgagatgcagatcgccaagagtgacagcatccaccacatgagccacagccagggccagcctgagctgccccccctgcctgccagcgccaatgaggagcccagcggcctgtaccagacagtgatgagccacagcttctacccacccctgatgcagaggacctcctggaccctggccgcccccttcaaggagcagcaccaccaccggggccccagcgacagcatcgccaacaactacagcctgatggcccaggacctgaagctgaaggacctgctgaaggtgtaccagcctgccaccatctctgtgccccgggacagaacaggccagggcctgcccagcagcggcaacagaagcagcagcgagcccatgaggaagaagaccaagttcagcagcaggaacaaggaggacagcacccgcatcaagctggccttcaagaccagcatcttcagccccatgaagaaggaggtgaagaccagcctgaccttccctggcagccggcccatgagccctgagcagcagctggatgtgatgctgcagcaggagatggagatggagagcaaggagaagaagcccagcgagagtgacctggagcgctactactactacctgaccaacggcatcaggaaggacatgattgcccctgaggagggggaggtgatggtgcgcatcagcaagctgatcagcaacaccctgctgaccagccccttcctggagcccctgatggtggtgctggtgcaggagaaggaaaatgactactactgcagcctgatgaagagcatcgtggactacatcctgatggaccccatggagaggaagaggctcttcatcgagagcatccccaggctcttcccccagagggtcatccgggcccctgtgccctggcacagcgtgtacagaagtgccaagaagtggaatgaggagcacctgcacacagtgaaccccatgatgctgcggctgaaggagctgtggtttgctgagttccgggacctgcgctttgtgaggacagctgagatcctggccggcaagctgcccctgcagccccaggagttctgggatgtgatccagaagcactgcctggaggcccaccagaccctgctgaacaagtggatccccacctgtgcccagctgttcaccagcaggaaggagcactggatccactttgcccccaagagcaactatgacagcagcaggaacatcgaggagtactttgcctctgtggccagcttcatgagcctgcagctgcgggagctggtgatcaagagcctggaggacctggtgtccctcttcatgatccacaaggatggaaatgacttcaaggagccctaccaggagatgaagttcttcatcccccagctgatcatgatcaagctggaggtgtctgagcccatcatcgtgttcaaccccagctttgatggctgctgggagctgatccgggacagcttcctggagatcatcaagaacagcaatggcatccccaagctgaagtacatccccctgaagttctccttcaccgctgctgctgctgaccggcagtgtgtgaaggctgctgagcctggagagcccagcatgcacgccgccgccacagccatggccgagctgaagggctacaacctgctgctgggcaccgtgaatgctgaggagaagctggtgtctgacttcctgatccagaccttcaaggtgttccagaagaaccaggtgggcccctgcaagtacctgaatgtgtacaagaagtatgtggacctgctggacaacacagctgagcagaacattgctgccttcctgaaggaaaatcatgacattgatgactttgtgaccaagatcaatgccatcaagaagagaagaaatgagatcgcctccatgaacatcaccgtgcccctggccatgttctgcctggatgccacagccctgaaccacgacctgtgtgagcgggcccagaacctgaaggaccacctgatccagttccaggtggatgtgaacagagacaccaacaccagcatctgcaaccagtacagccacatcgctgacaaggtgtctgaggtgcctgccaacaccaaggagctggtgtccctcatcgagttcctgaagaagagcagcgctgtgaccgtcttcaagctgcggcggcagctgagagatgccagcgagcggctggagttcctgatggactatgctgacctgccctaccagatcgaggacatctttgacaacagcaggaacctgctgctgcacaagagggaccaggccgagatggacctgatcaagcgctgcagcgagtttgagctgcggctggagggctaccaccgggagctggagagcttcaggaagcgggaggtgatgaccacagaggagatgaagcacaacgtggagaagctgaatgagctgagcaagaacctgaacagagcctttgctgagtttgagctgatcaacaaggaggaggagctgctggagaaggagaagagcacctaccccctgctgcaggccatgctgaagaacaaggtgccctatgagcagctgtggagcacagcctatgagttcagcatcaagtctgaggagtggatgaatggccccctcttcctgctgaatgctgagcagattgctgaggagatcggcaacatgtggaggaccacctacaagctgatcaagaccctgagtgatgtgcctgccccccggcggctggccgagaatgtgaagatcaagattgacaagttcaagcagtacatccccatcctgagcatcagctgcaaccctggcatgaaggacagacactggcagcagatcagcgagatcgtgggctatgagatcaagcccacagagaccacctgcctgagcaacatgctggagtttggatttgggaagtttgtggagaagctggagcccatcggggctgctgccagcaaggagtacagcctggagaagaacctggacaggatgaagctggactgggtgaatgtgaccttctcctttgtgaagtacagagacacagacaccaacatcctgtgtgccattgatgacatccagatgctgctggatgaccacgtgatcaagacccagaccatgtgtggcagccccttcatcaagcccatcgaggctgaatgtaggaagtgggaggagaagctgatccgcatccaggacaacctggatgcctggctgaagtgccaggccacctggctgtacctggagcccatcttcagcagcgaggacatcatcgcccagatgcctgaggagggcaggaagtttggaattgtggacagctactggaagagcctgatgagccaggccgtgaaggacaaccgcatcctggtggccgctgaccagcccaggatggccgagaagctgcaggaggccaacttcctgctggaggacatccagaagggcctgaatgactacctggagaagaagaggctcttcttcccccgcttcttcttcctgagcaatgatgagctgctggagatcctgtctgagaccaaggaccccctgcgggtgcagccccacctgaagaagtgctttgagggcatcgccaagctggagttcacagacaacctggagatcgtgggcatgatcagcagcgagaaggagaccgtgcccttcatccagaagatctacccagccaatgccaagggcatggtggagaagtggctgcagcaggtggagcagatgatgctggcctccatgagggaggtgattggcctgggcatcgaggcctacgtgaaggtgcccaggaaccactgggtgctgcagtggccaggccaggtggtgatctgtgtgagcagcatcttctggacccaggaggtgtcccaggccctggccgagaacaccctgctggacttcctgaagaagagcaatgaccagatcgcccagatcgtgcagctggtgcggggcaagctgagcagcggggcccggctgaccctgggcgccctgactgtgattgatgtgcacgccagagatgtggtggccaagctgtctgaggacagagtgtctgacctgaatgacttccagtggatcagccagctgcgctactactgggtggccaaggatgtgcaggtgcagatcatcaccacagaggccctgtatggctatgagtacctgggcaacagcccccggctggtgatcacccccctgacagaccgctgctaccgcaccctgatgggcgccctgaagctgaacctgggcggggcccctgagggccctgctggcaccgggaagacagagaccaccaaggacctggccaaggccctggccaagcagtgtgtggtgttcaactgcagtgatggcctggactacaaggccatgggcaagttcttcaagggcctggcccaggccggggcctgggcctgctttgatgagttcaaccgcatcgaggtggaggtgctgtctgtggtggcccagcagatcctgagcatccagcaggccatcatcaggaagctgaagaccttcatctttgagggcacagagctgagcctgaaccccacctgtgctgtgttcatcaccatgaaccctggctacgccggccgggcagagctgcctgacaacctgaaggccctcttcagaacagtggccatgatggtgcctgactatgccctgattggagagatcagcctgtacagcatgggcttcctggacagccgcagcctggcccagaagatcgtggccacctaccgcctgtgcagcgagcagctgagcagccagcaccactatgactatggcatgagagctgtgaagtctgtgctgacagctgctggcaacctgaagctgaagtacccagaagaaaatgaatctgtgctgctgctgcgggccctgctggatgtgaacctggccaagttcctggcccaggatgtgcccctcttccagggcatcatcagtgacctcttccctggggtggtgctgcccaagccagactatgaggtgttcctgaaggtgctgaatgacaacatcaagaagatgaagctgcagcctgtgccctggttcatcggcaagatcatccagatctatgagatgatgctggtgcgccacggctacatgattgtgggggaccccatgggcggcaagaccagcgcctacaaggtgctggccgccgccctgggggacctgcacgccgccaaccagatggaggagtttgctgtggagtacaagatcatcaaccccaaggccatcaccatgggccagctgtatggctgctttgaccaggtgtcccatgagtggatggatggagtgctggccaatgccttccgggagcaggccagcagcctgagtgatgacaggaagtggatcatctttgatggccctgtggatgccatctggattgagaacatgaacacagtgctggatgacaacaagaagctgtgcctgatgtctggagagatcatccagatgaacagcaagatgagcctcatctttgagcctgctgacctggagcaggccagccctgccaccgtgagccgctgtggcatgatctacatggagccccaccagctgggctggaagcccctgaaggacagctacatggacaccctgcccagcagcctgaccaaggagcacaaggagctggtgaatgacatgttcatgtggctggtgcagccctgcctggagtttggccgcctgcactgcaagtttgtggtgcagaccagccccatccacctggccttctccatgatgaggctgtacagcagcctgctggatgagatccgggctgtggaggaggaggagatggagctgggggagggcctgagcagccagcagatcttcctgtggctgcagggcctcttcctgttcagcctggtgtggacagtggccggcaccatcaatgctgacagcaggaagaagtttgatgtgttcttcaggaacctgatcatgggcatggatgacaaccacccccggcccaagtctgtgaagctgaccaagaacaacatcttccctgagcggggcagcatctatgacttctacttcatcaagcaggccagcggccactgggagacctggacccagtacatcaccaaggaggaggagaaggtgcctgctggggccaaggtgtctgagctgatcatccccaccatggagacagcccggcagagcttcttcctgaagacctacctggaccacgagatccccatgctgtttgtgggccccaccggcaccgggaagagcgccatcaccaacaacttcctgctgcacctgcccaagaacacctacctgcccaactgcatcaacttcagcgcccggaccagcgccaaccagacccaggacatcatcatgagcaagctggacagaagaaggaagggcctgtttggcccccccatcggcaagaaggctgtggtgtttgtggatgacctgaacatgcctgccaaggaggtgtatggagcccagccccccatcgagctgctgcggcagtggattgaccacggctactggtttgacaagaaggacaccacccggctggacatcgtggacatgctgctggtgacagccatgggccccccaggcggcggcagaaatgacatcaccggccgcttcaccaggcacctgaacatcatcagcatcaatgcctttgaagatgacatcctgaccaagatcttcagcagcatcgtggactggcactttgggaagggctttgatgtgatgttcctgcgctatggcaagatgctggtgcaggccaccaagaccatctacagagatgctgtggagaacttcctgcccacccccagcaagagccactacgtgttcaacctgcgggacttcagcagggtcatccagggcgtgctgctgtgcccccacacccacctgcaggatgtggagaagtgcatccggctgtggattcatgaggtgtacagagtcttctatgaccggctgattgacaaggaggaccggcaggtgttcttcaacatggtgaaggagaccaccagcaactgcttcaagcagaccatcgagaaggtgctgatccacctgagccccaccgggaagatcgtggatgacaacatccgcagcctcttctttggagactacttcaagccagagagtgaccagaagatctatgatgagatcacagacctgaagcagctgactgtggtgatggagcactacctggaggagttcaacaacatcagcaaggcccccatgagcctggtgatgttccgctttgccatcgagcacatcagccgcatctgccgggtgctgaagcaggacaagggccacctgctgctggtgggcattggaggcagcggccggcagagcgctgccaagctgagcaccttcatgaatgcctatgagctgtaccagatcgagatcaccaagaactatgctggaaatgactggagggaggacctgaagaagatcatcctgcaggtgggcgtggccaccaagagcacagtgttcctgtttgctgacaaccagatcaaggatgagagctttgtggaggacatcaacatgctgctgaacacaggagatgtgcccaacatcttcccagcagatgagaaggctgacatcgtggagaagatgcagacagctgcccggacccagggcgagaaggtggaggtgacccccctgtccatgtacaacttcttcatcgagagggtcatcaacaagatctccttcagcctggccatgagccccatcggagatgccttcaggaaccggctgaggatgttccccagcctcatcaactgctgcaccatcgactggttccagagctggcccacagatgccctggagctggtggccaacaagttcctggaggatgtggagctggatgacaacatccgggtggaggtggtgtccatgtgcaagtacttccaggagagcgtgaagaagctgagcctggactactacaacaagctgcggcggcacaactacgtgacccccaccagctacctggagctgatcctgaccttcaagaccctgctgaacagcaagaggcaggaggtggccatgatgaggaaccgctacctgaccggcctgcagaagctggactttgctgccagccaggtggccgtgatgcagcgggagctgacagccctgcagccccagctgatcctgaccagcgaggagacagccaagatgatggtgaagattgaagctgagacccgggaggctgatggcaagaagctgctggtgcaggctgatgagaaggaggccaacgtggccgccgccatcgcccagggcatcaagaatgaatgtgagggggacctggccgaggccatgcctgccctggaggccgccctggccgccctggacaccctgaacccagctgacatcagcctggtgaagtccatgcagaaccccccaggccctgtgaagctggtgatggagagcatctgcatcatgaagggcatgaagccagagaggaagccagaccccagcggcagcggcaagatgattgaggactactggggcgtgtccaagaagatcctgggggacctgaagttcctggagagcctgaagacctatgacaaggacaacatcccccccctgaccatgaagaggatccgggagcgcttcatcaaccaccctgagttccagcctgctgtgatcaagaatgtgtcctctgcctgtgagggcctgtgcaagtgggtgcgggccatggaggtgtatgacagagtggccaaggtggtggcccccaagcgggagcggctgcgggaggccgagggcaagctggccgcccagatgcagaagctgaaccagaagagagctgagctgaagctggtggtggaccggctgcaggccctgaatgatgactttgaggagatgaacaccaagaagaaggacctggaggagaacatcgagatctgcagccagaagctggtgcgggcagagaagctgatcagcggcctgggcggggagaaggaccgctggacagaggccgcccggcagctgggcatccgctacaccaacctgactggagatgtgctgctgagcagcggcaccgtggcctacctgggcgccttcaccgtggactacagagtgcagtgccagaaccagtggctggccgagtgcaaggacaaggtgattcctggcttcagtgacttcagcctgagccacaccctgggggaccccatcaagatccgggcctggcagattgctggcctgcctgtggacagcttcagcattgacaatggcatcatcgtgagcaacagccgccgctgggccctgatgattgacccccacggccaggccaacaagtggatcaagaacatggagaaggccaacaagctggccgtcatcaagttcagtgacagcaactacatgaggatgctggagaatgccctgcagctgggcacccctgtgctgattgagaacatcggggaggagctggatgccagcattgagcccatcctgctgaaggccaccttcaagcagcagggcgtggagtacatgaggctgggggagaacatcatcgagtacagccgggacttcaagctgtacatcaccacccggctgaggaacccccactacctgcctgaggtggccgtgaaggtgtgcctgctgaacttcatgatcacccccctgggcctgcaggaccagctgctgggcatcgtggccgccaaggagaagccagagctggaggagaagaagaaccagctgattgtggagagcgccaagaacaagaagcacctgaaggagattgaggacaagatcctggaggtgctgtccatgagcaagggcaacatcctggaggatgaaacagccatcaaggtgctgagcagcagcaaggtgctgtctgaggagatcagcgagaagcagaaggtggcctccatgacagagacccagattgatgagaccaggatgggctacaagcctgtggccgtgcacagcgccaccatcttcttctgcatcagtgacctggccaacatcgagcccatgtaccagtacagcctgacctggttcatcaacctgtacatgcacagcctgacccacagcaccaagtctgaggagctgaacctgcgcatcaagtacatcatcgaccacttcaccctgagcatctacaacaacgtgtgccgcagcctgtttgagaaggacaagctgctcttcagcctgctgctgaccatcggcatcatgaagcagaagaaggagatcacagaggaggtgtggtacttcctgctgaccggcggcatcgccctggacaacccctaccccaacccagccccccagtggctgtctgagaaggcctgggccgagatcgtgcgggccagcgccctgcccaagctgcacggcctgatggagcacctggagcagaacctgggggagtggaagctgatctatgacagcgcctggccccatgaggagcagctgcccggctcctggaagttcagccagggcctggagaagatggtgatcctgcgctgcctgcggccagacaagatggtgcctgctgtgcgggagttcatcgccgagcacatgggcaagctgtacatcgaggcccccacctttgacctgcagggcagctacaatgacagcagctgctgtgcccccctcatctttgtgctgagccccagcgctgaccccatggccggcctgctgaagtttgctgatgacctgggcatgggcggcaccaggacccagaccatcagcctgggccagggccagggccccatcgccgccaagatgatcaacaatgccatcaaggatggcacctgggtggtgctgcagaactgccacctggccgcctcctggatgcccaccctggagaagatctgtgaggaggtgattgtgcctgagagcaccaatgcccgcttccggctgtggctgaccagctaccccagcgagaagtttcctgtgtccatcctgcagaatggcatcaagatgaccaatgaaccacccaagggcctgcgggccaacctgctgcggagctacctgaatgaccccatcagtgaccctgtgttcttccagagctgtgccaaggctgtgatgtggcagaagatgctgtttggcctgtgcttcttccacgctgtggtgcaggagaggaggaactttggccccctgggctggaacatcccctatgagttcaatgaaagtgacctgcgcatctccatgtggcagatccagatgttcctgaatgactacaaggaggtgccctttgatgccctgacctacctgactggagagtgcaactacggcggccgggtgacagatgacaaggaccggcggctgctgctgagcctgctgtccatgttctactgcaaggagattgaggaggactactacagcctggcccctggggacacctactacatcccccctcatggcagctaccagagctacatcgactacctgaggaacctgcccatcacagcccaccctgaggtgtttggcctgcatgaaaatgctgacatcaccaaggacaaccaggagaccaaccagctgtttgagggcgtgctgctgaccctgccccggcagagcggcggcagcggcaagagcccccaggaggtggtggaggagctggcccaggacatcctgagcaagctgccccgggactttgacctggaggaggtgatgaagctgtaccctgtggtgtatgaggagagcatgaacacagtgctgcggcaggagctgatccgcttcaaccggctgaccaaggtggtgagaagaagcctcatcaacctgggccgggccatcaagggccaggtgctgatgagcagcgagctggaggaggtgttcaacagcatgctggtgggcaaggtgcctgccatgtgggccgccaagagctaccccagcctgaagcccctgggcggctacgtggccgacctgctggcccggctgaccttcttccaggagtggattgacaagggcccccctgtggtgttctggatcagcggcttctacttcacccagagcttcctgactggagtgtcccagaactatgccaggaagtacaccatccccatcgaccacatcggctttgaatttgaggtgaccccccaggagaccgtgatggagaacaacccagaagatggagcctacatcaagggcctcttcctggagggcgcccgctgggacaggaagaccatgcagatcggggagagcctgcccaagatcctgtatgaccccctgcccatcatctggctgaagccaggagagagcgccatgttcctgcaccaggacatctacgtgtgccctgtgtacaagaccagcgcccggcggggcaccctgagcaccaccggccacagcaccaactacgtgctgagcattgagctgcccacagacatgccccagaagcactggatcaacagaggagtggccagcctgtgccagctggacaactag

SEQ ID NO: 150640 - DNA, 2262 bp, synthetic construct
  misc_feature 1..2262: note = Description of Artificial Sequence: Synthetic coding sequence
  source 1..2262: mol_type = other DNA
atgggagacatggactgcagcagccagaagatcgccaagagtgacagcatccaccacatgagccacagccagggccagcctgagctgccccccctgcctgccagcgccaatgaggagcccagcggcctgtaccagacagtgatgagccacagcttctacccacccctgatgcagaggacctcctggaccctggccgcccccttcaaggagcagcaccaccaccggggccccagcgacagcatcgccaacaactacagcctgatggcccaggacctgaagctgaaggacctgctgaaggtgtaccagcctgccaccatctctgtgccccgggacagaacaggccagggcctgcccagcagcggcaacagaagcagcagcgagcccatgaggaagaagaccaagttcagcagcaggaacaaggaggacagcacccgcatcaagctggccttcaagaccagcatcttcagccccatgaagaaggaggtgaagaccagcctgaccttccctggcagccggcccatgagccctgagcagcagctggatgtgatgctgcagcaggagatggagatggagagcaaggagaagaagcccagcgagagtgacctggagcgctactactactacctgaccaacggcatcaggaaggacatgattgcccctgaggagggggaggtgatggtgcgcatcagcaagctgatcagcaacaccctgctgaccagccccttcctggagcccctgatggtggtgctggtgcaggagaaggaaaatgactactactgcagcctgatgaagagcatcgtggactacatcctgatggaccccatggagaggaagaggctcttcatcgagagcatccccaggctcttcccccagagggtcatccgggcccctgtgccctggcacagcgtgtaccgcagcgccaagaagtggaatgaggagcacctgcacacagtgaaccccatgatgctgcggctgaaggagctgtggtttgctgagttccgggacctgcgctttgtgaggacagctgagatcctggccggcaagctgcccctgcagccccaggagttctgggatgtgatccagaagcactgcctggaggcccaccagaccctgctgaacaagtggatccccacctgtgcccagctgttcaccagcaggaaggagcactggatccactttgcccccaagagcaactatgacagcagcagaaatattgaggagtactttgcctctgtggccagcttcatgagcctgcagctgcgggagctggtgatcaagagcctggaggacctggtgtccctcttcatgatccacaaggatggaaatgacttcaaggagccctaccaggagatgaagttcttcatcccccagctgatcatgatcaagctggaggtgtctgagcccatcatcgtgttcaaccccagctttgatggctgctgggagctgatccgggacagcttcctggagatcatcaagaacagcaatggcatccccaaggtggagagcgtgctcttccctgagctgaagggctacaacctgctgctgggcaccgtgaatgctgaggagaagctggtgtctgacttcctgatccagaccttcaaggtgttccagaagaaccaggtgggcccctgcaagtacctgaatgtgtacaagaagtatgtggacctgctggacaacacagctgagcagaacattgctgccttcctgaaggaaaatcatgacattgatgactttgtgaccaagatcaatgccatcaagaagagaagaaatgagatcgcctccatgaacatcaccgtgcccctggccatgttctgcctggatgccacagccctgaaccacgacctgtgtgagcgggcccagaacctgaaggaccacctgatccagttccaggtggatgtgaacagagacaccaacaccagcatctgcaaccagtacagccacatcgctgacaaggtgtctgaggtgcctgccaacaccaaggagctggtgtccctcatcgagttcctgaagaagagcagcgctgtgaccgtcttcaagctgcggcggcagctgagagatgccagcgagcggctggagttcctgatggactatgctgacctgccctatgaggacatcaagctgaacagcaccctcttcctgtggccagaccagatcgaggacatctttgacaacagcaggaacctgctgctgcacaagagggaccaggccgagatggacctgatcaagcgctaccgggagagcctgggcctgtcctggaagtag

SEQ ID NO: 150641 - DNA, 5664 bp, synthetic construct
  misc_feature 1..5664: note = Description of Artificial Sequence: Synthetic coding sequence
  source 1..5664: mol_type = other DNA
atgggcgccaccggccgcctggagctgaccctggccgccccaccccaccctggccctgccttccagaggagcaaggcccgggagacccagggcgaggaggagggcagcgagatgcagatcgccaagagtgacagcatccaccacatgagccacagccagggccagcctgagctgccccccctgcctgccagcgccaatgaggagcccagcggcctgtaccagacagtgatgagccacagcttctacccacccctgatgcagaggacctcctggaccctggccgcccccttcaaggagcagcaccaccaccggggccccagcgacagcatcgccaacaactacagcctgatggcccaggacctgaagctgaaggacctgctgaaggtgtaccagcctgccaccatctctgtgccccgggacagaacaggccagggcctgcccagcagcggcaacagaagcagcagcgagcccatgaggaagaagaccaagttcagcagcaggaacaaggaggacagcacccgcatcaagctggccttcaagaccagcatcttcagccccatgaagaaggaggtgaagaccagcctgaccttccctggcagccggcccatgagccctgagcagcagctggatgtgatgctgcagcaggagatggagatggagagcaaggagaagaagcccagcgagagtgacctggagcgctactactactacctgaccaacggcatcaggaaggacatgattgcccctgaggagggggaggtgatggtgcgcatcagcaagctgatcagcaacaccctgctgaccagccccttcctggagcccctgatggtggtgctggtgcaggagaaggaaaatgactactactgcagcctgatgaagagcatcgtggactacatcctgatggaccccatggagaggaagaggctcttcatcgagagcatccccaggctcttcccccagagggtcatccgggcccctgtgccctggcacagcgtgtacagaagtgccaagaagtggaatgaggagcacctgcacacagtgaaccccatgatgctgcggctgaaggagctgtggtttgctgagttccgggacctgcgctttgtgaggacagctgagatcctggccggcaagctgcccctgcagccccaggagttctgggatgtgatccagaagcactgcctggaggcccaccagaccctgctgaacaagtggatccccacctgtgcccagctgttcaccagcaggaaggagcactggatccactttgcccccaagagcaactatgacagcagcaggaacatcgaggagtactttgcctctgtggccagcttcatgagcctgcagctgcgggagctggtgatcaagagcctggaggacctggtgtccctcttcatgatccacaaggatggaaatgacttcaaggagccctaccaggagatgaagttcttcatcccccagctgatcatgatcaagctggaggtgtctgagcccatcatcgtgttcaaccccagctttgatggctgctgggagctgatccgggacagcttcctggagatcatcaagaacagcaatggcatccccaagctgaagtacatccccctgaagttctccttcaccgctgctgctgctgaccggcagtgtgtgaaggctgctgagcctggagagcccagcatgcacgccgccgccacagccatggccgagctgaagggctacaacctgctgctgggcaccgtgaatgctgaggagaagctggtgtctgacttcctgatccagaccttcaaggtgttccagaagaaccaggtgggcccctgcaagtacctgaatgtgtacaagaagtatgtggacctgctggacaacacagctgagcagaacattgctgccttcctgaaggaaaatcatgacattgatgactttgtgaccaagatcaatgccatcaagaagagaagaaatgagatcgcctccatgaacatcaccgtgcccctggccatgttctgcctggatgccacagccctgaaccacgacctgtgtgagcgggcccagaacctgaaggaccacctgatccagttccaggtggatgtgaacagagacaccaacaccagcatctgcaaccagtacagccacatcgctgacaaggtgtctgaggtgcctgccaacaccaaggagctggtgtccctcatcgagttcctgaagaagagcagcgctgtgaccgtcttcaagctgcggcggcagctgagagatgccagcgagcggctggagttcctgatggactatgctgacctgccctaccagatcgaggacatctttgacaacagcaggaacctgctgctgcacaagagggaccaggccgagatggacctgatcaagcgctgcagcgagtttgagctgcggctggagggctaccaccgggagctggagagcttcaggaagcgggaggtgatgaccacagaggagatgaagcacaacgtggagaagctgaatgagctgagcaagaacctgaacagagcctttgctgagtttgagctgatcaacaaggaggaggagctgctggagaaggagaagagcacctaccccctgctgcaggccatgctgaagaacaaggtgccctatgagcagctgtggagcacagcctatgagttcagcatcaagtctgaggagtggatgaatggccccctcttcctgctgaatgctgagcagattgctgaggagatcggcaacatgtggaggaccacctacaagctgatcaagaccctgagtgatgtgcctgccccccggcggctggccgagaatgtgaagatcaagattgacaagttcaagcagtacatccccatcctgagcatcagctgcaaccctggcatgaaggacagacactggcagcagatcagcgagatcgtgggctatgagatcaagcccacagagaccacctgcctgagcaacatgctggagtttggatttgggaagtttgtggagaagctggagcccatcggggctgctgccagcaaggagtacagcctggagaagaacctggacaggatgaagctggactgggtgaatgtgaccttctcctttgtgaagtacagagacacagacaccaacatcctgtgtgccattgatgacatccagatgctgctggatgaccacgtgatcaagacccagaccatgtgtggcagccccttcatcaagcccatcgaggctgaatgtaggaagtgggaggagaagctgatccgcatccaggacaacctggatgcctggctgaagtgccaggccacctggctgtacctggagcccatcttcagcagcgaggacatcatcgcccagatgcctgaggagggcaggaagtttggaattgtggacagctactggaagagcctgatgagccaggccgtgaaggacaaccgcatcctggtggccgctgaccagcccaggatggccgagaagctgcaggaggccaacttcctgctggaggacatccagaagggcctgaatgactacctggagaagaagaggctcttcttcccccgcttcttcttcctgagcaatgatgagctgctggagatcctgtctgagaccaaggaccccctgcgggtgcagccccacctgaagaagtgctttgagggcatcgccaagctggagttcacagacaacctggagatcgtgggcatgatcagcagcgagaaggagaccgtgcccttcatccagaagatctacccagccaatgccaagggcatggtggagaagtggctgcagcaggtggagcagatgatgctggcctccatgagggaggtgattggcctgggcatcgaggcctacgtgaaggtgcccaggaaccactgggtgctgcagtggccaggccaggtggtgatctgtgtgagcagcatcttctggacccaggaggtgtcccaggccctggccgagaacaccctgctggacttcctgaagaagagcaatgaccagatcgcccagatcgtgcagctggtgcggggcaagctgagcagcggggcccggctgaccctgggcgccctgactgtgattgatgtgcacgccagagatgtggtggccaagctgtctgaggacagagtgtctgacctgaatgacttccagtggatcagccagctgcgctactactgggtggccaaggatgtgcaggtgcagatcatcaccacagaggccctgtatggctatgagtacctgggcaacagcccccggctggtgatcacccccctgacagaccgctgctaccgcaccctgatgggcgccctgaagctgaacctgggcggggcccctgagggccctgctggcaccgggaagacagagaccaccaaggacctggccaaggccctggccaagcagtgtgtggtgttcaactgcagtgatggcctggactacaaggccatgggcaagttcttcaagggcctggcccaggccggggcctgggcctgctttgatgagttcaaccgcatcgaggtggaggtgctgtctgtggtggcccagcagatcctgagcatccagcaggccatcatcaggaagctgaagaccttcatctttgagggcacagagctgagcctgaaccccacctgtgctgtgttcatcaccatgaaccctggctacgccggccgggcagagctgcctgacaacctgaaggccctcttcagaacagtggccatgatggtgcctgactatgccctgattggagagatcagcctgtacagcatgggcttcctggacagccgcagcctggcccagaagatcgtggccacctaccgcctgtgcagcgagcagctgagcagccagcaccactatgactatggcatgagagctgtgaagtctgtgctgacagctgctggcaacctgaagctgaagtacccagaagaaaatgaatctgtgctgctgctgcgggccctgctggatgtgaacctggccaagttcctggcccaggatgtgcccctcttccagggcatcatcagtgacctcttccctggggtggtgctgcccaagccagactatgaggtgttcctgaaggtgctgaatgacaacatcaagaagatgaagctgcagcctgtgccctggttcatcggcaagatcatccagatctatgagatgatgctggtgcgccacggctacatgattgtgggggaccccatgggcggcaagaccagcgcctacaaggtgctggccgccgccctgggggacctgcacgccgccaaccagatggaggagtttgctgtggagtacaagatcatcaaccccaaggccatcaccatgggccagctgtatggctgctttgaccaggtgtcccatgagtggatggatggagtgctggccaatgccttccgggagcaggccagcagcctgagtgatgacaggaagtggatcatctttgatggccctgtggatgccatctggattgagaacatgaacacagtgctggatgacaacaagaagctgtgcctgatgtctggagagatcatccagatgaacagcaagatgagcctcatctttgagcctgctgacctggagcaggccagccctgccaccgtgagccgctgtggcatgatctacatggagccccaccagctgggctggaagcccctgaaggacagctacatggacaccctgcccagcagcctgaccaaggagcacaaggagctgatgaagagcggccagtag

SEQ ID NO: 150642 - DNA, 462 bp, synthetic construct
  misc_feature 1..462: note = Description of Artificial Sequence: Synthetic coding sequence
  source 1..462: mol_type = other DNA
atgctgcacatgggcctggcccacgtgaagaggatgcccaggagcagccggctgcagtgcaaggaggcccaggccttcttcagcctgcagagcggcacctacagagtgctgagcacccccctgaagctgggcgtgtgggaggagaagaagcactgggccgccctgctgcagcctgtgtccctgggcaggaagtggaagaagaggccctgcaacctggatgattatgtgtggggccagctgaagtacatccccctgaagttctccttcaccgctgctgctgctgaccggcagtgtgtgaaggctgctgagcccggggagcccagcatgcatgctgctgccacagccatggccggcaccagggctggcaccacctttgatgagctgcagtgccaggaggacatggtgtgcaccaggtttgagaacaaggcctacgtgaacaccaatgacttcacccggcagtag

SEQ ID NO: 150643 - DNA, 13875 bp, synthetic construct
  misc_feature 1..13875: note = Description of Artificial Sequence: Synthetic coding sequence
  source 1..13875: mol_type = other DNA
atgttccgcatcggccggcggcagctgtggaagcacagcgtgaccagggtgctgacccagaggctgaagggggagaaggaggccaagagggccctgctggatgcccggcacaactacctgtttgccatcgtggccagctgcctggacctgaacaagacagaggtggaggatgccatcctggagggcaaccagatcgagagaattgaccagctgtttgctgtgggcggcctgcggcacctgatgttctactaccaggatgtggaggaggccgagaccggccagctgggcagcctgggcggcgtgaacctggtgtctgggaagatcaagaagcccaaggtgtttgtgacagagggcaatgatgtggccctgactggagtgtgtgtgttcttcatcagaacagaccccagcaaggccatcaccccagacaacatccaccaggaggtgtccttcaacatgctggatgctgctgatggcggcctgctgaacagcgtgcggcggctgctgagtgacatcttcatcccagccctgcgggccaccagccacggctggggcgagctggagggcctgcaggatgctgccaacatccggcaggagttcctgagcagcctggagggctttgtgaatgtgctgagcggggcccaggagagcctgaaggagaaggtgaacctgaggaaatgtgacatcctggagctgaagaccctgaaggagcccacagactacctgaccctggccaacaaccctgagaccctgggcaagattgaggactgcatgaaggtgtggatcaagcagacagagcaggtgctggccgagaacaaccagctgctgaaggaggctgatgatgtgggccccagggctgagctggagcactggaagaagaggctgagcaagttcaactacctgctggagcagctgaagagcccagatgtgaaggctgtgctggccgtgctggccgccgccaagagcaagctgctgaagacctggagggagatggacatccgcatcacagatgccaccaatgaggccaaggacaacgtgaagtacctgtacaccctggagaagtgctgtgaccccctgtacagcagtgaccccctgtccatgatggatgccatccccaccctcatcaatgccatcaagatgatctacagcatcagccactactacaacaccagcgagaagatcaccagcctgtttgtgaaggtgaccaaccagatcatcagcgcctgcaaggcctacatcaccaacaatggaacagccagcatctggaaccagccccaggatgtggtggaggagaagatcctgagcgccatcaagctgaagcaggagtaccagctgtgcttccacaagaccaagcagaagctgaagcagaaccccaatgccaagcagtttgacttcagcgagatgtacatctttgggaagtttgagaccttccaccggcggctggccaagatcatcgacatcttcaccaccctgaagacctacagcgtgctgcaggacagcaccatcgagggcctggaggacatggccaccaagtaccagggcatcgtggccaccatcaagaagaaggagtacaacttcctggaccagaggaagatggactttgaccaggactatgaggagttctgcaagcagaccaatgacctgcacaatgagctgaggaagttcatggatgtgacctttgccaagatccagaacaccaaccaggccctgaggatgctgaagaagtttgagcggctgaacatccccaacctgggcattgatgacaagtaccagctgatcctggagaactacggggctgacatcgacatgatcagcaagctgtacaccaagcagaagtatgacccccccctggccaggaaccagccccccatcgccggcaagatcctgtgggcccggcagctgttccaccgcatccagcagcccatgcagctgttccagcagcaccctgctgtgctgagcacagctgaggccaagcccatcatccgcagctacaacaggatggccaaggtgctgctggagtttgaggtgctcttccaccgggcctggctgcggcagatcgaggagatccacgtgggcctggaggccagcctgctggtgaaggcccctggcactggagagctgtttgtgaactttgacccccagatcctgatcctcttccgggagacagagtgcatggcccagatgggcctggaggtgagccccctggccaccagcctcttccagaagagggaccgctacaagaggaacttcagcaacatgaagatgatgctggccgagtaccagagggtgaagagcaagatcccagctgccatcgagcagctgattgtgccccacctggccaaggtggatgaggccctgcagcccggcctggccgccctgacctggaccagcctgaacatcgaggcctacctggagaacacctttgccaagatcaaggacctggagctgctgctggacagagtgaatgacctgattgagttcagaattgatgccatcctggaggagatgagcagcacccccctgtgccagctgccccaggaggagcccctgacctgtgaggagttcctgcagatgaccaaggacctgtgtgtgaatggagcccagatcctgcacttcaagagcagcctggtggaggaggccgtgaatgagctggtgaacatgctgctggatgtggaggtgctgtctgaggaggagagcgagaagatcagcaatgaaaacagcgtgaactacaagaatgaaagcagcgccaagcgggaggagggcaactttgacaccctgaccagcagcatcaatgcccgggccaatgccctgctgctgaccaccgtgaccaggaagaagaaggagacagagatgctgggggaggaggcccgggagctgctgagccacttcaaccaccagaacatggatgccctgctgaaggtgaccaggaacaccctggaggccatcaggaagaggatccacagcagccacaccatcaacttccgggacagcaacagcgccagcaacatgaagcagaacagcctgcccatcttccgggcctctgtgaccctggccatccccaacatcgtgatggccccagccctggaggatgtgcagcagaccctgaacaaggctgtggagtgcatcatctctgtgcccaagggcgtgcggcagtggagcagcgagctgctgagcaagaagaagatccaggagaggaagatggccgccctgcagagcaatgaagattctgacagtgatgtggagatgggagaaaatgagctgcaggacaccctggagatcgcctctgtgaacctgcccatccctgtgcagaccaagaactactacaagaatgtgtctgagaacaaggagatcgtgaagctggtgtctgtgctgagcaccatcatcaacagcaccaagaaggaggtgatcacctccatggactgcttcaagcgctacaaccacatctggcagaagggcaaggaggaggccatcaagaccttcatcacccagagccccctgctgtctgaatttgagagccagatcctgtacttccagaacctggagcaggagatcaatgctgagccagaatatgtgtgtgtgggcagcatcgccctgtacacagctgacctgaagtttgccctgacagctgagaccaaggcctggatggtggtgattggccgccactgcaacaagaagtacagaagtgagatggagaacatcttcatgctgattgaggagttcaacaagaagctgaaccggcccatcaaggacctggatgacatcagaattgccatggccgccctgaaggagatccgggaggagcagatcagcattgacttccaggtgggccccatcgaggagagctatgccctgctgaacagatatggcctgctgattgcccgggaggagattgacaaggtggacaccctgcactacgcctgggagaagctgctggcccgggccggggaggtgcagaacaagctggtgtccctgcagcccagcttcaagaaggagctgatctctgctgtggaggtgttcctgcaggactgccaccagttctacctggactatgacctgaatggccccatggccagcggcctgaagccccaggaggccagtgacaggctcatcatgttccagaaccagtttgacaacatctacaggaagtacatcacctacacaggaggagaggagctgtttggcctgcctgccacccagtacccccagctgctggagatcaagaagcagctgaacctgctgcagaagatctacaccctgtacaacagcgtgattgaaacagtgaacagctactatgacatcctgtggagcgaggtgaacatcgagaagatcaacaatgagctgctggagttccagaaccgctgcaggaagctgccccgggccctgaaggactggcaggccttcctggacctgaagaagatcattgatgacttcagcgagtgctgccccctgctggagtacatggccagcaaggccatgatggagcggcactgggagcgcatcaccaccctgaccggccacagcctggatgtgggcaatgaaagcttcaagctgaggaacatcatggaggcccccctgctgaagtacaaggaggagattgaggacatctgcatctctgctgtgaaggagcgggacatcgagcagaagctgaagcaggtgatcaatgagtgggacaacaagaccttcaccttcggcagcttcaagaccagaggagagctgctgctgcggggggacagcaccagcgagatcatcgccaacatggaggacagcctgatgctgctgggcagcctgctgagcaaccgctacaacatgcccttcaaggcccagatccagaagtgggtgcagtacctgagcaacagcacagacatcatcgagagctggatgacagtgcagaacctgtggatctacctggaggccgtgtttgtgggcggggacatcgccaagcagctgcccaaggaggccaagcgcttcagcaacatcgacaagtcctgggtgaagatcatgacccgggcccacgaggtgcccagcgtggtgcagtgctgcgtgggagatgagaccctgggccagctgctgccccacctgctggaccagctggagatctgccagaagagcctgaccggctacctggagaagaagaggctgtgcttcccccgcttcttctttgtgtctgaccctgccctgctggagatcctgggccaggccagtgacagccacaccatccaggcccacctgctgaatgtgtttgacaacatcaagtctgtgaagttccacgagaagatctatgaccgcatcctgagcatcagcagccaggagggggagaccatcgagctggacaagcctgtgatggccgagggcaatgtggaggtgtggctgaacagcctgctggaggagagccagagcagcctgcacctggtgatccggcaggccgccgccaacatccaggagaccggcttccagctgacagagttcctgagcagcttccctgcccaggtgggcctgctgggcatccagatgatctggacccgggacagcgaggaggccctgagaaatgccaagtttgacaagaagatcatgcagaagaccaaccaggccttcctggagctgctgaacaccctgattgatgtgaccacccgggacctgagcagcacagagcgggtgaagtatgagaccctcatcaccatccacgtgcaccagagggacatctttgatgacctgtgccacatgcacatcaagagccccatggactttgagtggctgaagcagtgccgcttctacttcaatgaagacagcgacaagatgatgatccacatcacagatgtggccttcatctaccagaatgagttcctgggctgcacagaccggctggtgatcacccccctgacagaccgctgctacatcaccctggcccaggccctgggcatgtccatgggcggggccccagctggccctgctggcaccgggaagacagagaccaccaaggacatgggccgctgcctgggcaagtatgtggtggtgttcaactgcagcgaccagatggacttccggggcctgggccgcatcttcaagggcctggcccagagcggctcctggggctgctttgatgagttcaacagaattgacctgcctgtgctgtctgtggccgcccagcagatcagcatcatcctgacctgcaagaaggagcacaagaagagcttcatcttcacagatggagacaacgtgaccatgaaccctgagtttggcctcttcctgaccatgaaccctggctacgccggccggcaggagctgcctgagaacctgaagatcaacttccgctctgtggccatgatggtgcctgaccggcagatcatcatccgggtgaagctggccagctgtggcttcatcgacaacgtggtgctggccaggaagttcttcaccctgtacaagctgtgtgaggagcagctgagcaagcaggtgcactatgactttggcctgaggaacatcctgtctgtgctgcggaccctgggcgccgccaagagggccaaccccatggacacagagagcaccatcgtgatgagggtgctgcgggacatgaacctgagcaagctgattgatgaagatgagcccctcttcctgagcctgattgaggacctcttccccaacatcctgctggacaaggccggctacccagagctggaggccgccatcagccggcaggtggaggaggccggcctcatcaaccaccccccctggaagctgaaggtgatccagctgtttgagacccagagggtgcgccacggcatgatgaccctgggccccagcggggccggcaagaccacctgcatccacaccctgatgagggccatgacagactgtgggaagccccaccgggagatgaggatgaaccccaaggccatcacagccccccagatgtttggccgcctggatgtggccaccaatgactggacagatggcatcttcagcaccctgtggaggaagaccctgcgggccaagaagggggagcacatctggatcatcctggatggccctgtggatgccatctggattgagaacctgaacagcgtgctggatgacaacaagaccctgaccctggccaatggagaccgcatccccatggcccccaactgcaagatcatctttgagccccacaacatcgacaatgccagccctgccaccgtgtccagaaatggcatggtgttcatgagcagcagcatcctggactggagccccatcctggagggcttcctgaagaagaggagcccccaggaggccgagatcctgcggcagctgtacacagagagcttcccagacctgtaccgcttctgcatccagaacctggagtacaagatggaggtgctggaggcctttgtgatcacccagagcatcaacatgctgcagggcctcatccccctgaaggagcagggcggggaggtgtcccaggcccacctgggccgcctgtttgtgtttgccctgctgtggagcgctggggccgccctggagctggatggaagaagaaggctggagctgtggctgcggagccggcccaccggcaccctggagctgcccccacctgctggccctggggacacagcctttgactactacgtggccccagatggcacctggacccactggaacaccaggacccaggagtacctgtaccccagcgacaccaccccagaatatggcagcatcctggtgcccaacgtggacaacgtgaggacagacttcctgatccagaccatcgccaagcagggcaaggctgtgctgctgattggagagcagggcacagccaagacagtcatcatcaagggcttcatgagcaaatatgaccctgagtgccacatgatcaagagcctgaacttcagcagcgccaccacccccctgatgttccagaggaccatcgagagctatgtggacaagaggatgggcaccacctacggccccccagctgggaagaagatgacagtgttcattgatgatgtgaacatgcccatcatcaatgagtggggagaccaggtgaccaatgaaattgtgcggcagctgatggagcagaatggcttctacaacctggagaagccaggagagttcaccagcatcgtggacatccagttcctggccgccatgatccaccctgggggcggcagaaatgacatcccccagaggctgaagaggcagttcagcatcttcaactgcaccctgcccagcgaggcctctgtggacaagatctttggagtcatcggcgtgggccactactgcacccagaggggcttcagcgaggaggtgcgggacagcgtgaccaagctggtgcccctgacccggcggctgtggcagatgaccaagatcaagatgctgcccaccccagccaagttccactacgtgttcaacctgcgggacctgagccgggtgtggcagggcatgctgaacaccaccagcgaggtgatcaaggagcccaatgacctgctgaagctgtggaagcatgagtgcaagagggtgattgctgaccgcttcaccgtgtccagtgatgtgacctggtttgacaaggccctggtgtccctggtggaggaggagtttggagaggagaagaagctgctggtggactgtggcatcgacacctactttgtggacttcctgagagatgcccctgaggccgccggggagaccagcgaggaggctgatgctgagacccccaagatctatgagcccatcgagagcttcagccacctgaaggagcggctgaacatgttcctgcagctgtacaatgaaagcatccggggggccggcatggacatggtgttctttgctgatgccatggtgcacctggtgaagatcagcagggtcatccgcaccccccagggcaatgccctgctggtgggcgtgggcggcagcggcaagcagagcctgacccggctggccagcttcatcgccggctacgtgtccttccagatcaccctgaccaggagctacaacaccagcaacctgatggaggacctgaaggtgctgtacagaacagctggccagcagggcaagggcatcaccttcatcttcacagacaatgagatcaaggatgagagcttcctggagtacatgaacaacgtgctgagcagtggagaggtgagcaacctgtttgccagagatgaaattgatgagatcaacagcgacctggcctctgtgatgaagaaggagttcccccgctgcctgcccaccaatgaaaacctgcatgactacttcatgagccgggtgcggcagaacctgcacatcgtgctgtgcttcagccctgtgggggagaagttcaggaacagagccctgaagtttcctgccctgatcagcggctgcaccatcgactggttcagccgctggcccaaggatgccctggtggccgtgtctgagcacttcctgaccagctatgacatcgactgcagcctggagatcaagaaggaggtggtgcagtgcatgggcagcttccaggatggagtggccgagaagtgtgtggactacttccagcgcttccgccgcagcacccacgtgacccccaagagctacctgtccttcatccagggctacaagttcatctatggagagaagcacgtggaggtgaggaccctggccaacaggatgaacacaggcctggagaagctgaaggaggccagcgagagcgtggccgccctgagcaaggagctggaggccaaggagaaggagctgcaggtggccaatgacaaggctgacatggtgctgaaggaggtgaccatgaaggcccaggccgctgagaaggtgaaggccgaggtgcagaaggtgaaggaccgggcccaggccatcgtggacagcatcagcaaggacaaggccatcgccgaggagaagctggaggccgccaagccagccctggaggaggccgaggccgccctgcagaccatccggcccagcgacatcgccaccgtgaggaccctgggccggcccccccacctgatcatgaggatcatggactgtgtgctgctgctcttccagaggaaggtgtctgctgtgaagattgacctggagaagagctgcaccatgcccagctggcaggagagcctgaagctgatgacagctggcaacttcctgcagaacctgcagcagttccccaaggacaccatcaatgaggaggtgattgagttcctgagcccctactttgagatgccagactacaacattgaaacagccaagagggtgtgtggaaatgtggccggcctgtgctcctggaccaaggccatggccagcttcttcagcatcaacaaggaggtgctgcccctgaaggccaacctggtggtgcaggagaacagacacctgctggccatgcaggacctgcagaaggcccaggccgagctggatgacaagcaggccgagctggatgtggtgcaggccgagtatgagcaggccatgacagagaagcagaccctgctggaggatgctgagcgctgccgccacaagatgcagacagccagcaccctcatcagcggcctggccggggagaaggagcgctggacagagcagagccaggagtttgctgcccagaccaagaggctggtgggagatgtgctgctggccacagccttcctgagctacagcggccccttcaaccaggagttccgggacctgctgctgaatgactggaggaaggagatgaaggccaggaagatcccctttgggaagaacctgaacctgtctgagatgctgattgatgcccccaccatcagcgagtggaacctgcagggcctgcccaatgatgacctgagcatccagaatggcatcatcgtgaccaaggccagccgctaccccctgctgattgacccccagacccagggcaagatctggatcaagaacaaggagagcagaaatgagctgcagatcaccagcctgaaccacaagtacttcaggaaccacctggaggacagcctgagcctgggccggcccctgctgattgaagatgtgggggaggagctggaccctgccctggacaacgtgctggagaggaacttcatcaagacaggcagcaccttcaaggtgaaggtgggggacaaggaggtggatgtgctggatggcttccggctgtacatcaccaccaagctgcccaacccagcctacaccccagagatcagcgcccggaccagcatcatcgacttcaccgtgaccatgaagggcctggaggaccagctgctgggccgggtcatcctgacagagaagcaggagctggagaaggagaggacccacctgatggaggatgtgacagccaacaagaggaggatgaaggagctggaggacaacctgctgtaccgcctgaccagcacccagggcagcctggtggaggatgagagcctcatcgtggtgctgagcaacaccaagaggacagctgaggaggtgacccagaagctggagatctctgctgagacagaggtgcagatcaacagcgcccgggaggagtacagacctgtggccacccggggcagcatcctgtacttcctgatcacagagatgaggctggtgaatgagatgtaccagaccagcctgcggcagttcctgggcctgtttgacctgagcctggcccggtctgtgaagagccccatcaccagcaagagaattgccaacatcatcgagcacatgacctatgaggtgtacaagtatgctgcccggggcctgtatgaggagcacaagttcctgttcaccctgctgctgaccctgaagattgacatccagaggaacagagtgaagcatgaggagttcctgaccctcatcaagggcggggccagcctggacctgaaggcctgcccccccaagcccagcaagtggatcctggacatcacctggctgaacctggtggagctgagcaagctgcggcagttcagtgatgtgctggaccagatcagcagaaatgagaagatgtggaagatctggtttgacaaggagaaccctgaggaggagcccctgcccaatgcctatgacaagagcctggactgcttccggcggctgctgctgatccgctcctggtgcccagacaggaccatcgcccaggccaggaagtacatcgtggacagcatgggagagaagtatgcagagggcgtcatcctggacctggagaagacctgggaggagagtgaccccaggacccccctcatctgcctgctgtccatgggcagtgaccccacagacagcatcatcgccctgggcaagaggctgaagattgagacccgctacgtgtccatgggccagggccaggaggtgcacgccaggaagctgctgcagcagaccatggccaatggaggctgggccctgctgcagaactgccacctgggcctggacttcatggatgagctgatggacatcatcattgaaacagagctggtgcatgatgccttccggctgtggatgaccacagaggcccacaagcagttccccatcaccctgctgcagatgagcatcaagtttgccaatgaccccccccagggcctgcgggccggcctgaagaggacctacagcggcgtgtcccaggacctgctggatgtgagcagcggcagccagtggaagcccatgctgtatgctgtggccttcctgcacagcacagtgcaggagaggaggaagtttggagccctgggctggaacatcccctatgagttcaaccaggccgacttcaatgccaccgtgcagttcatccagaaccacctggatgacatggatgtgaagaagggcgtgtcctggaccaccatccgctacatgattggagagatccagtatggaggccgggtgacagatgattatgacaagaggctgctgaacacctttgccaaggtgtggttcagcgagaacatgtttggaccagacttctccttctaccagggctacaacatccccaagtgcagcacagtggacaactacctgcagtacatccagagcctgcctgcctatgacagccctgaggtgtttggcctgcaccccaatgctgacatcacctaccagagcaagctggccaaggatgtgctggacaccatcctgggcatccagcccaaggacaccagcggcggcggagatgagacccgggaggccgtggtggcccggctggctgatgacatgctggagaagctgcccccagactatgtgccctttgaggtgaaggagcggctgcagaagatgggccccttccagcccatgaacatcttcctgcggcaggagattgacaggatgcagagggtgctgagcctggtgcgcagcaccctgacagagctgaagctggccattgatggcaccatcatcatgtctgagaacctgagagatgccctggactgcatgtttgatgcccgcatcccagcctggtggaagaaggcctcctggatcagcagcaccctgggcttctggttcacagagctgattgaaagaaacagccagttcacctcctgggtgttcaacggccggccccactgcttctggatgacaggcttcttcaacccccagggcttcctgacagccatgaggcaggagatcacccgggccaacaagggctgggccctggacaacatggtgctgtgcaatgaggtgaccaagtggatgaaggatgacatcagcgccccacccacagagggcgtgtatgtgtatggcctgtacctggagggcgccggctgggacaagaggaacatgaagctgattgagagcaagcccaaggtgctgtttgagctgatgcctgtgatccgcatctatgcagagaacaacaccctgcgggacccccgcttctacagctgccccatctacaagaagcctgtgaggacagacctgaactacatcgctgctgtggacctgaggacagcccagaccccagagcactgggtgctgcggggcgtggccctgctgtgtgatgtgaagtag

SEQ ID NO: 150644 - DNA, 12477 bp, synthetic construct
  misc_feature 1..12477: note = Description of Artificial Sequence: Synthetic coding sequence
  source 1..12477: mol_type = other DNA
atgaccttccgggccacagacagcgagtttgacctgaccaacatcgaggagtatgcagagaacagcgccctgagccggctgaacaacatcaaggccaagcagagggtgtcctatgtgaccagcacagaaaatgaaagtgacacccagatcctgaccttccgccacatcaccaaggcccaggagaagaccaggaagaggcagcagcccatcaagctggagcccctgcctgtgctgaaggtgtaccaggaccacaagcagcctgagtacatccacgagcagaaccgcttccagctgatgacagctggcatcatcaagaggcctgtgtccatcgccaagaagagctttgccaccagcagcacccagttcctggagcaccaggatgctgtgaagaagatgcagatccaccggccctacgtggaggtgttcagccccagcccccccaagctgccccacacaggcatcggcaagaggggcctgtttggcaccaggagcagcgcctaccccaagtacaccttccatgaccgggaggaggtggtgaaggccaacatccgggaccccctgcagatcatcaagatcatcagagaaaatgagcacctgggcttcctgtacatgatcccagctgtgcccaggagcagcattgaatatgacacctacaacctgaaggtggtgtcctatgagaacatcaacaagaatgactactacaccatcagccagagagctgtgacccacatctacaatgaagatattgagttcatcgagattgaccgctgggagcaggagtacctgtaccaccgggagctgaccaagatccccatcttcagcctcttcaggaagtggaaggccttctctgtgtggaggaagaatgtgcgcagcaagaagatcaccggctgccagaagagcctgcagaagaacctcttcatcgtgaacccccacctgcggcctgccctgctgaagatcaatgagctgtgctaccacctgtccttcatgggcctgtgctacatcgagaagtgccacacctacaccctgcaggagttcaaggccgcccaggtgatccggctggccgaggtgacagagcggctgggggagttcagaaatgaggccaagtatgtggtgcggcgggcctgccgctttgccctgcgggccgccggctttgtgcctgatgactgtgccttcggcccctttgaggactaccacaaggtgcagagcagcggcagcttcatcaacacccctcatgagctgcccacctacggggacagcgagaagatgacctacacagagcaggccagcaagaggcactactgcatgaggctgacctgcttcatccggctgaatgactacctgattgagaacaccatgcacatcctgactgtgaatgctgtgaacagcctgctgaaccacctgacagacaagctgaagaggacccccagcgcagatgtgatccagaagtggatcacagaggagaagccagaggtgcctgacaagaagggcaccctgatggtggagaagcaggaggaggatgagagcctcatccccatgttcctgacagagctgatgctgactgtgcagagcctgctgtttgagcccagcctggaggacttcctggatggcatcctgggcgctgtgaaccactgccagaacacagtgctgtctgtgcccaacctggtgcctgacagctactttgatgccttcaccagcccctacatcaacaacaagctggagggcaagacctgtggcaccggccccagcctggccgctgtgtttgaagatgacaagaacttccacaccatcatcagccagatcaaggagaccatccaggccgcctttgagagcgcccgcatctatgctgccacctttgagaagttccagatcttcttcaaggaaaatgaaagcctggacctgcaggccctgaagctgcaggagccagacatcaacttcttcagcgagcagctggagaagtaccacaagcagcacaaggatgctgtggccctgcggcccaccagaaatgtgggcctgctgctgattgacacccggctgctgcgggagaagctgatccccagccccctgcgctgcctggaggtgctgaacttcatgctgccccggcagagcaagaagaaggtggatgccatcatctttgaggcccaggatgctgagtacaagctggagtttgtgcccaccaccaccacagaatatgtgcacagcctgctcttcctggatgagatccaggagcgcatcgagagcctggaggatgagggcaacatcgtgacccagatgtacaagctgatggagcagtaccaggtgcccaccccaccagaagattttgctgtgtttgccaccatgaagcccagcatcgtggccgtgagaaatgccatcgacaagtctgtgggggaccgggagagcagcatcaagcagttctgtgtgcacctgggcagtgacctggaggagctgaacaatgaggtgaatgaggtgaagctgcaggcccaggacccccagatcctggacatctctgctgaccaggacaagatccgcctcatcctgaacaacctgcagagcgtgctggccgacctgcagaagagggccttccagtacaagagctaccagaagaacttcaaggtggaggtgtccaagtttgaggccctggaggaggtgtctgctgagctgaagctgaagcagctgctgtgggacagcttcagcgagtgggacaagctgcagcaggagtggctgaagagcaagtttgactgcctggaccctgaggtgctgaatggccaggtgtccaaatatgccaagtttgtgacccagctggagaagggcctgccccccaacagcgtggtgccccagctgaagtacaaggtggagaagatgaaggagaagctgcccgtcatcatcgacctgaggaaccccaccctgaaggcccggcactgggccgccatcgagcagacagtggatgccaccctggtggatgctgagatccccctgaccctggagcggctgagccagctgcacgtgtttgattttggccaggagatccaggacatcagcggccaggccagcggggaggccgccctggaggccatcctgaagaaggtggaggacagctggaagaccacagaatttgtgatcctgccccaccgggacagcaaggatgtgttcatcctgggcggcacagatgacatccaggtgctgctggatgacagcaccatcaacgtggccaccctggccagcagccgctacctgggccccctgaagaccagggtggatgagtggcagaagcagctggccctcttcaaccagaccctggaggagtggctgacctgccagaggaactggctgtacctggagagcatcttcaatgccccagacatccagaggcagctgcctgctgaggccaagatgttcctgcaggtggacaagtcctggaaggagatcatgaggaaggtgaaccggctgcccaatgccctgcgggccgccacccagcccggcctgctggagaccttccagaacaacaatgccctgctggaccagatccagaagtgcctggaggcctacctggagagcaagagggtcatcttcccccgcttctacttcctgagcaatgatgagctgctggagatcctggcccagaccaggaacccccaggccgtgcagccccacctgaggaaatgttttgacagcatcagcaagctggagtttgccctgatgcctcctgctgagggcaagatccctggcattgatggagagcctgagaaggtgtacaccaatgacatcctggccatgctgagccctgagggggagcgggtgtccctgggcaagggcctgaaggcccggggaaatgtggaggagtggctgggcaaggtggaggaggccatgttcaccagcctgcggcggctgtgcaaggccgccatcgctgactaccagggcaagctgaggacagactgggtggtggccggccaccccagccaggtgatcctgactgtgtcccagatcatgtggtgccgggacctgacagaatgtctggagacagagcacagcaaccacatccaggccctgaagaactttgagaaggtgaactttgagcggctgaatgccctggccgccatcgtgcagggcagcctgcccaagctgcacaggaacatcctgacagccctgatcaccattgatgtgcacgcccgggacatcgtgacagagctggtgcagagcaaggtggagaccgtggagagctttgactggcagaggcagctgcgctactactgggacatcgacctggacaactgtgtggccaggatggccctgagccagtacacctacggctatgagtacctgggcgcctgcccccggctggtgatcacccccctgacagaccgctgctacctgtgcctgatgggcgccctgcagctggacctgggcggggccccagctggccctgctggcaccgggaagacagagaccaccaaggacctggccaaggccctggccatccagtgtgtggtgttcaactgcagtgatggcctggactacaagatgatgggccgcttcttcagcggcctggcccagagcggggcctggtgctgctttgatgagttcaacagaattgatattgaggtgctgtctgtgattgcccagcagctgatcaccatcagaaatgccaaggccgccaagctgagccgcttcatgtttgagggccgggagatcaagctggtgatgacctgtgccgccttcatcaccatgaaccctggctacgccggccgcacagagctgcctgacaacctgaaggccctcttccggccctttgccatgatggtgcccaactatgccctgattgctgaggtgatcctgtacagcgagggctttgagagcagcaagatcctggccaggaagatgacccagatgtacaagctgtgcagcgagcagctgagccagcaggaccactatgactttggcatgagagctgtgaagtctgtgctggtgatggccggcagcctgaagcgggagaacccagacctgaatgaagatgtggtgctgatccgggccctgcaggacagcaacctgcccaagttcctgacagatgatgccctgctcttcagcggcatcatcagtgacctcttccctggggtgcagatccctgagcatgactatggcatcctgcagagcaccatcgtggatgtgatgaaccggcagaacctgcagcctgagatgtgcatggtgaggaaggtgatccagttctatgagaccatgctggtgagacatggagtgatgctggtgggccccactggaggcggcaagaccaccgtgtaccgcatcctggccgagaccctgggcaacctgcagaagctgggcattgaaaattccttctaccaggccgtgaagacctacgtgctgaaccccaagagcatcaccatgggagagctgtatggagaggtgaacaacctgaccctggagtggaaggatggcctgatggccctgtctgtgcgggctgctgtgaatgacaccagcgaggaccacaagtggatcatcagtgatggccctgtggatgccctgtggattgagaacatgaacacagtgctggatgacaacaagatgctgtgcctggccaacagcgagcgcatcaagctgaccccccagatccacatgctgtttgaggtgcaggacctgcgggtggccagccctgccaccgtgagccgctgtggcatggtgtttgtggaccctgaggagctgaagtggatgccctacgtgaagacctggatgaagggcatcagcaagaagctgacagaggagacccaggagtacatcctgaacctcttccagagatatgtggatgagggcctgcacttcatcaacaagaagtgcagccaggccatcccccaggtggacatcagcaaggtgaccaccctgtgctgcctgctggagagcctcatcctgggcaaggatggagtgaacctggccatggagcagaccaagctgaacaccatcctgtgccagacctttgtgttctgctacctgtggagcctgggcggcaacctgacagagaactactatgacagctttgacaccttcatccgcacccagtttgatgacaacccagatgcccggctgcccaacagcggggacctgtggagcatccacatggactttgacaccaagaggctggacccctgggagcgcatcatccccaccttcaagtacaacagagatgtgcccttctttgagatgctggtgcccaccacagacacagtgcgctatggctacctgatggagaagctgctggccgtgaagcacagcgtgctcttcaccggcatcaccggggtgggcaagtctgtgattgccaagggcctgctgaacaagatccaggagagcgctggctacgtgcctgtgtacctgaacttcagcgcccagaccagcagcgcccggacccaggagatcatcgagagcaagctggagaggaagaggaagaacatcctgggcgcccctggcaacaagagaattgtcatctttgtggatgacctgaacatgccccggctggacagatatggcagccagccccccatcgagctgctgcggcagtaccaggactttggaggcttctatgacaggaacaagctgttctggaaggagatccaggatgtgaccatcatcagcgcctgtgcccctcctgggggcggcagaaatcctgtgaccccccgcttcatccgccacttctccatgctgtgcctgcccatgcccagcgagcacagcctgaagcagatcttccaggccatcctgaatggcttcctgagtgacttccccccagctgtgaagcagacagccagcagcatcgtggaggcctctgtggagatctacaacaagatgtctgtggacctgctgcccaccccagccaagagccactacgtgttcaacctgcgggacctgagcaaatgtgtgcagggcatcctgcagtgtgaccccggcaccatccgggaggagatccagatcttccgcctcttctgccacgagtgccagagggtcttccatgacaggctcatcaacaatgaagacaagcactacttccacgtgatcctgacagagatggccaacaagcacttcggcatcgccatcgacctggagtacttcctgaacaagcccatcatctttggagacttcatcaagtttggagctgacaaggctgaccgcatctatgatgacatgccagacatcgagaagacagccaacgtgctgcaggactacctggatgactacaacctgaccaaccccaaggaggtgaagctggtgttcttccaggatgccatcgagcacgtgagccgcatcgccaggatgatccggcaggagagaggaaatgccctgctggtgggcgtgggcggcaccgggaagcagagcctgacccggctggccgcccacatctgtggctacaagtgcctgcagatcgagctgagccggggctacaactatgacagcttccacgaggacctgaggaagctgtacaagatggccggcgtggaggacaagaacatggtgttcctgttcacagacacccagatcgtggtggaggagttcctggaggacatcaacaacatcctgaacagcggggaggtgcccaacctgtttgagaaggatgagctggagcaggtgctggccgccacccggccccgggccaaggaggtgggcatcagcgagggcaacagagatgaggtgttccagtacttcatcagcaaggtgcggcagaagctgcacatcgtgctgtgcatgagccctgtgggggaggccttccgcagccgctgcaggatgttccccagcctggtgaactgctgcaccatcgactggtttgtgcagtggccccgggaggccctgctgtctgtgtccaagaccttcttcagccaggtggatgctggaaatgaggagctgaaggagaagctgcccctgatgtgtgtgaatgtgcacctgtctgtgtcctccatggccgagcgctactacaatgagctgcggcggcgctactacaccacccccaccagctacctggagctgatcaacctgtacctgtccatgctgtctgagaagaggaagcagatcatcagcgcccgggacagagtgaagaatggcctgaccaagctgctggagaccaacatcctggtggacaagatgaagctggacctgagcgccctggagcctgtgctgctggccaagtcagaagatgtggaggccctgatggagaagctggccgtggaccaggagagcgctgaccaggtgaggaacacagtgcaggaggatgaggccacagccaaggtgaaggccgaggagacccaggccatcgcagatgatgcccagagggacctggatgaggccctgcctgccctggatgctgccaacaaggccctggacagcctggacaaggctgacatcagcgagatccgggtcttcaccaagcccccagacctggtgatgacagtgatggaggccatcagcatcctgctgaatgccaagccagactggcccagcgccaagcagctgctgggggacagcaacttcctgaagaggctgctggagtatgacaaggagaacatcaagccccagatcctggccaagctgcagaagtacatcaacaacccagactttgtgcctgagaaggtggagaaggtgtccaaggcctgcaagtccatgtgcatgtgggtgcgggccatggacctgtacagccgggtggtgaaggtggtggagcccaagaggcagaagctgcgggccgcccaggccgagctggacatcaccatggccaccctgcgggagaagcaggccctgctgcggcaggtggaggaccagatccaggccctgcaggatgaatatgacaagggcgtgaatgagaaggagagcctggccaagaccatggccctgaccaaggcccggctggtgcgggccggcaagctgacagctgccctggaggatgagcaggtgcgctgggaggagagcatccagaagtttgaggaggagatcagcaacatcactggaaatgtgttcatcgccgccgcctgtgtggcctactacggggccttcaccgcccagtaccggcagagcctgattgagtgctggatccaggactgccagagcctggagatccccatcgaccccagcttcagcctcatcaacatcctgggggacccctatgagatccggcagtggaacacagatggcctgccccgggacctgatcagcacagaaaatggcatcctggtgacccagggccgccgctggcccctgatgattgacccccaggaccaggccaaccgctggatccggaacaaggagagcaagagcggcctgaagatcatcaagctgacagacagcaacttcctgcgcatcctggagaacagcatccggctgggcctgcctgtgctgctggaggagctgaaggagaccctggaccctgccctggagcccatcctgctgaagcagatcttcatcagcggcggccgcctgctgatccggctgggggacagcgacattgattatgacaagaacttccgcttctacatgaccaccaagatgcccaacccccactacctgcctgaggtgtgcatcaaggtgaccatcatcaacttcaccgtgaccaagagcggcctggaggaccagctgctgagtgatgtggtgcggctggagaagccccggctggaggagcagaggatcaagctgattgtgcgcatcaacacagacaagaaccagctgaagaccatcgaggagaagatcctgaggatgctgttcaccagcgagggcaacatcctggacaatgaggagctgattgacaccctgcaggacagcaagatcaccagcggggccatcaagacccggctggaggaggccgagagcacagagcagatgatcaacgtggcccgggagaagtacagacctgtggccacccagggctctgtgatgtactttgtgattgccagcctgtctgaaattgaccccatgtaccagtacagcctgaagtacttcaagcagctgttcaacaccaccatcgagacctctgtgaagacagagaacctgcagcagaggctggatgtgctgctggagcagaccctgctgacagcctacgtgaatgtgtcccggggcctgtttgagcagcacaagctgatctacagcttcatgctgtgtgtggagatgatgaggcagcagggcaccctgagtgatgctgagtggaacttcttcctgcggggcagcgctggcctggagaaggagaggcctcccaagccagaggccccctggctgcccacagccacctggtttgcctgctgtgacctggaggagagcttccctgtgttccacggcctgacccagaacatcctgagccaccccatcagcatccggctgggcagctttgagacctacatcaacccccagaagtgggagggctacagcaagatgaagcatgaggacaagcacatgaggcaggagaaggaggccgcccaccaggacccctggagcgctggcctgagcagcttccacaagctgatcctgatcaagtgctgcaaggaggagaaggtggtgtttgccctgacagactttgtgattgagaacctgggcaagcagttcatcgagaccccacctgtggacctgcccaccctgtaccaggacatgagctgcaacacccccctggtgttcatcctgagcacaggcagtgaccccatgggcgccttccagagatttgcccgggagagcggctacagcgagcgggtgcagagcatcagcctgggccagggccagggccccatcgccgagaagatggtgaaggatgccatgaagagcggcaactgggtgttcctgcagaactgccacctggccgtgtcctggatgctggccatggaggagctgatcaagaccttcacagatcctgattctgccatcaaggacaccttccgcctcttcctgagctccatgcccagcaacaccttccctgtgacagtgctgcagaacagcgtgaaggtgaccaatgagccccccaagggcctgcgggccaacatcagaagagccttcacagagatgacccccagcttctttgaggagaacatcctgggcaagaagtggaggcagatcatcttcggcatctgcttcttccacgccatcatccaggagaggaagaagtttggccccctgggctggaacatctgctatgagttcaatgacagcgaccgggagtgtgccctgctgaacctgaagctgtactgcaaggagggcaagatcccctgggatgccctgatctacatcaccggggagatcacctatggaggccgggtgacagacagctgggaccagcgctgcctgcggaccatcctgaagcgcttcttcagccctgagaccctggaggaggactacaagtacagcgagagcggcatctactttgcccccatggctgacagcctgcaggagttcaaggactacatcgagaacctgcccctgattgatgatcctgagatcttcggcatgcatgaaaatgccaacctggtgttccagtacaaggagaccagcaccctcatcaacaccatcctggaggtgcagcccaggagcagcactggaggagagggcaagagcaatgatgaaattgtgcaggagctggtggcctctgtgcagaccagggtgcctgagaagctggagatggagggcgccagcgagagcctgtttgtgaaggacctgcagggccgcctgaacagcctgaccaccgtgctgggccaggaggtggaccgcttcaacaacctgctgaagctgatccacaccagcctggagaccctgaacaaggccatcgccggctttgtggtgatgtctgaggagatggagaaggtgtacaacagcttcctgaacaaccaggtgcctgccctgtggagcaacacagcctaccccagcctgaagcccctgggctcctgggtgaaggacctgatcctgcggaccagctttgtggacctgtggctgaagaggggccagcccaagagctactggatcagcggcttcttcttcccccagggcttcctgaccggcaccctgcagaaccacgccaggaagtacaacctgcccattgatgagctgtccttcaagtacagcgtcatccccacctacagagaccaggccgctgtgattgaagctgccaagacagtgcagtttggccaggagctgcccatggacatggagctgcccagcccagaagatggagtgctggtgcacggcatgttcatggatgccagccgctgggatgacaaggagatggtgattgaagatgccctgcccggccagatgaaccctgtgctgcctgtggtgcactttgagccccagcagaactacaagcccagccccaccctgtaccactgccccctgtacaagacaggagcccgggccggcaccctgagcaccaccggccacagcaccaactttgtggtgacagtgctgctgcccagcaagaggagcaaggactactggatcgccaagggcagcgccctgctgtgccagctgtctgagtag

SEQ ID NO: 150645 - DNA, 12477 bp, synthetic construct; identical to SEQ ID NO: 150644
  misc_feature 1..12477: note = Description of Artificial Sequence: Synthetic coding sequence
  source 1..12477: mol_type = other DNA

SEQ ID NO: 150646 - DNA, 7593 bp, synthetic construct
  misc_feature 1..7593: note = Description of Artificial Sequence: Synthetic coding sequence
  source 1..7593: mol_type = other DNA
atgaccttccgggccacagacagcgagtttgacctgaccaacatcgaggagtatgcagagaacagcgccctgagccggctgaacaacatcaaggccaagcagagggtgtcctatgtgaccagcacagaaaatgaaagtgacacccagatcctgaccttccgccacatcaccaaggcccaggagaagaccaggaagaggcagcagcccatcaagctggagcccctgcctgtgctgaaggtgtaccaggaccacaagcagcctgagtacatccacgagcagaaccgcttccagctgatgacagctggcatcatcaagaggcctgtgtccatcgccaagaagagctttgccaccagcagcacccagttcctggagcaccaggatgctgtgaagaagatgcagatccaccggccctacgtggaggtgttcagccccagcccccccaagctgccccacacaggcatcggcaagaggggcctgtttggcaccaggagcagcgcctaccccaagtacaccttccatgaccgggaggaggtggtgaaggccaacatccgggaccccctgcagatcatcaagatcatcagagaaaatgagcacctgggcttcctgtacatgatcccagctgtgcccaggagcagcattgaatatgacacctacaacctgaaggtggtgtcctatgagaacatcaacaagaatgactactacaccatcagccagagagctgtgacccacatctacaatgaagatattgagttcatcgagattgaccgctgggagcaggagtacctgtaccaccgggagctgaccaagatccccatcttcagcctcttcaggaagtggaaggccttctctgtgtggaggaagaatgtgcgcagcaagaagatcaccggctgccagaagagcctgcagaagaacctcttcatcgtgaacccccacctgcggcctgccctgctgaagatcaatgagctgtgctaccacctgtccttcatgggcctgtgctacatcgagaagtgccacacctacaccctgcaggagttcaaggccgcccaggtgatccggctggccgaggtgacagagcggctgggggagttcagaaatgaggccaagtatgtggtgcggcgggcctgccgctttgccctgcgggccgccggctttgtgcctgatgactgtgccttcggcccctttgaggactaccacaaggtgcagagcagcggcagcttcatcaacacccctcatgagctgcccacctacggggacagcgagaagatgacctacacagagcaggccagcaagaggcactactgcatgaggctgacctgcttcatccggctgaatgactacctgattgagaacaccatgcacatcctgactgtgaatgctgtgaacagcctgctgaaccacctgacagacaagctgaagaggacccccagcgcagatgtgatccagaagtggatcacagaggagaagccagaggtgcctgacaagaagggcaccctgatggtggagaagcaggaggaggatgagagcctcatccccatgttcctgacagagctgatgctgactgtgcagagcctgctgtttgagcccagcctggaggacttcctggatggcatcctgggcgctgtgaaccactgccagaacacagtgctgtctgtgcccaacctggtgcctgacagctactttgatgccttcaccagcccctacatcaacaacaagctggagggcaagacctgtggcaccggccccagcctggccgctgtgtttgaagatgacaagaacttccacaccatcatcagccagatcaaggagaccatccaggccgcctttgagagcgcccgcatctatgctgccacctttgagaagttccagatcttcttcaaggaaaatgaaagcctggacctgcaggccctgaagctgcaggagccagacatcaacttcttcagcgagcagctggagaagtaccacaagcagcacaaggatgctgtggccctgcggcccaccagaaatgtgggcctgctgctgattgacacccggctgctgcgggagaagctgatccccagccccctgcgctgcctggaggtgctgaacttcatgctgccccggcagagcaagaagaaggtggatgccatcatctttgaggcccaggatgctgagtacaagctggagtttgtgcccaccaccaccacagaatatgtgcacagcctgctcttcctggatgagatccaggagcgcatcgagagcctggaggatgagggcaacatcgtgacccagatgtacaagctgatggagcagtaccaggtgcccaccccaccagaagattttgctgtgtttgccaccatgaagcccagcatcgtggccgtgagaaatgccatcgacaagtctgtgggggaccgggagagcagcatcaagcagttctgtgtgcacctgggcagtgacctggaggagctgaacaatgaggtgaatgaggtgaagctgcaggcccaggacccccagatcctggacatctctgctgaccaggacaagatccgcctcatcctgaacaacctgcagagcgtgctggccgacctgcagaagagggccttccagtacaagagctaccagaagaacttcaaggtggaggtgtccaagtttgaggccctggaggaggtgtctgctgagctgaagctgaagcagctgctgtgggacagcttcagcgagtgggacaagctgcagcaggagtggctgaagagcaagtttgactgcctggaccctgaggtgctgaatggccaggtgtccaaatatgccaagtttgtgacccagctggagaagggcctgccccccaacagcgtggtgccccagctgaagtacaaggtggagaagatgaaggagaagctgcccgtcatcatcgacctgaggaaccccaccctgaaggcccggcactgggccgccatcgagcagacagtggatgccaccctggtggatgctgagatccccctgaccctggagcggctgagccagctgcacgtgtttgattttggccaggagatccaggacatcagcggccaggccagcggggaggccgccctggaggccatcctgaagaaggtggaggacagctggaagaccacagaatttgtgatcctgccccaccgggacagcaaggatgtgttcatcctgggcggcacagatgacatccaggtgctgctggatgacagcaccatcaacgtggccaccctggccagcagccgctacctgggccccctgaagaccagggtggatgagtggcagaagcagctggccctcttcaaccagaccctggaggagtggctgacctgccagaggaactggctgtacctggagagcatcttcaatgccccagacatccagaggcagctgcctgctgaggccaagatgttcctgcaggtggacaagtcctggaaggagatcatgaggaaggtgaaccggctgcccaatgccctgcgggccgccacccagcccggcctgctggagaccttccagaacaacaatgccctgctggaccagatccagaagtgcctggaggcctacctggagagcaagagggtcatcttcccccgcttctacttcctgagcaatgatgagctgctggagatcctggcccagaccaggaacccccaggccgtgcagccccacctgaggaaatgttttgacagcatcagcaagctggagtttgccctgatgcctcctgctgagggcaagatccctggcattgatggagagcctgagaaggtgtacaccaatgacatcctggccatgctgagccctgagggggagcgggtgtccctgggcaagggcctgaaggcccggggaaatgtggaggagtggctgggcaaggtggaggaggccatgttcaccagcctgcggcggctgtgcaaggccgccatcgctgactaccagggcaagctgaggacagactgggtggtggccggccaccccagccaggtgatcctgactgtgtcccagatcatgtggtgccgggacctgacagaatgtctggagacagagcacagcaaccacatccaggccctgaagaactttgagaaggtgaactttgagcggctgaatgccctggccgccatcgtgcagggcagcctgcccaagctgcacaggaacatcctgacagccctgatcaccattgatgtgcacgcccgggacatcgtgacagagctggtgcagagcaaggtggagaccgtggagagctttgactggcagaggcagctgcgctactactgggacatcgacctggacaactgtgtggccaggatggccctgagccagtacacctacggctatgagtacctgggcgcctgcccccggctggtgatcacccccctgacagaccgctgctacctgtgcctgatgggcgccctgcagctggacctgggcggggccccagctggccctgctggcaccgggaagacagagaccaccaaggacctggccaaggccctggccatccagtgtgtggtgttcaactgcagtgatggcctggactacaagatgatgggccgcttcttcagcggcctggcccagagcggggcctggtgctgctttgatgagttcaacagaattgatattgaggtgctgtctgtgattgcccagcagctgatcaccatcagaaatgccaaggccgccaagctgagccgcttcatgtttgagggccgggagatcaagctggtgatgacctgtgccgccttcatcaccatgaaccctggctacgccggccgcacagagctgcctgacaacctgaaggccctcttccggccctttgccatgatggtgcccaactatgccctgattgctgaggtgatcctgtacagcgagggctttgagagcagcaagatcctggccaggaagatgacccagatgtacaagctgtgcagcgagcagctgagccagcaggaccactatgactttggcatgagagctgtgaagtctgtgctggtgatggccggcagcctgaagcgggagaacccagacctgaatgaagatgtggtgctgatccgggccctgcaggacagcaacctgcccaagttcctgacagatgatgccctgctcttcagcggcatcatcagtgacctcttccctggggtgcagatccctgagcatgactatggcatcctgcagagcaccatcgtggatgtgatgaaccggcagaacctgcagcctgagatgtgcatggtgaggaaggtgatccagttctatgagaccatgctggtgagacatggagtgatgctggtgggccccactggaggcggcaagaccaccgtgtaccgcatcctggccgagaccctgggcaacctgcagaagctgggcattgaaaattccttctaccaggccgtgaagacctacgtgctgaaccccaagagcatcaccatgggagagctgtatggagaggtgaacaacctgaccctggagtggaaggatggcctgatggccctgtctgtgcgggctgctgtgaatgacaccagcgaggaccacaagtggatcatcagtgatggccctgtggatgccctgtggattgagaacatgaacacagtgctggatgacaacaagatgctgtgcctggccaacagcgagcgcatcaagctgaccccccagatccacatgctgtttgaggtgcaggacctgcgggtggccagccctgccaccgtgagccgctgtggcatggtgtttgtggaccctgaggagctgaagtggatgccctacgtgaagacctggatgaagggcatcagcaagaagctgacagaggagacccaggagtacatcctgaacctcttccagagatatgtggatgagggcctgcacttcatcaacaagaagtgcagccaggccatcccccaggtggacatcagcaaggtgaccaccctgtgctgcctgctggagagcctcatcctgggcaaggatggagtgaacctggccatggagcagaccaagctgaacaccatcctgtgccagacctttgtgttctgctacctgtggagcctgggcggcaacctgacagagaactactatgacagctttgacaccttcatccgcacccagtttgatgacaacccagatgcccggctgcccaacagcggggacctgtggagcatccacatggactttgacaccaagaggctggacccctgggagcgcatcatccccaccttcaagtacaacagagatgtgcccttctttgagatgctggtgcccaccacagacacagtgcgctatggctacctgatggagaagctgctggccgtgaagcacagcgtgctcttcaccggcatcaccggggtgggcaagtctgtgattgccaagggcctgctgaacaagatccaggagagcgctggctacgtgcctgtgtacctgaacttcagcgcccagaccagcagcgcccggacccaggagatcatcgagagcaagctggagaggaagaggaagaacatcctgggcgcccctggcaacaagagaattgtcatctttgtggatgacctgaacatgccccggctggacagatatggcagccagccccccatcgagctgctgcggcagtaccaggactttggaggcttctatgacaggaacaagctgttctggaaggagatccaggatgtgaccatcatcagcgcctgtgcccctcctgggggcggcagaaatcctgtgaccccccgcttcatccgccacttctccatgctgtgcctgcccatgcccagcgagcacagcctgaagcagatcttccaggccatcctgaatggcttcctgagtgacttccccccagctgtgaagcagacagccagcagcatcgtggaggcctctgtggagatctacaacaagatgtctgtggacctgctgcccaccccagccaagagccactacgtgttcaacctgcgggacctgagcaaatgtgtgcaggacaagcactttggaattgccatcgacctggagtacttcctgaacaagcccatcatctttggagacttcatcaagtttggagctgacaaggctgaccgcatctatgatgacatgccagacatcgagaagacagccaacgtgctgcaggactacctggatgactacaacctgaccaaccccaaggaggtgaagctggtgttcttccaggatgccattgaacatgtgtccagaattgccaggatgatccggcaggagagaggaaatgccctgctggtgggcgtgggcggcaccgggaagcagagcctgacccggctggccgcccacatctgtggctacaagtgcctgcagatcgagctgagccggggctacaactatgacagcttccacgaggacctgaggaagctgtacaagatggccggcgtggaggacaagaacatggtgttcctgttcacagacacccagatcgtggtggaggagttcctggaggacatcaacaacatcctgaacagcggggaggtgcccaacctgtttgagaaggatgagctggagcaggtgctggccgccacccggccccgggccaaggaggtgggcatcagcgagggcaacagagatgaggtgggctgtgcccgggtggtgatgtggctgtaccacaagaatgtgagcagccccttcatctag

SEQ ID NO: 150647 - DNA, 14088 bp, synthetic construct
  misc_feature 1..14088: note = Description of Artificial Sequence: Synthetic coding sequence
  source 1..14088: mol_type = other DNA
ggggctgaggccccacccagcacagaggaggccgccccacccaggtctgaggaggaggaggccccccggccccccaccgtggaggccccagcagaagatggcttcagccccagcgcagaagatgctgtgtcctctgtggtggactacagagacctgatccccagcgaggagggcatcgtgctgcctgatgaccatgaagctgacctgaacagagtgcggcagaggctggcccccaggcctgtgcagagcgtcatcagcgaggtgctgagcctgcccagcagcagaagaagcagccgctacagaagatccatgagcggcctgcccaacctgcaggagaccctgaaggagcggcaggcccgcttccgggaggcccgggagagccggcggctgaagattgaccccagctacaagtacatctttgagatcctggccgagaacctgggcctggacatcgtgacagtggaggagctgatcctggactgccccagcctggaggccttcaccaacttctttgccaaggatggctgcaagaccctgaagttcctgtaccaggagggagatgtgcccggcattgaatgtggccgcaccatcgccggggccaccaagggggccaagatgatgaagctgtacatcgacaatgctgccccagacaagctgaagggcctgtgcatcttctttgtgcgctgcagaaatgatgtggccatcaacgtgaagaccatccaggaggaggccctcttcaccgtgctggatgccagcaagggcctgctgaatggcatccgggacatgctggccaacatcttcctgcctgctgtgctggccaccaacaactggggcgccctgaaccagagcaagcagggcgagagcgagaagcacatcttcacagagaccatcaaccgctacctgtccttcctggatggagcccgcatcagcattgagggcaccgtgaagctgaagaccatcgacaacgtgaacttcagcaagctgcacacctttgaggaggtgacagctgctgccagcaacagcgagaccgtgcaccagctggaggaggtgctgatggtgtggtacaagcagatcgagcaggtgctgattgaaagtgagcagatgaggaaggaggccggggacagcggccccctgacagagctggagcactggaagaggatgtctgccaagttcaactacatcatcgagcagatcaagggccccagctgcaaggctgtgatcaacgtgctgaatgtggcccacagcaagctgctgaagaactggagggacctggatgcccgcatcacagacacagccaatgaaagcaaggacaacgtgcgctacctgtacaccctggagaaggtgtgccagcccctgtacaaccacgacctggtgtccatggcccacggcatccagaacctgatcaatgccatccgcatgattcatggagtgagccgctactacaacaccagcgagaggatgaccagcctcttcatcaaggtgaccaaccagatggtgacagcctgcaaggcctacatcacagatggcggcctgaaccacgtgtgggaccaggagacccctgtggtgctgaagaagatccaggactgcatcttcctgttcaaggagtaccaggccagcttccacaagaccaggaagctgatcagcgagagcagtggagagaagagctttgaggtgtctgagatgtacatctttgggaagtttgaggccttctgcaagaggctggagaagatcacagagatgatcaccgtggtgcagacctacagcaccctgagcaacagcaccatcgagggcatcgacatcatggccatcaagttcaggaacatctaccagggcgtgaagaagaagcagtatgacatcctggaccccaggagaacagaatttgacacagacttcctggacttcatgaccaagatcaatggcctggaggtgcagatccaggccttcatgaacagcagctttgggaagatcctgagcagccagcaggccctgcagctgctgcagcgcttccagaagctgaacatcccctgcctgggcctggagatcaaccacaccatcgagcgcatcctgcagtactacgtggccgagctggatgccaccaagaagctgtaccacagccagaaggatgacccccccctggccaggaacatgccacccatcgccggcaagatcctgtgggtgcggcagctgtaccgccgcatcagcgagcccatcaactacttcttcaagaacagcgacatcctgagcagcccagatggcaaggccgtcatccggcagtacaacaagatctcctatgtgctggtggagtttgaggtggtgtaccacacagcctggatccgggagatcagccagctgcactacgccctgcaggccaccctgtttgtgcgccaccctgagaccgggaagctgctggtgaactttgaccccaagatcctggaggtggtgcgggagaccaagtgcatgatcaagatgaagctggatgtgcctgagcaggccaagaggctgctgaagctggagagcaagctgaaggctgacaagctgtacctgcagggcctgctgcagtactatgatgagctgtgccaggaggtgcccagcgtgtttgtgaacctgatgacccccaagatgaagaaggtggagagcgtgctgcggcagggcctgactgtgctgacctggagcagcctgaccctggagagcttcttccaggaggtggagctggtgctggacatgttcaaccagctgctgaagaagatcagtgacctgtgtgagatgcacatcgacacagtgctgaaggagatcgccaagacagtgctgatcagcctgcctgagagcggggccaccaaggtggaggacatgctgaccctgaatgagacctacaccaaggagtgggccgacatcctgaaccacaagagcaagcacgtggaggaggccgtgcgggagctgatcagcatctttgagcagatctatgaggtgaagtacaccgggaaggtgggcaagcagagcgagcagaggaagcacgtggtgtttggaagtgaaacaggagaaggagaaaataatgactatgaggccaacatcgtgaatgaatttgacacccatgacaaggaggatgagttcaagaaggagtgcaaggaggtgtttgccttcttcagccaccagctgctggacagcctgcagaaggccacccggctgagcctggacaccatgaagaggcgcatctttgtggccagcctgtatggcaggaagcagagcgaggacatcatctccttcatcaagtctgaggtgcacctggccatccccaacgtggtgatgatccccagcctggatgacatccagcaggccatcaacaggatgatccagctgaccctggaggtgtccagaggagtggcccactggggccagcagcagatccggcccatcaagagcgtcatccccagccccaccaccacagatgtgacccaccagaacacaggcaagctgctgaagaaggaggagaggagctttgaggaggccatcccagccaggaagctgaagaacttctacccaggagtggccgagcacaaggacatcagcaagctggtgctgctgctgagcagctctgtgaacagcctgaggaaggccgcccacgaggccctgcaggacttccagaagtacaagaccctgtggacagaagatagagatgtgaaggtgaaggagttcctggccaacaaccccagcctgacagagatccgctctgagatcctgcactacgccacctttgagcaggagattgatgagctgaagcccatcatcgtggtgggcgccctggagctgcacacagagcccatgaagctggccctgagcattgaggccaaggcctggaagatgctgctgtgccgctacctgaatgaggagtacaagaagaagatgagctacatgattgccttcatcaatgagtacctgaagaagctgagccggcccatccgggacctggatgatgtgcgctttgccatggaggccctgagctgcatccgggacaatgagatccagatggacatgaccctgggccccatcgaggaggcctatgccatcctgaacagatttgaggtggaggtgaccaaggaggagagcgaggccgtggacaccctgcgctacagcttcaacaagctgcagagcaaggctgtgtctgtgcaggaggacctggtgcaggtgcagcccaagttcaagagcaacctgctggagagcgtggaggtgttcagagaagatgtgatcaactttgctgaggcctatgagctggagggccccatggtgcccaacatccccccccaggaggccagcaaccggctgcagatcttccaggccagctttgatgacctgtggaggaagtttgtgacctacagcagcggggagcagctgtttggcctgcctgtgacagattatgaggtgctgcacaagaccaggaaggagctgaacctgctgcagaagctgtatggcctgtatgacacagtgatgagcagcatcagcggctactatgagatcctgtggggagatgtggacatcgagaagatcaatgctgagctgctggagttccagaaccgctgcaggaagctgcccaagggcctgaaggactggcaggccttcctggacctgaagaagagaattgatgacttcagcgagagctgccccctgctggagatgatgaccaacaaggccatgaagcagaggcactgggaccgcatcagcgagctgaccggcaccccatttgatgtggagagtgacagcttctgcctgaggaacatcatggaggcccccctgctgaagcacaaggatgacatcgaggacatctgcatcagcgccatcaaggagaaggacatcgaggccaagctgacccaggtgattgagaactggaccaaccagaacctgagctttgctgccttcaagggcaaaggagagctgctgctgaagggcacagaaagtggagagatcatcaccctgatggaggacagcctgatggtgctgggcagcctgctgagcaaccgctacaatgcccccttcaagaagaacatccagaactgggtgtacaagctgagcaccagcagtgacatcatcgaggagtggctggtggtgcagaacctgtgggtgtacctggaggccgtgtttgtgggcggggacatcgccaagcagctgccccaggaggccaagcgcttccagaacatcgacaagtcctggatcaagatcatgcagagggcccacgagaaccccaacgtcatcaactgctgcgtgggagatgagaccatgggccagctgctgccccacctgcacgagcagctggaggtgtgccagaagagcctgaccggctacctggagaagaagaggctgctcttcccccgcttcttctttgtgtctgaccctgtgctgctggagatcctgggccaggccagtgacagccacaccatccagccccacctgcctgctgtgtctgacaacatcaatgaggtgaccttccacgccaaggactatgaccgcatcatggctgtgatcagccgggagggggagaagatcgtgctggacaacagcgtgatggccaagggccctgtggagatctggctgctggacctgctgaagatgcagatgagcagcctgcacaacatcatccgcagcgccttctaccagatcagtgacagcggcttccagctgctgcccttcctgagccacttccctgcccaggtgggcctgctgggcatccagatgctgtggacccatgattctgaggaggccctgagaaatgccaaggatgacaggaagatcatgcaggtgaccaaccagaagttcctggacatcctgaacaccctcatcagccagaccacccatgacctgagcaagtttgacagagtgaagtttgagaccctcatcaccatccacgtgcaccagagggacatctttgatgacctggtgaagatgcacatcaagagccccacagactttgagtggctgaagcagagccgcttctacttcaaggaggacctggaccagacagtggtgtccatcacagatgtggacttcatctaccagaatgagttcctgggctgcacagaccggctggtgatcacccccctgacagaccgctgctacatcaccctggcccaggccctgggcatgaacatgggcggggccccagctggccctgctggcaccgggaagacagagaccaccaaggacatgggccgctgcctgggcaagtatgtggtggtgttcaactgcagcgaccagatggacttccggggcctgggccgcatcttcaagggcctggcccagagcggctcctggggctgctttgatgagttcaaccgcatcgagctgcctgtgctgtctgtggccgcccagcagatctacatcgtgctgacagccaggaaggagaggaagaagcagttcatcttcagtgatggagactgtgtggacctgaaccctgagtttggcatcttcctgaccatgaaccctggctacgccggccggcaggagctgcctgagaacctgaagatccagttcagaacagtggccatgatggtgcctgaccggcagatcatcatgagggtgaagctggccagctgtggcttcctggagaatgtcatcctggcccagaagttctacgtgctgtacaagctgtgtgaggagcagctgaccaagcaggtgcactatgactttggcctgaggaacatcctgtctgtgctgcggaccctgggcagccagaagagggcccggccagaagattctgagctgagcatcgtgatgaggggcctgcgggacatgaacctgagcaagctggtggatgaagatgagcccctcttcctgagcctcatcaatgacctcttccctggcctgcagctggacagcaacacctatgcagagctgcagaatgctgtggcccaccaggtgcagatcgagggcctcatcaaccaccccccctggaacctgaagctggtgcagctgtatgagaccagcctggtgagacatggcctgatgaccctgggccccagcggcagcggcaagaccaccgtcatcaccatcctgatgaaggcccagacagaatgtggccggccccaccgggagatgaggatgaaccccaaggccatcacagccccccagatgtttggccgcctggacacagccaccaatgactggacagatggcatcttcagcaccctgtggaggaagaccctgaaggccaagaagggggagaacatcttcctgatcctggatggccctgtggatgccatctggattgagaacctgaacagcgtgctggatgacaacaagaccctgaccctggccaacggggaccgcatccccatggcccccagctgcaagctgctgtttgaggtgcacaacattgaaaatgccagccctgccaccgtgtccaggatgggcatggtgtacatcagcagcagcgccctgtcctggaggcccatcctgcaggcctggctgaagaagaggacagcccaggaggccgctgtgttcctgaccctgtatgagaaggtgtttgaggacacctacacctacatgaagctgaacctgaaccccaagatgcagctgctggagtgcaactacatcgtgcagagcctgaacctgctggagggcctcatccccagcaaggaggagggcggcgtgtcctgtgtggagcacctgcacaagctgtttgtgtttggcctgatgtggagcctgggcgccctgctggagctggagagccgggagaagctggaggccttcctgcggcagcacgagagcaagctggacctgcctgagatccccaagggcagcaaccagaccatgtatgagttctacgtgacagattatggagactgggagcactggaacaagaagctgcagccctactactaccccacagacagcatccctgagtacagcagcatcctggtgcccaacgtggacaacatccgcaccaacttcctgattgacaccatcgccaagcagcacaaggctgtgctgctgaccggggagcagggcacagccaagacagtgatggtgaaggcctacctgaagaagtatgaccctgaggtgcagctgagcaagagcctgaacttcagcagcgccacagagcccatgatgttccagaggaccatcgagagctatgtggacaagagaattggcagcacctacggccccccaggcggcaggaagatgaccgtcttcattgatgacatcaacatgcctgtgatcaatgagtggggagaccagatcaccaatgagatcgtgcggcagatgatggagatggagggcatgtacagcctggacaagccaggggacttcaccaccatcgtggatgtgcagctgattgctgccatgatccaccctgggggcggcagaaatgacatcccccagaggctgaagaggcagttcaccgtcttcaactgcaccctgcccagcaatgccagcattgacaagatcttcggcatcatcggctgcggctactttgacccctgccgctccttcaagccccagatctgtgagatgattgtgaacctggtgtctgtgggccgggtgctgtggcagtggaccaaggtgaagatgctgcccacccccagcaagttccactacatcttcaacctgcgggacctgagccgcatctggcagggcatgctgaccatcaaggccgaggagtgtgccagcatccccaccctgctgagcctcttcaagcatgagtgcagccgggtgattgctgaccgcttcatcaccccagaagatgagcagtggttcaatgcccacctgaccagggctgtggaggagaacatcggcagtgatgctgccagctgcatcctgcctgagccctactttgtggacttcctgcgggagatgcctgagcccactggagatgagcctgaggacagcgtgtttgaggtgcccaagatctatgagctgatgcccagctttgacttcctggccgagaagctgcagttctaccagaggcagttcaatgagatcatccggggcaccagcctggacctggtgttcttcaaggatgccatgacccacctgatcaagatcagccgcatcatccgcaccagctgtggaaatgccctgctggtgggcgtgggcggcagcggcaagcagagcctgagccggctggccagcttcatcgccggctaccagatcttccagatcaccctgaccaggagctacaacgtgaccaacctgacagatgacctgaaggccctgtacaaggtggccggggctgatggcaagggcatcaccttcatcttcacagattctgagatcaaggatgaggccttcctggagtacctgaacaacctgctgagcagcggggagatcagcaacctgtttgccagagatgagatggatgagatcacccagggcctcatctctgtgatgaagcgggagctgcccaggcacccccccacctttgacaacctgtatgagtacttcatcagccgcagcaggaagaacctgcacgtggtgctgtgcttcagccctgtgggggagaagttccgggcccggagcctgaagtttcctggcctcatcagcggctgcaccatggactggttcagccgctggccccgggaggccctgattgctgtggccagctacttcctgagtgactacaacatcgtgtgcagcagcgagatcaagaggcaggtggtggagaccatgggcctcttccatgacatggtgtctgagagctgtgagagctacttccagcgctacagaagaagagcccacgtgacccccaagagctacctgtccttcatcaatggctacaagaacatctatgcagagaaggtgaagttcatcaatgagcaggccgagaggatgaacatcggcctggacaagctgatggaggccagcgagagcgtggccaagctgagccaggacctggccgtgaaggagaaggagctggccgtggccagcatcaaggcagatgaggtgctggccgaggtgacagtgtctgcccaggccagcgccaagatcaagaatgaggtgcaggaggtgaaggacaaggcccagaagatcgtggatgaaattgacagcgagaaggtgaaggccgagagcaagctggaggccgccaagccagccctggaggaggccgaggccgccctgaacaccatcaagcccaatgacatcgccaccgtgaggaagctggccaagccaccccacctgatcatgaggatcatggactgtgtgctgctgctcttccagaagaagattgatcctgtgaccatggaccctgagaagagctgctgcaagcccagctggggcgagagcctgaagctgatgtctgccaccggcttcctgtggagcctgcagcagttccccaaggacaccatcaatgaggagaccgtggagctgctgcagccctacttcaacatggatgactacacctttgagagcgccaagaaggtgtgtggaaatgtggccggcctgctgtcctggaccctggccatggccatcttctacggcatcaaccgggaggtgctgcccctgaaggccaacctggccaagcaggagggccgcctggccgtggccaatgctgagctgggcaaggcccaggccctgctggatgagaagcaggccgagctggacaaggtgcaggccaagtttgatgctgccatgaatgagaagatggacctgctgaatgatgctgacacctgcaggaagaagatgcaggccgccagcaccctgattgatggcctgagcggggagaagatccgctggacccagcagagcaaggagttcaaggcccagatcaaccggctggtgggggacatcctgctgtgcaccggcttcctgagctacctgggccccttcaaccagatcttcaggaactacctgctgaaggaccagtgggagatggagctgcgggccaggaagatccccttcacagagaacctgaacctgatctccatgctggtggacccccccaccatcggggagtggggcctgcagggcctgcctggagatgacctgagcatccagaatggcatcatcgtgaccaaggccacccgctaccccctgctgattgacccccagacccagggcaagacctggatcaagagcaaggagaaggaaaatgacctgcaggtgaccagcctgaaccacaagtacttccgcacccacctggaggacagcctgagcctgggccggcccctgctgattgaggacatccacgaggagctggaccctgccctggacaacgtgctggagaagaacttcatcaagagcggcaccaccttcaaggtgaaggtgggggacaaggaatgtgacatcatggacaccttcaagctgtacatcaccaccaagctgcccaacccagccttcaccccagagatcaatgccaagaccagcgtcatcgacttcaccgtgaccatgaagggcctggagaaccagctgctgcggcgggtcatcctgacagagaagcaggagctggaggccgagcgggtgaagctgctggaggatgtgaccttcaacaagaggaagatgaaggagctggaggacaacctgctgtacaagctgagcgccaccaagggcagcctggtggatgatgagagcctcatcggcgtgctgcggaccaccaagcagacagctgctgaggtgtctgagaagctgcacgtggccgctgagacagagatcaagatcaatgctgcccaggaggagttccggcctgctgccacccggggcagcatcctgtacttcctgatcacagagatgtccatggtgaacatcatgtaccagaccagcctggcccagttcctgaagctgtttgaccagagcatggcccggtctgagaagagccccctgccccagaagaggatcaccaacatcatcgagtacctgacctatgaggtgttcacctacagcgtgcggggcctgtatgagaaccacaagttcctgtttgtgctgctgatgaccctgaagattgacctgcagaggggcaccgtgaagcaccgggagttccaggccctgatcaagggcggggccgccctggacctgaaggcctgcccccccaagccctaccgctggatcctggacatgacctggctgaacctggtggagctgagcaagctgccccagtttgctgagatcatgaaccagatcagcagaaatgagaagggctggaagtcctggtttgacaaggatgcccctgaggaggagatcatcccagatggctacaatgacagcctggacacctgccacaagctgctgctgatccgctcctggtgcccagacagaacagtgttccaggccaggaagtacatcgctgacagcctggaggagaagtacacagagcctgtgatcctgaacctggagaagacctgggaggagagtgacaccaggacccccctcatctgcttcctgtccatgggcagtgaccccaccaaccagattgatgccctggccaagaagctgaagctggagtgcaggaccatctccatgggccagggccaggaggtgcacgccaggaagctgatccagatgtccatgcagcagggcggctgggtgctgctgcagaactgccacctgggcctggagttcatggaggagctgctggagaccctcatcaccacagaggccagtgatgacagcttccgggtgtggatcaccacagagccccatgaccgcttccccatcaccctgctgcagaccagcctgaagttcaccaatgaaccaccccagggcgtgcgggccggcctgaagaggacctttgctggcatcaaccaggacctgctggacatcagcaacctgcccatgtggaagcccatgctgtacacagtggccttcctgcacagcacagtgcaggagaggaggaagtttggccccctgggctggaacatcccctatgagttcaacagcgctgacttcagcgcctctgtgcagttcatccagaaccacctggatgaatgtgacatcaagaagggcgtgtcctggaacacagtgcgctacatgattggagaggtgcagtatggaggccgggtgacagatgactttgacaagaggctgctgaactgctttgcccgggtgtggttcagcgagaagatgtttgagcccagcttctgcttctacacaggctacaagatccccctgtgcaagaccctggaccagtactttgagtacatccagagcctgcccagcctggacaaccctgaggtgtttggcctgcaccccaatgctgacatcacctaccagagcaacacagccagcgctgtgctggagaccatcaccaacatccagcccaaggagagcggcggcggcgtgggggagacccgggaggccatcgtgtaccgcctgtctgaggacatgctgagcaagctgcccccagactacatcccccatgaggtgaagagccgcctcatcaagatgggccacctgaacagcatgaacatcttcctgcggcaggagattgacaggatgcagagggtcatcagcatcctgcggagcagcctgagtgacctgaagctggccatcgagggcaccatcatcatgtctgagaacctgagagatgccctggacaacatgtatgatgcccgcatcccccagctgtggaagagggtgtcctgggacagcagcaccctgggcttctggttcacagagctgctggagagaaatgcccagttcagcacctggatctttgagggccggcccaacgtgttctggatgacaggcttcttcaacccccagggcttcctgacagccatgaggcaggaggtgacccgggcccacaagggctgggccctggacacagtgaccatccacaatgaggtgctgcggcagaccaaggaggagatcaccagccccccaggagagggcgtgtacatctacggcctgtacatggatggagctgcctgggacagaagaaatggcaagctgatggagagcacccccaaggtgctcttcacccagctgcctgtgctgcacatctttgccatcaacagcacagcccccaaggaccccaagctgtatgtgtgccccatctacaagaagcccaggagaacagacctgaccttcatcaccgtggtgtacctgaggacagtgctgagcccagaccactggatcctgcggggcgtggccctgctgtgtgacatcaagtag

SEQ ID NO: 150648 - DNA, 13473 bp, synthetic construct
  misc_feature 1..13473: note = Description of Artificial Sequence: Synthetic coding sequence
  source 1..13473: mol_type = other DNA
atgatgaagctgtacatcgacaatgctgccccagacaagctgaagggcctgtgcatcttctttgtgcgctgcagaaatgatgtggccatcaacgtgaagaccatccaggaggaggccctcttcaccgtgctggatgccagcaagggcctgctgaatggcatccgggacatgctggccaacatcttcctgcctgctgtgctggccaccaacaactggggcgccctgaaccagagcaagcagggcgagagcgagaagcacatcttcacagagaccatcaaccgctacctgtccttcctggatggagcccgcatcagcattgagggcaccgtgaagctgaagaccatcgacaacgtgaacttcagcaagctgcacacctttgaggaggtgacagctgctgccagcaacagcgagaccgtgcaccagctggaggaggtgctgatggtgtggtacaagcagatcgagcaggtgctgattgagagcgagcagatgaggaaggaggccggggacagcggccccctgacagagctggagcactggaagaggatgtctgccaagttcaactacatcatcgagcagatcaagggccccagctgcaaggccgtcatcaacgtgctgaatgtggcccacagcaagctgctgaagaactggagggacctggatgcccgcatcacagacacagccaatgaaagcaaggacaacgtgcgctacctgtacaccctggagaaggtgtgccagcccctgtacaaccacgacctggtgtccatggcccacggcatccagaacctgatcaatgccatccgcatgatccacggcgtgagccgctactacaacaccagcgagaggatgaccagcctcttcatcaaggtgaccaaccagatggtgacagcctgcaaggcctacatcacagatggcggcctgaaccacgtgtgggaccaggagacccctgtggtgctgaagaagatccaggactgcatcttcctgttcaaggagtaccaggccagcttccacaagaccaggaagctgatcagcgagagcagcggggagaagagctttgaggtgtctgagatgtacatctttgggaagtttgaggccttctgcaagaggctggagaagatcacagagatgatcaccgtggtgcagacctacagcaccctgagcaacagcaccatcgagggcatcgacatcatggccatcaagttcaggaacatctaccagggcgtgaagaagaagcagtatgacatcctggaccccaggagaacagaatttgacacagacttcctggacttcatgaccaagatcaatggcctggaggtgcagatccaggccttcatgaacagcagctttgggaagatcctgagcagccagcaggccctgcagctgctgcagcgcttccagaagctgaacatcccctgcctgggcctggagatcaaccacaccatcgagcgcatcctgcagtactacgtggccgagctggatgccaccaagaagctgtaccacagccagaaggatgatcctcccctggccaggaacatgccacccatcgccggcaagatcctgtgggtgcggcagctgtaccgccgcatcagcgagcccatcaactacttcttcaagaacagcgacatcctgagcagcccagatggcaaggctgtgatccggcagtacaacaagatctcctatgtgctggtggagtttgaggtggtgtaccacacagcctggatccgggagatcagccagctgcactacgccctgcaggccaccctgtttgtgcgccaccctgagaccgggaagctgctggtgaactttgaccccaagatcctggaggtggtgcgggagaccaagtgcatgatcaagatgaagctggatgtgcctgagcaggccaagaggctgctgaagctggagagcaagctgaaggctgacaagctgtacctgcagggcctgctgcagtactatgatgagctgtgccaggaggtgcccagcgtgtttgtgaacctgatgacccccaagatgaagaaggtggagagcgtgctgcggcagggcctgactgtgctgacctggagcagcctgaccctggagagcttcttccaggaggtggagctggtgctggacatgttcaaccagctgctgaagaagatcagtgacctgtgtgagatgcacatcgacacagtgctgaaggagatcgccaagacagtgctgatcagcctgcctgagagcggggccaccaaggtggaggacatgctgaccctgaatgagacctacaccaaggagtgggccgacatcctgaaccacaagagcaagcacgtggaggaggccgtgcgggagctgatcagcatctttgagcagatctatgaggtgaagtacacaggcaaggtgggcaagcagagcgagcagaggaagcacgtggtgtttggcagcgagaccggggagggggagaacaatgactatgaggccaacatcgtgaatgaatttgacacccatgacaaggaggatgagttcaagaaggagtgcaaggaggtgtttgccttcttcagccaccagctgctggacagcctgcagaaggccacccggctgagcctggacaccatgaagaggcgcatctttgtggccagcctgtatggcaggaagcagagcgaggacatcatctccttcatcaagtctgaggtgcacctggccatccccaacgtggtgatgatccccagcctggatgacatccagcaggccatcaacaggatgatccagctgaccctggaggtgtcccggggcgtggcccactggggccagcagcagatccggcccatcaagagcgtcatccccagccccaccaccacagatgtgacccaccagaacacaggcaagctgctgaagaaggaggagaggagctttgaggaggccatcccagccaggaagctgaagaacttctacccaggagtggccgagcacaaggacatcagcaagctggtgctgctgctgagcagctctgtgaacagcctgaggaaggccgcccacgaggccctgcaggacttccagaagtacaagaccctgtggacagaggacagagatgtgaaggtgaaggagttcctggccaacaaccccagcctgacagagatccgctctgagatcctgcactacgccacctttgagcaggagattgatgagctgaagcccatcatcgtggtgggcgccctggagctgcacacagagcccatgaagctggccctgagcattgaggccaaggcctggaagatgctgctgtgccgctacctgaatgaggagtacaagaagaagatgagctacatgattgccttcatcaatgagtacctgaagaagctgagccggcccatccgggacctggatgatgtgcgctttgccatggaggccctgagctgcatccgggacaatgagatccagatggacatgaccctgggccccatcgaggaggcctatgccatcctgaacagatttgaggtggaggtgaccaaggaggagagcgaggccgtggacaccctgcgctacagcttcaacaagctgcagagcaaggctgtgtctgtgcaggaggacctggtgcaggtgcagcccaagttcaagagcaacctgctggagagcgtggaggtgttccgggaggatgtgatcaactttgctgaggcctatgagctggagggccccatggtgcccaacatccccccccaggaggccagcaaccggctgcagatcttccaggccagctttgatgacctgtggaggaagtttgtgacctacagcagtggagagcagctgtttggcctgcctgtgacagattatgaggtgctgcacaagaccaggaaggagctgaacctgctgcagaagctgtatggcctgtatgacacagtgatgagcagcatcagcggctactatgagatcctgtggggagatgtggacatcgagaagatcaatgctgagctgctggagttccagaaccgctgcaggaagctgcccaagggcctgaaggactggcaggccttcctggacctgaagaagagaattgatgacttcagcgagagctgccccctgctggagatgatgaccaacaaggccatgaagcagaggcactgggaccgcatcagcgagctgaccggcaccccatttgatgtggagagtgacagcttctgcctgaggaacatcatggaggcccccctgctgaagcacaaggatgacatcgaggacatctgcatcagcgccatcaaggagaaggacatcgaggccaagctgacccaggtgattgagaactggaccaaccagaacctgagctttgctgccttcaagggcaagggggagctgctgctgaagggcacagagagcggggagatcatcaccctgatggaggacagcctgatggtgctgggcagcctgctgagcaaccgctacaatgcccccttcaagaagaacatccagaactgggtgtacaagctgagcaccagcagtgacatcatcgaggagtggctggtggtgcagaacctgtgggtgtacctggaggccgtgtttgtgggcggggacatcgccaagcagctgccccaggaggccaagcgcttccagaacatcgacaagtcctggatcaagatcatgcagagggcccacgagaaccccaacgtcatcaactgctgcgtgggagatgagaccatgggccagctgctgccccacctgcacgagcagctggaggtgtgccagaagagcctgaccggctacctggagaagaagaggctgctcttcccccgcttcttctttgtgtctgaccctgtgctgctggagatcctgggccaggccagtgacagccacaccatccagccccacctgcctgctgtgtctgacaacatcaatgaggtgaccttccacgccaaggactatgaccgcatcatggccgtcatcagccgggagggggagaagatcgtgctggacaacagcgtgatggccaagggccctgtggagatctggctgctggacctgctgaagatgcagatgagcagcctgcacaacatcatccgcagcgccttctaccagatcagtgacagcggcttccagctgctgcccttcctgagccacttccctgcccaggtgggcctgctgggcatccagatgctgtggacccatgacagcgaggaggccctgagaaatgccaaggatgacaggaagatcatgcaggtgaccaaccagaagttcctggacatcctgaacaccctcatcagccagaccacccatgacctgagcaagtttgacagagtgaagtttgagaccctcatcaccatccacgtgcaccagagggacatctttgatgacctggtgaagatgcacatcaagagccccacagactttgagtggctgaagcagagccgcttctacttcaaggaggacctggaccagacagtggtgtccatcacagatgtggacttcatctaccagaatgagttcctgggctgcacagaccggctggtgatcacccccctgacagaccgctgctacatcaccctggcccaggccctgggcatgaacatgggcggggccccagctggccctgctggcaccgggaagacagagaccaccaaggacatgggccgctgcctgggcaagtatgtggtggtgttcaactgcagcgaccagatggacttccggggcctgggccgcatcttcaagggcctggcccagagcggctcctggggctgctttgatgagttcaacagaattgagctgcctgtgctgtctgtggccgcccagcagatctacatcgtgctgacagccaggaaggagaggaagaagcagttcatcttcagtgatggagactgtgtggacctgaaccctgagtttggcatcttcctgaccatgaaccctggctacgccggccggcaggagctgcctgagaacctgaagatccagttcagaacagtggccatgatggtgcctgaccggcagatcatcatgagggtgaagctggccagctgtggcttcctggagaatgtcatcctggcccagaagttctacgtgctgtacaagctgtgtgaggagcagctgaccaagcaggtgcactatgactttggcctgaggaacatcctgtctgtgctgcggaccctgggcagccagaagagggcccggcctgaggacagcgagctgagcatcgtgatgaggggcctgcgggacatgaacctgagcaagctggtggatgaagatgagcccctcttcctgagcctcatcaatgacctcttccctggcctgcagctggacagcaacacctacgccgagctgcagaatgctgtggcccaccaggtgcagatcgagggcctcatcaaccaccccccctggaacctgaagctggtgcagctgtatgagaccagcctggtgcgccacggcctgatgaccctgggccccagcggcagcggcaagaccaccgtcatcaccatcctgatgaaggcccagacagaatgtggccggccccaccgggagatgaggatgaaccccaaggccatcacagccccccagatgtttggccgcctggacacagccaccaatgactggacagatggcatcttcagcaccctgtggaggaagaccctgaaggccaagaagggggagaacatcttcctgatcctggatggccctgtggatgccatctggattgagaacctgaacagcgtgctggatgacaacaagaccctgaccctggccaatggagaccgcatccccatggcccccagctgcaagctgctgtttgaggtgcacaacattgaaaatgccagccctgccaccgtgtccaggatgggcatggtgtacatcagcagcagcgccctgtcctggaggcccatcctgcaggcctggctgaagaagaggacagcccaggaggccgctgtgttcctgaccctgtatgagaaggtgtttgaggacacctacacctacatgaagctgaacctgaaccccaagatgcagctgctggagtgcaactacatcgtgcagagcctgaacctgctggagggcctcatccccagcaaggaggagggcggcgtgtcctgtgtggagcacctgcacaagctgtttgtgtttggcctgatgtggagcctgggcgccctgctggagctggagagccgggagaagctggaggccttcctgcggcagcacgagagcaagctggacctgcctgagatccccaagggcagcaaccagaccatgtatgagttctacgtgacagattatggagactgggagcactggaacaagaagctgcagccctactactaccccacagacagcatccctgagtacagcagcatcctggtgcccaacgtggacaacatccgcaccaacttcctgattgacaccatcgccaagcagcacaaggctgtgctgctgactggagagcagggcacagccaagacagtgatggtgaaggcctacctgaagaagtatgaccctgaggtgcagctgagcaagagcctgaacttcagcagcgccacagagcccatgatgttccagaggaccatcgagagctatgtggacaagagaattggcagcacctacggccccccaggcggcaggaagatgacagtgttcattgatgacatcaacatgcctgtgatcaatgagtggggagaccagatcaccaatgaaattgtgcggcagatgatggagatggagggcatgtacagcctggacaagccaggggacttcaccaccatcgtggatgtgcagctgattgctgccatgatccaccctgggggcggcagaaatgacatcccccagaggctgaagaggcagttcaccgtcttcaactgcaccctgcccagcaatgccagcattgacaagatcttcggcatcatcggctgcggctactttgacccctgccgctccttcaagccccagatctgtgagatgattgtgaacctggtgtctgtgggccgggtgctgtggcagtggaccaaggtgaagatgctgcccacccccagcaagttccactacatcttcaacctgcgggacctgagccgcatctggcagggcatgctgaccatcaaggccgaggagtgtgccagcatccccaccctgctgagcctcttcaagcatgaatgttcccgggtgattgctgaccgcttcatcaccccagaagatgagcagtggttcaatgcccacctgaccagggctgtggaggagaacattggaagtgatgctgccagctgcatcctgcctgagccctactttgtggacttcctgcgggagatgcctgagcccactggagatgagccagaagattctgtgtttgaggtgcccaagatctatgagctgatgcccagctttgacttcctggccgagaagctgcagttctaccagaggcagttcaatgagatcatccggggcaccagcctggacctggtgttcttcaaggatgccatgacccacctgatcaagatcagccgcatcatccgcaccagctgtggaaatgccctgctggtgggcgtgggcggcagcggcaagcagagcctgagccggctggccagcttcatcgccggctaccagatcttccagatcaccctgaccaggagctacaacgtgaccaacctgacagatgacctgaaggccctgtacaaggtggccggggctgatggcaagggcatcaccttcatcttcacagacagcgagatcaaggatgaggccttcctggagtacctgaacaacctgctgagcagtggagagatcagcaacctgtttgccagagatgagatggatgagatcacccagggcctcatctctgtgatgaagcgggagctgcccaggcacccccccacctttgacaacctgtatgagtacttcatcagccgcagcaggaagaacctgcacgtggtgctgtgcttcagccctgtgggggagaagttccgggcccggagcctgaagtttcctggcctcatcagcggctgcaccatggactggttcagccgctggccccgggaggccctgattgctgtggccagctacttcctgagtgactacaacatcgtgtgcagcagcgagatcaagaggcaggtggtggagaccatgggcctcttccatgacatggtgtctgagagctgtgagagctacttccagcgctacagaagaagagcccacgtgacccccaagagctacctgtccttcatcaatggctacaagaacatctatgcagagaaggtgaagttcatcaatgagcaggccgagaggatgaacatcggcctggacaagctgatggaggccagcgagagcgtggccaagctgagccaggacctggccgtgaaggagaaggagctggccgtggccagcatcaaggcagatgaggtgctggccgaggtgacagtgtctgcccaggccagcgccaagatcaagaatgaggtgcaggaggtgaaggacaaggcccagaagatcgtggatgaaattgattctgagaaggtgaaggccgagagcaagctggaggccgccaagccagccctggaggaggccgaggccgccctgaacaccatcaagcccaatgacatcgccaccgtgaggaagctggccaagccaccccacctgatcatgaggatcatggactgtgtgctgctgctcttccagaagaagattgatcctgtgaccatggaccctgagaagagctgctgcaagcccagctggggcgagagcctgaagctgatgtctgccaccggcttcctgtggagcctgcagcagttccccaaggacaccatcaatgaggagaccgtggagctgctgcagccctacttcaacatggatgactacacctttgaaagtgccaagaaggtgtgtggaaatgtggccggcctgctgtcctggaccctggccatggccatcttctacggcatcaaccgggaggtgctgcccctgaaggccaacctggccaagcaggagggccgcctggccgtggccaatgctgagctgggcaaggcccaggccctgctggatgagaagcaggccgagctggacaaggtgcaggccaagtttgatgctgccatgaatgagaagatggacctgctgaatgatgctgacacctgcaggaagaagatgcaggccgccagcaccctgattgatggcctgtctggagagaagatccgctggacccagcagagcaaggagttcaaggcccagatcaaccggctggtgggggacatcctgctgtgcaccggcttcctgagctacctgggccccttcaaccagatcttcaggaactacctgctgaaggaccagtgggagatggagctgcgggccaggaagatccccttcacagagaacctgaacctgatctccatgctggtggacccccccaccatcggggagtggggcctgcagggcctgcctggagatgacctgagcatccagaatggcatcatcgtgaccaaggccacccgctaccccctgctgattgacccccagacccagggcaagacctggatcaagagcaaggagaaggaaaatgacctgcaggtgaccagcctgaaccacaagtacttccgcacccacctggaggacagcctgagcctgggccggcccctgctgattgaggacatccacgaggagctggaccctgccctggacaacgtgctggagaagaacttcatcaagagcggcaccaccttcaaggtgaaggtgggggacaaggaatgtgacatcatggacaccttcaagctgtacatcaccaccaagctgcccaacccagccttcaccccagagatcaatgccaagacctctgtgattgacttcaccgtgaccatgaagggcctggagaaccagctgctgcggcgggtcatcctgacagagaagcaggagctggaggccgagcgggtgaagctgctggaggatgtgaccttcaacaagaggaagatgaaggagctggaggacaacctgctgtacaagctgagcgccaccaagggcagcctggtggatgatgagagcctgattggagtgctgcggaccaccaagcagacagctgctgaggtgtctgagaagctgcacgtggccgctgagacagagatcaagatcaatgctgcccaggaggagttccggcctgctgccacccggggcagcatcctgtacttcctgatcacagagatgtccatggtgaacatcatgtaccagaccagcctggcccagttcctgaagctgtttgaccagagcatggcccggtctgagaagagccccctgccccagaagaggatcaccaacatcatcgagtacctgacctatgaggtgttcacctacagcgtgcggggcctgtatgagaaccacaagttcctgtttgtgctgctgatgaccctgaagattgacctgcagaggggcaccgtgaagcaccgggagttccaggccctgatcaagggcggggccgccctggacctgaaggcctgcccccccaagccctaccgctggatcctggacatgacctggctgaacctggtggagctgagcaagctgccccagtttgctgagatcatgaaccagatcagcagaaatgagaagggctggaagtcctggtttgacaaggatgcccctgaggaggagatcatcccagatggctacaatgacagcctggacacctgccacaagctgctgctgatccgctcctggtgcccagacagaacagtgttccaggccaggaagtacatcgctgacagcctggaggagaagtacacagagcccgtcatcctgaacctggagaagacctgggaggagagtgacaccaggacccccctcatctgcttcctgtccatgggcagtgaccccaccaaccagattgatgccctggccaagaagctgaagctggagtgcaggaccatctccatgggccagggccaggaggtgcacgccaggaagctgatccagatgtccatgcagcagggcggctgggtgctgctgcagaactgccacctgggcctggagttcatggaggagctgctggagaccctcatcaccacagaggccagtgatgacagcttccgggtgtggatcaccacagagccccatgaccgcttccccatcaccctgctgcagaccagcctgaagttcaccaatgagcccccccagggcgtgcgggccggcctgaagaggacctttgctggcatcaaccaggacctgctggacatcagcaacctgcccatgtggaagcccatgctgtacacagtggccttcctgcacagcacagtgcaggagaggaggaagtttggccccctgggctggaacatcccctatgagttcaacagcgctgacttcagcgcctctgtgcagttcatccagaaccacctggatgaatgtgacatcaagaagggcgtgtcctggaacacagtgcgctacatgattggagaggtgcagtatggaggccgggtgacagatgactttgacaagaggctgctgaactgctttgcccgggtgtggttcagcgagaagatgtttgagcccagcttctgcttctacacaggctacaagatccccctgtgcaagaccctggaccagtactttgagtacatccagagcctgcccagcctggacaaccctgaggtgtttggcctgcaccccaatgctgacatcacctaccagagcaacacagccagcgctgtgctggagaccatcaccaacatccagcccaaggagagcggcggcggcgtgggggagacccgggaggccatcgtgtaccgcctgtctgaggacatgctgagcaagctgcccccagactacatcccccatgaggtgaagagccgcctcatcaagatgggccacctgaacagcatgaacatcttcctgcggcaggagattgacaggatgcagagggtcatcagcatcctgcggagcagcctgagtgacctgaagctggccatcgagggcaccatcatcatgtctgagaacctgagagatgccctggacaacatgtatgatgcccgcatcccccagctgtggaagagggtgtcctgggacagcagcaccctgggcttctggttcacagagctgctggagagaaatgcccagttcagcacctggatctttgagggccggcccaacgtgttctggatgacaggcttcttcaacccccagggcttcctgacagccatgaggcaggaggtgacccgggcccacaagggctgggccctggacacagtgaccatccacaatgaggtgctgcggcagaccaaggaggagatcaccagccccccaggagaaggagtgtacatctacggcctgtacatggatggagctgcctgggacagaagaaatggcaagctgatggagagcacccccaaggtgctcttcacccagctgcctgtgctgcacatctttgccatcaacagcacagcccccaaggaccccaagctgtatgtgtgccccatctacaagaagcccaggagaacagacctgaccttcatcaccgtggtgtacctgaggacagtgctgagcccagaccactggatcctgcggggcgtggccctgctgtgtgacatcaagtag

SEQ ID NO: 150649 - DNA, 13365 bp, synthetic construct
  misc_feature 1..13365: note = Description of Artificial Sequence: Synthetic coding sequence
  source 1..13365: mol_type = other DNA
atgatgaagctgtacatcgacaatgctgccccagacaagctgaagggcctgtgcatcttctttgtgcgctgcagaaatgatgtggccatcaacgtgaagaccatccaggaggaggccctcttcaccgtgctggatgccagcaagggcctgctgaatggcatccgggacatgctggccaacatcttcctgcctgctgtgctggccaccaacaactggggcgccctgaaccagagcaagcagggcgagagcgagaagcacatcttcacagagaccatcaaccgctacctgtccttcctggatggagcccgcatcagcattgagggcaccgtgaagctgaagaccatcgacaacgtgaacttcagcaagctgcacacctttgaggaggtgacagctgctgccagcaacagcgagaccgtgcaccagctggaggaggtgctgatggtgtggtacaagcagatcgagcaggtgctgattgagagcgagcagatgaggaaggaggccggggacagcggccccctgacagagctggagcactggaagaggatgtctgccaagttcaactacatcatcgagcagatcaagggccccagctgcaaggccgtcatcaacgtgctgaatgtggcccacagcaagctgctgaagaactggagggacctggatgcccgcatcacagacacagccaatgaaagcaaggacaacgtgcgctacctgtacaccctggagaaggtgtgccagcccctgtacaaccacgacctggtgtccatggcccacggcatccagaacctgatcaatgccatccgcatgatccacggcgtgagccgctactacaacaccagcgagaggatgaccagcctcttcatcaaggtgaccaaccagatggtgacagcctgcaaggcctacatcacagatggcggcctgaaccacgtgtgggaccaggagacccctgtggtgctgaagaagatccaggactgcatcttcctgttcaaggagtaccaggccagcttccacaagaccaggaagctgatcagcgagagcagcggggagaagagctttgaggtgtctgagatgtacatctttgggaagtttgaggccttctgcaagaggctggagaagatcacagagatgatcaccgtggtgcagacctacagcaccctgagcaacagcaccatcgagggcatcgacatcatggccatcaagttcaggaacatctaccagggcgtgaagaagaagcagtatgacatcctggaccccaggagaacagaatttgacacagacttcctggacttcatgaccaagatcaatggcctggaggtgcagatccaggccttcatgaacagcagctttgggaagatcctgagcagccagcaggccctgcagctgctgcagcgcttccagaagctgaacatcccctgcctgggcctggagatcaaccacaccatcgagcgcatcctgcagtactacgtggccgagctggatgccaccaagaagctgtaccacagccagaaggatgatcctcccctggccaggaacatgccacccatcgccggcaagatcctgtgggtgcggcagctgtaccgccgcatcagcgagcccatcaactacttcttcaagaacagcgacatcctgagcagcccagatggcaaggctgtgatccggcagtacaacaagatctcctatgtgctggtggagtttgaggtggtgtaccacacagcctggatccgggagatcagccagctgcactacgccctgcaggccaccctgtttgtgcgccaccctgagaccgggaagctgctggtgaactttgaccccaagatcctggaggtggtgcgggagaccaagtgcatgatcaagatgaagctggatgtgcctgagcaggccaagaggctgctgaagctggagagcaagctgaaggctgacaagctgtacctgcagggcctgctgcagtactatgatgagctgtgccaggaggtgcccagcgtgtttgtgaacctgatgacccccaagatgaagaaggtggagagcgtgctgcggcagggcctgactgtgctgacctggagcagcctgaccctggagagcttcttccaggaggtggagctggtgctggacatgttcaaccagctgctgaagaagatcagtgacctgtgtgagatgcacatcgacacagtgctgaaggagatcgccaagacagtgctgatcagcctgcctgagagcggggccaccaaggtggaggacatgctgaccctgaatgagacctacaccaaggagtgggccgacatcctgaaccacaagagcaagcacgtggaggaggccgtgcgggagctgatcagcatctttgagcagatctatgaggtgaagtacacaggcaaggtgggcaagcagagcgagcagaggaagcacgtggtgtttggcagcgagaccggggagggggagaacaatgactatgaggccaacatcgtgaatgaatttgacacccatgacaaggaggatgagttcaagaaggagtgcaaggaggtgtttgccttcttcagccaccagctgctggacagcctgcagaaggccacccggctgagcctggacaccatgaagaggcgcatctttgtggccagcctgtatggcaggaagcagagcgaggacatcatctccttcatcaagtctgaggtgcacctggccatccccaacgtggtgatgatccccagcctggatgacatccagcaggccatcaacaggatgatccagctgaccctggaggtgtcccggggcgtggcccactggggccagcagcagatccggcccatcaagagcgtcatccccagccccaccaccacagatgtgacccaccagaacacaggcaagctgctgaagaaggaggagaggagctttgaggaggccatcccagccaggaagctgaagaacttctacccaggagtggccgagcacaaggacatcagcaagctggtgctgctgctgagcagctctgtgaacagcctgaggaaggccgcccacgaggccctgcaggacttccagaagtacaagaccctgtggacagaggacagagatgtgaaggtgaaggagttcctggccaacaaccccagcctgacagagatccgctctgagatcctgcactacgccacctttgagcaggagattgatgagctgaagcccatcatcgtggtgggcgccctggagctgcacacagagcccatgaagctggccctgagcattgaggccaaggcctggaagatgctgctgtgccgctacctgaatgaggagtacaagaagaagatgagctacatgattgccttcatcaatgagtacctgaagaagctgagccggcccatccgggacctggatgatgtgcgctttgccatggaggccctgagctgcatccgggacaatgagatccagatggacatgaccctgggccccatcgaggaggcctatgccatcctgaacagatttgaggtggaggtgaccaaggaggagagcgaggccgtggacaccctgcgctacagcttcaacaagctgcagagcaaggctgtgtctgtgcaggaggacctggtgcaggtgcagcccaagttcaagagcaacctgctggagagcgtggaggtgttccgggaggatgtgatcaactttgctgaggcctatgagctggagggccccatggtgcccaacatccccccccaggaggccagcaaccggctgcagatcttccaggccagctttgatgacctgtggaggaagtttgtgacctacagcagtggagagcagctgtttggcctgcctgtgacagattatgaggtgctgcacaagaccaggaaggagctgaacctgctgcagaagctgtatggcctgtatgacacagtgatgagcagcatcagcggctactatgagatcctgtggggagatgtggacatcgagaagatcaatgctgagctgctggagttccagaaccgctgcaggaagctgcccaagggcctgaaggactggcaggccttcctggacctgaagaagagaattgatgacttcagcgagagctgccccctgctggagatgatgaccaacaaggccatgaagcagaggcactgggaccgcatcagcgagctgaccggcaccccatttgatgtggagagtgacagcttctgcctgaggaacatcatggaggcccccctgctgaagcacaaggatgacatcgaggacatctgcatcagcgccatcaaggagaaggacatcgaggccaagctgacccaggtgattgagaactggaccaaccagaacctgagctttgctgccttcaagggcaagggggagctgctgctgaagggcacagagagcggggagatcatcaccctgatggaggacagcctgatggtgctgggcagcctgctgagcaaccgctacaatgcccccttcaagaagaacatccagaactgggtgtacaagctgagcaccagcagtgacatcatcgaggagtggctggtggtgcagaacctgtgggtgtacctggaggccgtgtttgtgggcggggacatcgccaagcagctgccccaggaggccaagcgcttccagaacatcgacaagtcctggatcaagatcatgcagagggcccacgagaaccccaacgtcatcaactgctgcgtgggagatgagaccatgggccagctgctgccccacctgcacgagcagctggaggtgtgccagaagagcctgaccggctacctggagaagaagaggctgctcttcccccgcttcttctttgtgtctgaccctgtgctgctggagatcctgggccaggccagtgacagccacaccatccagccccacctgcctgctgtgtctgacaacatcaatgaggtgaccttccacgccaaggactatgaccgcatcatggccgtcatcagccgggagggggagaagatcgtgctggacaacagcgtgatggccaagggccctgtggagatctggctgctggacctgctgaagatgcagatgagcagcctgcacaacatcatccgcagcgccttctaccagatcagtgacagcggcttccagctgctgcccttcctgagccacttccctgcccaggtgggcctgctgggcatccagatgctgtggacccatgacagcgaggaggccctgagaaatgccaaggatgacaggaagatcatgcaggtgaccaaccagaagttcctggacatcctgaacaccctcatcagccagaccacccatgacctgagcaagtttgacagagtgaagtttgagaccctcatcaccatccacgtgcaccagagggacatctttgatgacctggtgaagatgcacatcaagagccccacagactttgagtggctgaagcagagccgcttctacttcaaggaggacctggaccagacagtggtgtccatcacagatgtggacttcatctaccagaatgagttcctgggctgcacagaccggctggtgatcacccccctgacagaccgctgctacatcaccctggcccaggccctgggcatgaacatgggcggggccccagctggccctgctggcaccgggaagacagagaccaccaaggacatgggccgctgcctgggcaagtatgtggtggtgttcaactgcagcgaccagatggacttccggggcctgggccgcatcttcaagggcctggcccagagcggctcctggggctgctttgatgagttcaacagaattgagctgcctgtgctgtctgtggccgcccagcagatctacatcgtgctgacagccaggaaggagaggaagaagcagttcatcttcagtgatggagactgtgtggacctgaaccctgagtttggcatcttcctgaccatgaaccctggctacgccggccggcaggagctgcctgagaacctgaagatccagttcagaacagtggccatgatggtgcctgaccggcaggtgcactatgactttggcctgaggaacatcctgtctgtgctgcggaccctgggcagccagaagagggcccggcctgaggacagcgagctgagcatcgtgatgaggggcctgcgggacatgaacctgagcaagctggtggatgaagatgagcccctcttcctgagcctcatcaatgacctcttccctggcctgcagctggacagcaacacctacgccgagctgcagaatgctgtggcccaccaggtgcagatcgagggcctcatcaaccaccccccctggaacctgaagctggtgcagctgtatgagaccagcctggtgcgccacggcctgatgaccctgggccccagcggcagcggcaagaccaccgtcatcaccatcctgatgaaggcccagacagaatgtggccggccccaccgggagatgaggatgaaccccaaggccatcacagccccccagatgtttggccgcctggacacagccaccaatgactggacagatggcatcttcagcaccctgtggaggaagaccctgaaggccaagaagggggagaacatcttcctgatcctggatggccctgtggatgccatctggattgagaacctgaacagcgtgctggatgacaacaagaccctgaccctggccaatggagaccgcatccccatggcccccagctgcaagctgctgtttgaggtgcacaacattgaaaatgccagccctgccaccgtgtccaggatgggcatggtgtacatcagcagcagcgccctgtcctggaggcccatcctgcaggcctggctgaagaagaggacagcccaggaggccgctgtgttcctgaccctgtatgagaaggtgtttgaggacacctacacctacatgaagctgaacctgaaccccaagatgcagctgctggagtgcaactacatcgtgcagagcctgaacctgctggagggcctcatccccagcaaggaggagggcggcgtgtcctgtgtggagcacctgcacaagctgtttgtgtttggcctgatgtggagcctgggcgccctgctggagctggagagccgggagaagctggaggccttcctgcggcagcacgagagcaagctggacctgcctgagatccccaagggcagcaaccagaccatgtatgagttctacgtgacagattatggagactgggagcactggaacaagaagctgcagccctactactaccccacagacagcatccctgagtacagcagcatcctggtgcccaacgtggacaacatccgcaccaacttcctgattgacaccatcgccaagcagcacaaggctgtgctgctgactggagagcagggcacagccaagacagtgatggtgaaggcctacctgaagaagtatgaccctgaggtgcagctgagcaagagcctgaacttcagcagcgccacagagcccatgatgttccagaggaccatcgagagctatgtggacaagagaattggcagcacctacggccccccaggcggcaggaagatgacagtgttcattgatgacatcaacatgcctgtgatcaatgagtggggagaccagatcaccaatgaaattgtgcggcagatgatggagatggagggcatgtacagcctggacaagccaggggacttcaccaccatcgtggatgtgcagctgattgctgccatgatccaccctgggggcggcagaaatgacatcccccagaggctgaagaggcagttcaccgtcttcaactgcaccctgcccagcaatgccagcattgacaagatcttcggcatcatcggctgcggctactttgacccctgccgctccttcaagccccagatctgtgagatgattgtgaacctggtgtctgtgggccgggtgctgtggcagtggaccaaggtgaagatgctgcccacccccagcaagttccactacatcttcaacctgcgggacctgagccgcatctggcagggcatgctgaccatcaaggccgaggagtgtgccagcatccccaccctgctgagcctcttcaagcatgaatgttcccgggtgattgctgaccgcttcatcaccccagaagatgagcagtggttcaatgcccacctgaccagggctgtggaggagaacattggaagtgatgctgccagctgcatcctgcctgagccctactttgtggacttcctgcgggagatgcctgagcccactggagatgagccagaagattctgtgtttgaggtgcccaagatctatgagctgatgcccagctttgacttcctggccgagaagctgcagttctaccagaggcagttcaatgagatcatccggggcaccagcctggacctggtgttcttcaaggatgccatgacccacctgatcaagatcagccgcatcatccgcaccagctgtggaaatgccctgctggtgggcgtgggcggcagcggcaagcagagcctgagccggctggccagcttcatcgccggctaccagatcttccagatcaccctgaccaggagctacaacgtgaccaacctgacagatgacctgaaggccctgtacaaggtggccggggctgatggcaagggcatcaccttcatcttcacagacagcgagatcaaggatgaggccttcctggagtacctgaacaacctgctgagcagtggagagatcagcaacctgtttgccagagatgagatggatgagatcacccagggcctcatctctgtgatgaagcgggagctgcccaggcacccccccacctttgacaacctgtatgagtacttcatcagccgcagcaggaagaacctgcacgtggtgctgtgcttcagccctgtgggggagaagttccgggcccggagcctgaagtttcctggcctcatcagcggctgcaccatggactggttcagccgctggccccgggaggccctgattgctgtggccagctacttcctgagtgactacaacatcgtgtgcagcagcgagatcaagaggcaggtggtggagaccatgggcctcttccatgacatggtgtctgagagctgtgagagctacttccagcgctacagaagaagagcccacgtgacccccaagagctacctgtccttcatcaatggctacaagaacatctatgcagagaaggtgaagttcatcaatgagcaggccgagaggatgaacatcggcctggacaagctgatggaggccagcgagagcgtggccaagctgagccaggacctggccgtgaaggagaaggagctggccgtggccagcatcaaggcagatgaggtgctggccgaggtgacagtgtctgcccaggccagcgccaagatcaagaatgaggtgcaggaggtgaaggacaaggcccagaagatcgtggatgaaattgattctgagaaggtgaaggccgagagcaagctggaggccgccaagccagccctggaggaggccgaggccgccctgaacaccatcaagcccaatgacatcgccaccgtgaggaagctggccaagccaccccacctgatcatgaggatcatggactgtgtgctgctgctcttccagaagaagattgatcctgtgaccatggaccctgagaagagctgctgcaagcccagctggggcgagagcctgaagctgatgtctgccaccggcttcctgtggagcctgcagcagttccccaaggacaccatcaatgaggagaccgtggagctgctgcagccctacttcaacatggatgactacacctttgaaagtgccaagaaggtgtgtggaaatgtggccggcctgctgtcctggaccctggccatggccatcttctacggcatcaaccgggaggtgctgcccctgaaggccaacctggccaagcaggagggccgcctggccgtggccaatgctgagctgggcaaggcccaggccctgctggatgagaagcaggccgagctggacaaggtgcaggccaagtttgatgctgccatgaatgagaagatggacctgctgaatgatgctgacacctgcaggaagaagatgcaggccgccagcaccctgattgatggcctgtctggagagaagatccgctggacccagcagagcaaggagttcaaggcccagatcaaccggctggtgggggacatcctgctgtgcaccggcttcctgagctacctgggccccttcaaccagatcttcaggaactacctgctgaaggaccagtgggagatggagctgcgggccaggaagatccccttcacagagaacctgaacctgatctccatgctggtggacccccccaccatcggggagtggggcctgcagggcctgcctggagatgacctgagcatccagaatggcatcatcgtgaccaaggccacccgctaccccctgctgattgacccccagacccagggcaagacctggatcaagagcaaggagaaggaaaatgacctgcaggtgaccagcctgaaccacaagtacttccgcacccacctggaggacagcctgagcctgggccggcccctgctgattgaggacatccacgaggagctggaccctgccctggacaacgtgctggagaagaacttcatcaagagcggcaccaccttcaaggtgaaggtgggggacaaggaatgtgacatcatggacaccttcaagctgtacatcaccaccaagctgcccaacccagccttcaccccagagatcaatgccaagacctctgtgattgacttcaccgtgaccatgaagggcctggagaaccagctgctgcggcgggtcatcctgacagagaagcaggagctggaggccgagcgggtgaagctgctggaggatgtgaccttcaacaagaggaagatgaaggagctggaggacaacctgctgtacaagctgagcgccaccaagggcagcctggtggatgatgagagcctgattggagtgctgcggaccaccaagcagacagctgctgaggtgtctgagaagctgcacgtggccgctgagacagagatcaagatcaatgctgcccaggaggagttccggcctgctgccacccggggcagcatcctgtacttcctgatcacagagatgtccatggtgaacatcatgtaccagaccagcctggcccagttcctgaagctgtttgaccagagcatggcccggtctgagaagagccccctgccccagaagaggatcaccaacatcatcgagtacctgacctatgaggtgttcacctacagcgtgcggggcctgtatgagaaccacaagttcctgtttgtgctgctgatgaccctgaagattgacctgcagaggggcaccgtgaagcaccgggagttccaggccctgatcaagggcggggccgccctggacctgaaggcctgcccccccaagccctaccgctggatcctggacatgacctggctgaacctggtggagctgagcaagctgccccagtttgctgagatcatgaaccagatcagcagaaatgagaagggctggaagtcctggtttgacaaggatgcccctgaggaggagatcatcccagatggctacaatgacagcctggacacctgccacaagctgctgctgatccgctcctggtgcccagacagaacagtgttccaggccaggaagtacatcgctgacagcctggaggagaagtacacagagcccgtcatcctgaacctggagaagacctgggaggagagtgacaccaggacccccctcatctgcttcctgtccatgggcagtgaccccaccaaccagattgatgccctggccaagaagctgaagctggagtgcaggaccatctccatgggccagggccaggaggtgcacgccaggaagctgatccagatgtccatgcagcagggcggctgggtgctgctgcagaactgccacctgggcctggagttcatggaggagctgctggagaccctcatcaccacagaggccagtgatgacagcttccgggtgtggatcaccacagagccccatgaccgcttccccatcaccctgctgcagaccagcctgaagttcaccaatgagcccccccagggcgtgcgggccggcctgaagaggacctttgctggcatcaaccaggacctgctggacatcagcaacctgcccatgtggaagcccatgctgtacacagtggccttcctgcacagcacagtgcaggagaggaggaagtttggccccctgggctggaacatcccctatgagttcaacagcgctgacttcagcgcctctgtgcagttcatccagaaccacctggatgaatgtgacatcaagaagggcgtgtcctggaacacagtgcgctacatgattggagaggtgcagtatggaggccgggtgacagatgactttgacaagaggctgctgaactgctttgcccgggtgtggttcagcgagaagatgtttgagcccagcttctgcttctacacaggctacaagatccccctgtgcaagaccctggaccagtactttgagtacatccagagcctgcccagcctggacaaccctgaggtgtttggcctgcaccccaatgctgacatcacctaccagagcaacacagccagcgctgtgctggagaccatcaccaacatccagcccaaggagagcggcggcggcgtgggggagacccgggaggccatcgtgtaccgcctgtctgaggacatgctgagcaagctgcccccagactacatcccccatgaggtgaagagccgcctcatcaagatgggccacctgaacagcatgaacatcttcctgcggcaggagattgacaggatgcagagggtcatcagcatcctgcggagcagcctgagtgacctgaagctggccatcgagggcaccatcatcatgtctgagaacctgagagatgccctggacaacatgtatgatgcccgcatcccccagctgtggaagagggtgtcctgggacagcagcaccctgggcttctggttcacagagctgctggagagaaatgcccagttcagcacctggatctttgagggccggcccaacgtgttctggatgacaggcttcttcaacccccagggcttcctgacagccatgaggcaggaggtgacccgggcccacaagggctgggccctggacacagtgaccatccacaatgaggtgctgcggcagaccaaggaggagatcaccagccccccaggagaaggagtgtacatctacggcctgtacatggatggagctgcctgggacagaagaaatggcaagctgatggagagcacccccaaggtgctcttcacccagctgcctgtgctgcacatctttgccatcaacagcacagcccccaaggaccccaagctgtatgtgtgccccatctacaagaagcccaggagaacagacctgaccttcatcaccgtggtgtacctgaggacagtgctgagcccagaccactggatcctgcggggcgtggccctgctgtgtgacatcaagtag

SEQ ID NO: 150650 - DNA, 12567 bp, synthetic construct
  misc_feature 1..12567: note = Description of Artificial Sequence: Synthetic coding sequence
  source 1..12567: mol_type = other DNA
atggagaaggatgctgaagatggagcccccagcgagggcgctgaggccccacccagcacagaggaggccgccccacccaggtctgaggaggaggaggccccccggccccccaccgtggaggccccagcagaagatggcttcagccccagcgcagaagatgctgtgtcctctgtggtggactacagagacctgatccccagcgaggagggcatcgtgctgcctgatgaccatgaagctgacctgaacagagtgcggcagaggctggcccccaggcctgtgcagagcgtcatcagcgaggtgctgagcctgcccagcagcagaagaagcagccgctacagaagatccatgagcggcctgcccaacctgcaggagaccctgaaggagcggcaggcccgcttccgggaggcccgggagagccggcggctgaagattgaccccagctacaagtacatctttgagatcctggccgagaacctgggcctggacatcgtgacagtggaggagctgatcctggactgccccagcctggaggccttcaccaacttctttgccaaggatggctgcaagaccctgaagttcctgtaccaggagggagatgtgcccggcattgaatgtggccgcaccatcgccggggccaccaagggggccaagatgatgaagctgtacatcgacaatgctgccccagacaagctgaagggcctgtgcatcttctttgtgcgctgcagaaatgatgtggccatcaacgtgaagaccatccaggaggaggccctcttcaccgtgctggatgccagcaagggcctgctgaatggcatccgggacatgctggccaacatcttcctgcctgctgtgctggccaccaacaactggggcgccctgaaccagagcaagcagggcgagagcgagaagcacatcttcacagagaccatcaaccgctacctgtccttcctggatggagcccgcatcagcattgagggcaccgtgaagctgaagaccatcgacaacgtgaacttcagcaagctgcacacctttgaggaggtgacagctgctgccagcaacagcgagaccgtgcaccagctggaggaggtgctgatggtgtggtacaagcagatcgagcaggtgctgattgaaagtgagcagatgaggaaggaggccggggacagcggccccctgacagagctggagcactggaagaggatgtctgccaagttcaactacatcatcgagcagatcaagggccccagctgcaaggctgtgatcaacgtgctgaatgtggcccacagcaagctgctgaagaactggagggacctggatgcccgcatcacagacacagccaatgaaagcaaggacaacgtgcgctacctgtacaccctggagaaggtgtgccagcccctgtacaaccacgacctggtgtccatggcccacggcatccagaacctgatcaatgccatccgcatgattcatggagtgagccgctactacaacaccagcgagaggatgaccagcctcttcatcaaggtgaccaaccagatggtgacagcctgcaaggcctacatcacagatggcggcctgaaccacgtgtgggaccaggagacccctgtggtgctgaagaagatccaggactgcatcttcctgttcaaggagtaccaggccagcttccacaagaccaggaagctgatcagcgagagcagtggagagaagagctttgaggtgtctgagatgtacatctttgggaagtttgaggccttctgcaagaggctggagaagatcacagagatgatcaccgtggtgcagacctacagcaccctgagcaacagcaccatcgagggcatcgacatcatggccatcaagttcaggaacatctaccagggcgtgaagaagaagcagtatgacatcctggaccccaggagaacagaatttgacacagacttcctggacttcatgaccaagatcaatggcctggaggtgcagatccaggccttcatgaacagcagctttgggaagatcctgagcagccagcaggccctgcagctgctgcagcgcttccagaagctgaacatcccctgcctgggcctggagatcaaccacaccatcgagcgcatcctgcagtactacgtggccgagctggatgccaccaagaagctgtaccacagccagaaggatgacccccccctggccaggaacatgccacccatcgccggcaagatcctgtgggtgcggcagctgtaccgccgcatcagcgagcccatcaactacttcttcaagaacagcgacatcctgagcagcccagatggcaaggccgtcatccggcagtacaacaagatctcctatgtgctggtggagtttgaggtggtgtaccacacagcctggatccgggagatcagccagctgcactacgccctgcaggccaccctgtttgtgcgccaccctgagaccgggaagctgctggtgaactttgaccccaagatcctggaggtggtgcgggagaccaagtgcatgatcaagatgaagctggatgtgcctgagcaggccaagaggctgctgaagctggagagcaagctgaaggctgacaagctgtacctgcagggcctgctgcagtactatgatgagctgtgccaggaggtgcccagcgtgtttgtgaacctgatgacccccaagatgaagaaggtggagagcgtgctgcggcagggcctgactgtgctgacctggagcagcctgaccctggagagcttcttccaggaggtggagctggtgctggacatgttcaaccagctgctgaagaagatcagtgacctgtgtgagatgcacatcgacacagtgctgaaggagatcgccaagacagtgctgatcagcctgcctgagagcggggccaccaaggtggaggacatgctgaccctgaatgagacctacaccaaggagtgggccgacatcctgaaccacaagagcaagcacgtggaggaggccgtgcgggagctgatcagcatctttgagcagatctatgaggtgaagtacaccgggaaggtgggcaagcagagcgagcagaggaagcacgtggtgtttggaagtgaaacaggagaaggagaaaataatgactatgaggccaacatcgtgaatgaatttgacacccatgacaaggaggatgagttcaagaaggagtgcaaggaggtgtttgccttcttcagccaccagctgctggacagcctgcagaaggccacccggctgagcctggacaccatgaagaggcgcatctttgtggccagcctgtatggcaggaagcagagcgaggacatcatctccttcatcaagtctgaggtgcacctggccatccccaacgtggtgatgatccccagcctggatgacatccagcaggccatcaacaggatgatccagctgaccctggaggtgtccagaggagtggcccactggggccagcagcagatccggcccatcaagagcgtcatccccagccccaccaccacagatgtgacccaccagaacacaggcaagctgctgaagaaggaggagaggagctttgaggaggccatcccagccaggaagctgaagaacttctacccaggagtggccgagcacaaggacatcagcaagctggtgctgctgctgagcagctctgtgaacagcctgaggaaggccgcccacgaggccctgcaggacttccagaagtacaagaccctgtggacagaagatagagatgtgaaggtgaaggagttcctggccaacaaccccagcctgacagagatccgctctgagatcctgcactacgccacctttgagcaggagattgatgagctgaagcccatcatcgtggtgggcgccctggagctgcacacagagcccatgaagctggccctgagcattgaggccaaggcctggaagatgctgctgtgccgctacctgaatgaggagtacaagaagaagatgagctacatgattgccttcatcaatgagtacctgaagaagctgagccggcccatccgggacctggatgatgtgcgctttgccatggaggccctgagctgcatccgggacaatgagatccagatggacatgaccctgggccccatcgaggaggcctatgccatcctgaacagatttgaggtggaggtgaccaaggaggagagcgaggccgtggacaccctgcgctacagcttcaacaagctgcagagcaaggctgtgtctgtgcaggaggacctggtgcaggtgcagcccaagttcaagagcaacctgctggagagcgtggaggtgttcagagaagatgtgatcaactttgctgaggcctatgagctggagggccccatggtgcccaacatccccccccaggaggccagcaaccggctgcagatcttccaggccagctttgatgacctgtggaggaagtttgtgacctacagcagcggggagcagctgtttggcctgcctgtgacagattatgaggtgctgcacaagaccaggaaggagctgaacctgctgcagaagctgtatggcctgtatgacacagtgatgagcagcatcagcggctactatgagatcctgtggggagatgtggacatcgagaagatcaatgctgagctgctggagttccagaaccgctgcaggaagctgcccaagggcctgaaggactggcaggccttcctggacctgaagaagagaattgatgacttcagcgagagctgccccctgctggagatgatgaccaacaaggccatgaagcagaggcactgggaccgcatcagcgagctgaccggcaccccatttgatgtggagagtgacagcttctgcctgaggaacatcatggaggcccccctgctgaagcacaaggatgacatcgaggacatctgcatcagcgccatcaaggagaaggacatcgaggccaagctgacccaggtgattgagaactggaccaaccagaacctgagctttgctgccttcaagggcaaaggagagctgctgctgaagggcacagaaagtggagagatcatcaccctgatggaggacagcctgatggtgctgggcagcctgctgagcaaccgctacaatgcccccttcaagaagaacatccagaactgggtgtacaagctgagcaccagcagtgacatcatcgaggagtggctggtggtgcagaacctgtgggtgtacctggaggccgtgtttgtgggcggggacatcgccaagcagctgccccaggaggccaagcgcttccagaacatcgacaagtcctggatcaagatcatgcagagggcccacgagaaccccaacgtcatcaactgctgcgtgggagatgagaccatgggccagctgctgccccacctgcacgagcagctggaggtgtgccagaagagcctgaccggctacctggagaagaagaggctgctcttcccccgcttcttctttgtgtctgaccctgtgctgctggagatcctgggccaggccagtgacagccacaccatccagccccacctgcctgctgtgtctgacaacatcaatgaggtgaccttccacgccaaggactatgaccgcatcatggctgtgatcagccgggagggggagaagatcgtgctggacaacagcgtgatggccaagggccctgtggagatctggctgctggacctgctgaagatgcagatgagcagcctgcacaacatcatccgcagcgccttctaccagatcagtgacagcggcttccagctgctgcccttcctgagccacttccctgcccaggtgggcctgctgggcatccagatgctgtggacccatgattctgaggaggccctgagaaatgccaaggatgacaggaagatcatgcaggtgaccaaccagaagttcctggacatcctgaacaccctcatcagccagaccacccatgacctgagcaagtttgacagagtgaagtttgagaccctcatcaccatccacgtgcaccagagggacatctttgatgacctggtgaagatgcacatcaagagccccacagactttgagtggctgaagcagagccgcttctacttcaaggaggacctggaccagacagtggtgtccatcacagatgtggacttcatctaccagaatgagttcctgggctgcacagaccggctggtgatcacccccctgacagaccgctgctacatcaccctggcccaggccctgggcatgaacatgggcggggccccagctggccctgctggcaccgggaagacagagaccaccaaggacatgggccgctgcctgggcaagtatgtggtggtgttcaactgcagcgaccagatggacttccggggcctgggccgcatcttcaagggcctggcccagagcggctcctggggctgctttgatgagttcaaccgcatcgagctgcctgtgctgtctgtggccgcccagcagatctacatcgtgctgacagccaggaaggagaggaagaagcagttcatcttcagtgatggagactgtgtggacctgaaccctgagtttggcatcttcctgaccatgaaccctggctacgccggccggcaggagctgcctgagaacctgaagatccagttcagaacagtggccatgatggtgcctgaccggcagatcatcatgagggtgaagctggccagctgtggcttcctggagaatgtcatcctggcccagaagttctacgtgctgtacaagctgtgtgaggagcagctgaccaagcaggtgcactatgactttggcctgaggaacatcctgtctgtgctgcggaccctgggcagccagaagagggcccggccagaagattctgagctgagcatcgtgatgaggggcctgcgggacatgaacctgagcaagctggtggatgaagatgagcccctcttcctgagcctcatcaatgacctcttccctggcctgcagctggacagcaacacctatgcagagctgcagaatgctgtggcccaccaggtgcagatcgagggcctcatcaaccaccccccctggaacctgaagctggtgcagctgtatgagaccagcctggtgagacatggcctgatgaccctgggccccagcggcagcggcaagaccaccgtcatcaccatcctgatgaaggcccagacagaatgtggccggccccaccgggagatgaggatgaaccccaaggccatcacagccccccagatgtttggccgcctggacacagccaccaatgactggacagatggcatcttcagcaccctgtggaggaagaccctgaaggccaagaagggggagaacatcttcctgatcctggatggccctgtggatgccatctggattgagaacctgaacagcgtgctggatgacaacaagaccctgaccctggccaacggggaccgcatccccatggcccccagctgcaagctgctgtttgaggtgcacaacattgaaaatgccagccctgccaccgtgtccaggatgggcatggtgtacatcagcagcagcgccctgtcctggaggcccatcctgcaggcctggctgaagaagaggacagcccaggaggccgctgtgttcctgaccctgtatgagaaggtgtttgaggacacctacacctacatgaagctgaacctgaaccccaagatgcagctgctggagtgcaactacatcgtgcagagcctgaacctgctggagggcctcatccccagcaaggaggagggcggcgtgtcctgtgtggagcacctgcacaagctgtttgtgtttggcctgatgtggagcctgggcgccctgctggagctggagagccgggagaagctggaggccttcctgcggcagcacgagagcaagctggacctgcctgagatccccaagggcagcaaccagaccatgtatgagttctacgtgacagattatggagactgggagcactggaacaagaagctgcagccctactactaccccacagacagcatccctgagtacagcagcatcctggtgcccaacgtggacaacatccgcaccaacttcctgattgacaccatcgccaagcagcacaaggctgtgctgctgaccggggagcagggcacagccaagacagtgatggtgaaggcctacctgaagaagtatgaccctgaggtgcagctgagcaagagcctgaacttcagcagcgccacagagcccatgatgttccagaggaccatcgagagctatgtggacaagagaattggcagcacctacggccccccaggcggcaggaagatgaccgtcttcattgatgacatcaacatgcctgtgatcaatgagtggggagaccagatcaccaatgagatcgtgcggcagatgatggagatggagggcatgtacagcctggacaagccaggggacttcaccaccatcgtggatgtgcagctgattgctgccatgatccaccctgggggcggcagaaatgacatcccccagaggctgaagaggcagttcaccgtcttcaactgcaccctgcccagcaatgccagcattgacaagatcttcggcatcatcggctgcggctactttgacccctgccgctccttcaagccccagatctgtgagatgattgtgaacctggtgtctgtgggccgggtgctgtggcagtggaccaaggtgaagatgctgcccacccccagcaagttccactacatcttcaacctgcgggacctgagccgcatctggcagggcatgctgaccatcaaggccgaggagtgtgccagcatccccaccctgctgagcctcttcaagcatgagtgcagccgggtgattgctgaccgcttcatcaccccagaagatgagcagtggttcaatgcccacctgaccagggctgtggaggagaacatcggcagtgatgctgccagctgcatcctgcctgagccctactttgtggacttcctgcgggagatgcctgagcccactggagatgagcctgaggacagcgtgtttgaggtgcccaagatctatgagctgatgcccagctttgacttcctggccgagaagctgcagttctaccagaggcagttcaatgagatcatccggggcaccagcctggacctggtgttcttcaaggatgccatgacccacctgatcaagatcagccgcatcatccgcaccagctgtggaaatgccctgctggtgggcgtgggcggcagcggcaagcagagcctgagccggctggccagcttcatcgccggctaccagatcttccagatcaccctgaccaggagctacaacgtgaccaacctgacagatgacctgaaggccctgtacaaggtggccggggctgatggcaagggcatcaccttcatcttcacagattctgagatcaaggatgaggccttcctggagtacctgaacaacctgctgagcagcggggagatcagcaacctgtttgccagagatgagatggatgagatcacccagggcctcatctctgtgatgaagcgggagctgcccaggcacccccccacctttgacaacctgtatgagtacttcatcagccgcagcaggaagaacctgcacgtggtgctgtgcttcagccctgtgggggagaagttccgggcccggagcctgaagtttcctggcctcatcagcggctgcaccatggactggttcagccgctggccccgggaggccctgattgctgtggccagctacttcctgagtgactacaacatcgtgtgcagcagcgagatcaagaggcaggtggtggagaccatgggcctcttccatgacatggtgtctgagagctgtgagagctacttccagcgctacagaagaagagcccacgtgacccccaagagctacctgtccttcatcaatggctacaagaacatctatgcagagaaggtgaagttcatcaatgagcaggccgagaggatgaacatcggcctggacaagctgatggaggccagcgagagcgtggccaagctgagccaggacctggccgtgaaggagaaggagctggccgtggccagcatcaaggcagatgaggtgctggccgaggtgacagtgtctgcccaggccagcgccaagatcaagaatgaggtgcaggaggtgaaggacaaggcccagaagatcgtggatgaaattgacagcgagaaggtgaaggccgagagcaagctggaggccgccaagccagccctggaggaggccgaggccgccctgaacaccatcaagcccaatgacatcgccaccgtgaggaagctggccaagccaccccacctgatcatgaggatcatggactgtgtgctgctgctcttccagaagaagattgatcctgtgaccatggaccctgagaagagctgctgcaagcccagctggggcgagagcctgaagctgatgtctgccaccggcttcctgtggagcctgcagcagttccccaaggacaccatcaatgaggagaccgtggagctgctgcagccctacttcaacatggatgactacacctttgagagcgccaagaaggtgtgtggaaatgtggccggcctgctgtcctggaccctggccatggccatcttctacggcatcaaccgggaggtgctgcccctgaaggccaacctggccaagcaggagggccgcctggccgtggccaatgctgagctgggcaaggcccaggccctgctggatgagaagcaggccgagctggacaaggtgcaggccaagtttgatgctgccatgaatgagaagatggacctgctgaatgatgctgacacctgcaggaagaagatgcaggccgccagcaccctgattgatggcctgagcggggagaagatccgctggacccagcagagcaaggagttcaaggcccagatcaaccggctggtgggggacatcctgctgtgcaccggcttcctgagctacctgggccccttcaaccagatcttcaggaactacctgctgaaggaccagtgggagatggagctgcgggccaggaagatccccttcacagagaacctgaacctgatctccatgctggtggacccccccaccatcggggagtggggcctgcagggcctgcctggagatgacctgagcatccagaatggcatcatcgtgaccaaggccacccgctaccccctgctgattgacccccagacccagggcaagacctggatcaagagcaaggagaaggaaaatgacctgcaggtgaccagcctgaaccacaagtacttccgcacccacctggaggacagcctgagcctgggccggcccctgctgattgaggacatccacgaggagctggaccctgccctggacaacgtgctggagaagaacttcatcaagagcggcaccaccttcaaggtgaaggtgggggacaaggaatgtgacatcatggacaccttcaagctgtacatcaccaccaagctgcccaacccagccttcaccccagagatcaatgccaagaccagcgtcatcgacttcaccgtgaccatgaagggcctggagaaccagctgctgcggcgggtcatcctgacagagaagcaggagctggaggccgagcgggtgaagctgctggaggatgtgaccttcaacaagaggaagatgaaggagctggaggacaacctgctgtacaagctgagcgccaccaagggcagcctggtggatgatgagagcctcatcggcgtgctgcggaccaccaagcagacagctgctgaggtgtctgagaagctgcacgtggccgctgagacagagatcaagatcaatgctgcccaggaggagttccggcctgctgccacccggggcagcatcctgtacttcctgatcacagagatgtccatggtgaacatcatgtaccagaccagcctggcccagttcctgaagctgtttgaccagagcatggcccggtctgagaagagccccctgccccagaagaggatcaccaacatcatcgagtacctgacctatgaggtgttcacctacagcgtgcggggcctgtatgagaaccacaagttcctgtttgtgctgctgatgaccctgaagattgacctgcagaggggcaccgtgaagcaccgggagttccaggccctgatcaagggcggggccgccctggacctgaaggcctgcccccccaagccctaccgctggatcctggacatgacctggctgaacctggtggagctgagcaagctgccccagtttgctgagatcatgaaccagatcagcagaaatgagaagggctggaagtcctggtttgacaaggatgcccctgaggaggagatcatcccagatggctacaatgacagcctggacacctgccacaagctgctgctgatccgctcctggtgcccagacagaacagtgttccaggccaggaagtacatcgctgacagcctggaggagaagtacacagagcctgtgatcctgaacctggagaagacctgggaggagagtgacaccaggacccccctcatctgcttcctgtccatgggcagtgaccccaccaaccagattgatgccctggccaagaagctgaagctggagtgcaggaccatctccatgggccagggccaggaggtgcacgccaggaagctgatccagatgtccatgcagcaggtgtgtgacaagaggctgctgctgctgcagcactactgctag

SEQ ID NO: 150651 - DNA, 13461 bp, synthetic construct
  misc_feature 1..13461: note = Description of Artificial Sequence: Synthetic coding sequence
  source 1..13461: mol_type = other DNA
atgaggctggccgaggagcgggccgccctggccgcagaaaatgctgatggagagcctggagctgaccggcggctgcggctgctgggcacctacgtggccatgagcctgcggcctgctgctggggcctgggagcgctgtgccggcagcgctgaggccgagcagctgctgcaggccttcctgggcagagatgctgctgagggcccccggcccctgctggtggtgcggcccggcccccggggcctggccatccggcccggcctggaggtgggccctgagagcggcctggccggggccaaggccctcttcttcctgaggacaggccctgagcccccaggccctgacagcttcagaggagctgtggtgtgtggggacctgcctgctgcccccctggagcacctggccgccctcttcagcgaggtggtgctgcctgtgctggccaatgagaagaaccggctgaactggccccacatgatctgtgaagatgtgagaagacatgcccacagcctgcagtgtgacctgagcgtcatcctggagcaggtgaagggcaagaccctgctgcccctgcctgctggcagcgagaagatggagtttgctgacagcaagtctgagaccgtgctggacagcattgacaagagcgtcatctatgccattgaatctgctgtgatcaagtggagctaccaggtgcaggtggtgctgaagcgggagagcagccagcccctgctgcagggcgagaaccccacccccaaggtggagctggagttctggaagagccgctatgaggacctgaagtacatctacaaccagctgcggaccatcaccgtgcggggcatggccaagctgctggacaagctgcagagcagctacttccctgccttcaaggccatgtacagagatgtggtggccgccctggccgaggcccaggacatccacgtgcacctgatccccctgcagaggcacctggaggccctggagaatgctgagttccctgaggtgaagccccagctgcggcccctgctgcacgtggtgtgcctgatctgggccacctgcaagagctaccgcagccctggccgcctgactgtgctgctgcaggagatctgcaacctgctgatccagcaggccagcaactacctgagccctgaggacctgctgcggtctgaggtggaggagagccagaggaagctgcaggtggtgtctgacaccctgtccttcttcaagcaggagttccaggacagaagagagaacctgcacacctacttcaaggagaaccaggaggtgaaggagtgggacttccagagcagcctggtgtttgtgcggctggatggcttcctgggccagctgcacgtggtggagggcctgctgaagacagccctggacttccacaagctgggcaaggtggagttcagcggcgtgagaggaaatgccctgagccagcaggtgcagcagatgcatgaggagttccaggagatgtaccgcctgctgagcggcagcagcagtgactgcctgtacctgcagagcacagactttgaaaatgatgtgtctgagttcaaccagaaggtggaggacctggaccggcggctgggcaccatcttcatccaggcctttgatgatgcccctggcctggagcacgccttcaagctgctggacattgctggcaacctgctggagcggcccctggtggcccgggacaccagtgacaagtacctggtgctgatccagatgttcaacaaggacctggatgctgtgaggatgatctacagccagcacgtgcaggaggaggccgagctgggcttcagccctgtgcacaagaacatgcccaccgtggccggcggcctgcgctgggcccaggagctgcggcagaggatccagggccccttcagcaactttggccgcatcacccacccctgcatggagagcgctgagggcaagaggatgcagcagaagtatgaggacatgctgagcctgctggagaagtatgagacccggctgtatgaggactggtgcaggacagtgtctgagaagagccagtacaacctgagccagcccctgctgaagagggaccctgagaccaaggagatcaccatcaacttcaacccccagctgatctctgtgctgaaggagatgagctacctggagccccgggagatgaagcacatgcctgagacagctgctgccatgttcagcagccgggacttctaccggcagctggtggccaacctggagctgatggccaactggtacaacaaggtgatgaagaccctgctggaggtggagttccccctggtggaggaggagctgcagaacatcgacctgcggctgcgggctgctgaggagaccctgaactggaagacagagggcatctgtgactatgtgacagagatcaccagcagcatccatgacctggagcagaggatccagaagaccaaggacaacgtggaggagatccagaacatcatgaagacctgggtgacccccatcttcaagaccaaggatggcaagcgggagagcctgctgagcctggatgacagacatgacaggatggagaagtactacaacctgatcaaggagagcggcctgaagatccacgccctggtgcaggagaacctgggcctcttctctgctgaccccaccagcaacatctggaagacctacgtgaacagcattgacaacctgctgctgaatggcttcttcctggccatcgagtgcagcctgaagtacctgctggagaacacagagtgcaaggccggcctgacccccatctttgaggcccagctgagcctggccatccctgagctggtgttctaccccagcctggagagcggcgtgaagggcggcttctgtgacatcgtggagggcctcatcaccagcatcttccgcatccccagcctggtgccccggctgagcccccagaatggcagcccccactaccaggtggacctggatggcatcccagacctggccaacatgaggaggaccctgatggagcgggtgcagaggatgatgggcctgtgctgcggctaccagagcaccttcagccagtacagctacctgtatgtggaggacaggaaggaggtgctgggccagttcctgctgtatggccacatcctgaccccagaggagattgaagatcatgtggaggatggcatccctgagaacccccccctgctgagccagttcaaggtgcagattgacagctatgagaccctgtatgaggaggtgtgccgcctggagcccatcaaggtgtttgatggctggatgaagattgacatccggcccttcaaggccagcctgctgaacatcatcaagcgctggagcctgctcttcaagcagcacctggtggaccacgtgacccacagcctggccaacctggatgccttcatcaagaagtctgagagcggcctgctgaagaaggtggagaagggggacttccagggcctggtggagatcatgggccacctgatggctgtgaaggagcggcagagcaacacagatgagatgtttgagcccctgaagcagaccatcgagctgctgaagacctatgagcaggagctgcctgagaccgtcttcaagcagctggaggagctgcctgagaagtggaacaacatcaagaaggtggccatcaccgtgaagcagcaggtggcccccctgcaggccaatgaggtgaccctgctgcggcagcgctgcacagcctttgatgctgagcagcagcagttctgggagcagttccacaaggaggcccccttccgctttgacagcatccacccccaccagatgctggatgcccggcacatcgagatccagcagatggagagcaccatggccagcatcagcgagagcgccagcctgtttgaggtgaatgtgcctgactacaagcagctgcggcagtgcaggaaggaggtgtgccagctgaaggagctgtgggacaccatcggcatggtgaccagcagcatccacgcctgggagaccaccccctggaggaacatcaacgtggaggccatggagctggagtgcaagcagtttgcccggcacatccggaacctggacaaggaggtgcgggcctgggatgccttcaccggcctggagagcacagtgtggaacaccctgagcagcctgcgggctgtggccgagctgcagaacccagccatccgggagcggcactggaggcagctgatgcaggccactggagtgtccttcaccatggaccaggacaccaccctggcccacctgctgcagctgcagctgcaccactatgaagatgaggtgcggggcatcgtggacaaggccgccaaggagatgggcatggagaagaccctgaaggagctgcagaccacctgggccggcatggagttccagtatgagccccaccccaggaccaacgtgcccctgctgtgcagtgatgaggacctgattgaggtgctggaggacaaccaggtgcagctgcagaacctggtgatgagcaaatatgtggccttcttcctggaggaggtgtctggctggcagaagaagctgagcacagtggatgctgtgatcagcatctggtttgaggtgcagaggacctggacccacctggagagcatcttcaccggcagcgaggacatccgggcccagctgccccaggacagcaagagatttgagggcatcgacatcgacttcaaggagctggcctatgatgcccagaagatccccaacgtggtgcagaccaccaacaagccaggcctgtatgagaagctggaggacatccagggccgcctgtgcctgtgtgagaaggccctggccgagtacctggacaccaagaggctggccttcccccgcttctacttcctgagcagcagtgacctgctggacatcctgagcaatggaacagccccccagcaggtgcagaggcacctgagcaagctgtttgacaacatggccaagatgaggttccagctggatgccagcggggagcccaccaagaccagcctgggcatgtacagcaaggaggaggagtatgtggccttcagcgagccctgtgactgcagcggccaggtggagatctggctgaaccacgtgctgggccacatgaaggccaccgtgagacatgagatgacagagggcgtgacagcctatgaggagaagccccgggagcagtggctgtttgaccacccagcccaggtggccctgacctgcacccagatctggtggaccacagaggtgggcatggcctttgcccggctggaggagggctatgagagcgccatgaaggactactacaagaagcaggtggcccagctgaagaccctcatcaccatgctgattggccagctgagcaagggggaccggcagaagatcatgaccatctgcaccattgatgtgcacgccagagatgtggtggccaagatgattgcccagaaggtggacaatgcccaggccttcctgtggctgagccagctgcggcaccgctgggatgatgaggtgaagcactgctttgccaacatctgtgatgcccagttcctgtacagctatgagtacctgggcaacaccccccggctggtgatcacccccctgacagaccgctgctacatcaccctgacccagagcctgcacctgaccatgtctggggccccagctggccctgctggcaccgggaagacagagaccaccaaggacctgggccgggccctgggcatcctggtgtatgtgttcaactgcagcgagcagatggactacaagagctgtggcaacatctacaagggcctggcccagacaggagcctggggctgctttgatgagttcaaccgcatctctgtggaggtgctgtctgtggtggccgtgcaggtgaagagcatccaggatgccatccgggacaagaagcagtggttctccttcctgggggaggagatcagcctgaaccccagcgtgggcatcttcatcaccatgaaccctggctacgccggccgcacagagctgcctgagaacctgaagagcctcttccggccctgtgccatggtggtgcctgactttgagctgatctgtgagatcatgctggtggccgagggcttcatcgaggcccagagcctggccaggaagttcatcaccctgtaccagctgtgcaaggagctgctgagcaagcaggaccactatgactggggcctgcgggccatcaagtctgtgctggtggtggccggcagcctgaagagaggagaccctgacaggcctgaggaccaggtgctgatgaggagcctgcgggacttcaacatccccaagatcgtgacagatgacatgcccatcttcatgggcctcatcggggacctcttccctgccctggatgtgccccggcggcgggaccccaactttgaggccctggtgaggaaggccatcgtggacctgaagctgcaggccgaggacaactttgtgctgaaggtggtgcagctggaggagctgctggccgtgcgccacagcgtgtttgtggtgggcggggccggcaccgggaagagccaggtgctgcggagcctgcacaagacctaccagatcatgaagagaagacctgtgtggacagacctgaaccccaaggctgtgaccaatgatgagctgtttggcatcatcaacccagccaccggggagtggaaggatggcctcttcagcagcatcatgagggagctggccaacatcacccatgatggccccaagtggatcctgctggatggagacatcgaccccatgtggattgagagcctgaacacagtgatggatgacaacaaggtgctgaccctggccagcaatgaaagaatccccctgaaccccaccatgaagctgctgtttgagatcagccacctgaggacagccaccccagccaccgtgtcccgggccggcatcctgtacatcaacccagctgacctgggctggaacccccctgtgtcctcctggattgagaagcgggagatccagacagagcgggccaacctgaccatcctgtttgacaagtacctgcccacctgcctggacaccctgcggacccgcttcaagaagatcatccccatccctgagcagagcatggtgcagatggtgtgccacctgctggagtgcctgctgaccacagaggacatcccagctgactgccccaaggagatctatgagcactactttgtgtttgctgccatctgggccttcggcggggccatggtgcaggaccagctggtggactacagagctgagttcagcaagtggtggctgacagagttcaagacagtgaagttccccagccagggcaccatctttgactactacatcgaccctgagaccaagaagtttgagccctggagcaagctggtgccccagtttgaatttgatcctgagatgcccctgcaggcctgcctggtgcacaccagcgagaccatccgggtgtgctacttcatggagcggctgatggcccggcagaggcctgtgatgctggtgggcacagctggcaccgggaagtctgtgctggtgggcgccaagctggccagcctggaccctgaggcctacctggtgaagaatgtgcccttcaactactacaccaccagcgccatgctgcaggccgtgctggagaagcccctggagaagaaggccggcaggaactacggccccccaggcaacaagaagctgatctacttcattgatgacatgaacatgcctgaggtggatgcctatggaacagtgcagccccacaccatcatccggcagcacctggactatggccactggtatgacaggagcaagctgagcctgaaggagatcaccaacgtgcagtatgtgtcctgcatgaaccccacagctggcagcttcaccatcaacccccggctgcagaggcacttctctgtgtttgtgctgtccttccctggagcagatgccctgagcagcatctacagcatcatcctgacccagcacctgaagctgggcaacttccctgccagcctgcagaagagcatcccccccctgattgacctggccctggccttccaccagaagatcgccaccaccttcctgcccaccggcatcaagttccactacatcttcaacctgcgggactttgccaacatcttccagggcatcctcttcagctctgtggagtgtgtgaagagcacctgggacctgatccggctgtacctgcacgagagcaacagagtgtacagagacaagatggtggaggagaaggactttgacctgtttgacaagatccagacagaggtgctgaagaagacctttgatgacatcgaggaccctgtggagcagacccagagccccaacctgtactgccactttgccaatggaattggagagcccaagtacatgcctgtgcagagctgggagctgctgacccagaccctggtggaggccctggagaaccacaatgaggtgaacacagtgatggacctggtgctgtttgaagatgccatgagacatgtgtgccacatcaaccgcatcctggagagccccagaggaaatgccctgctggtgggcgtgggcggcagcggcaagcagagcctgacccggctggccgccttcatcagctccatggatgtgttccagatcaccctgaggaagggctaccagatccaggacttcaagatggacctggccagcctgtgcctgaaggccggcgtgaagaacctgaacacagtgttcctgatgacagatgcccaggtggctgatgagcgcttcctggtgctgatcaatgacctgctggccagcggggagatcccagacctgtacagtgatgatgaggtggagaacatcatcagcaatgtgagaaatgaggtgaagagccagggcctggtggacaaccgggagaactgctggaagttcttcatcgaccgcatccggcggcagctgaaggtgaccctgtgcttcagccctgtgggcaacaagctgcgggtgcgcagcaggaagtttcctgccatcgtgaactgcacagccatccactggttccacgagtggccccagcaggccctggagagcgtgtccctgcgcttcctgcagaacacagagggcatcgagcccaccgtgaagcagagcatcagcaagttcatggcctttgtgcacacctctgtgaaccagaccagccagagctacctgagcaatgagcagcgctacaactacaccacccccaagagcttcctggagttcatccggctgtaccagagcctgctgcaccgccacaggaaggagctgaagtgcaagacagagcggctggagaatggcctgctgaagctgcacagcaccagcgcccaggtggatgacctgaaggccaagctggccgcccaggaggtggagctgaagcagaagaatgaagatgctgacaagctgatccaggtggtgggcgtggagacagacaaggtgtcccgggagaaggccatggctgatgaggaggagcagaaggtggccgtcatcatgctggaggtgaagcagaagcagaaggactgtgaggaggacctggccaaggccgagcccgccctgacagctgcccaggccgccctgaacaccctgaacaagaccaacctgacagagctgaagagctttggcagcccccccctggccgtgtccaatgtgtctgctgctgtgatggtgctgatggccccccggggccgggtgcccaaggaccgctcctggaaggccgccaaggtgaccatggccaaggtggatggcttcctggacagcctcatcaacttcaacaaggagaacatccacgagaactgcctgaaggccatccggccctacctgcaggaccctgagttcaaccctgagtttgtggccaccaagagctatgctgctgctggcctgtgctcctgggtgatcaacatcgtgcgcttctatgaggtgttctgtgatgtggagcccaagaggcaggccctgaacaaggccacagctgacctgacagctgcccaggagaagctggccgccatcaaggccaagatcgcccacctgaatgaaaacctggccaagctgacagccaggtttgagaaggccacagctgacaagctgaagtgccagcaggaggccgaggtgacagctgtgaccatcagcctggccaaccggctggtgggcggcctggcctctgaaaatgtgcgctgggcagatgctgtgcagaacttcaagcagcaggagaggaccctgtgtggggacatcctgctgatcacagccttcatctcctacctgggcttcttcaccaagaagtaccggcagagcctgctggacaggacctggaggccctacctgagccagctgaagacccccatccctgtgaccccagccctggaccccctgaggatgctgatggatgatgctgatgtggccgcctggcagaatgaaggcctgcctgctgacaggatgtctgtggagaatgccaccatcctgatcaactgtgagcgctggcccctgatggtggacccccagctgcagggcatcaagtggatcaagaacaagtacggggaggacctgcgggtgacccagatcggccagaagggctacctgcagatcatcgagcaggccctggaggccggggctgtggtgctgattgagaacctggaggagagcattgatcctgtgctgggccccctgctgggccgggaggtgatcaagaagggccgcttcatcaagatcggggacaaggaatgtgagtacaaccccaagttccgcctcatcctgcacaccaagctggccaacccccactaccagcctgagctgcaggcccaggccaccctcatcaacttcaccgtgaccagagatggcctggaggaccagctgctggccgctgtggtgtccatggagaggccagacctggagcagctgaagagtgacctgaccaagcagcagaatggcttcaagatcaccctgaagaccctggaggacagcctgctgagccggctgagcagcgccagcggcaacttcctgggggagaccgtgctggtggagaacctggagatcaccaagcagacagctgctgaggtggagaagaaggtgcaggaggccaaggtgacagaggtgaagatcaatgaggcccgggagcactacagacctgctgctgcccgggccagcctgctgtacttcatcatgaatgacctgagcaagatccaccccatgtaccagttcagcctgaaggccttcagcatcgtgttccagaaggctgtggagagagctgccccagatgagagcctgcgggagcgggtggccaacctgattgacagcatcaccttctctgtgtaccagtacaccatccggggcctgtttgaatgtgacaagctgacctacctggcccagctgaccttccagatcctgctgatgaaccgggaggtgaatgctgtggagctggacttcctgctgcggagccctgtgcagacaggaacagccagccctgtggagttcctgagccaccaggcctggggcgctgtgaaggtgctgagctccatggaggagttcagcaacctggaccgggacatcgagggcagcgccaagtcctggaagaagtttgtggagagtgaatgtcctgagaaggagaagctgccccaggagtggaagaacaagacagccctgcagaggctgtgcatgctgcgggccatgaggccagacaggatgacctacgccctgcgggactttgtggaggagaagctgggcagcaaatatgtggtgggccgggccctggactttgccaccagctttgaggagagcggccctgccacccccatgttcttcatcctgagccctggggtggaccccctgaaggatgtggagagccagggcaggaagctgggctacaccttcaacaaccagaacttccacaacgtgtccctgggccagggccaggaggtggtggccgaggccgccctggacctggccgccaagaagggccactgggtgatcctgcagaacatccacctggtggccaagtggctgagcaccctggagaagaagctggaggagcacagcgagaacagccaccctgagttccgggtcttcatgtctgctgagcccgcccccagccctgagggccacatcatcccccagggcatcctggagaacagcatcaagatcaccaatgagccccccaccggcatgcacgccaacctgcacaaggccctggacaacttcacccaggacaccctggagatgtgcagccgggagacagagttcaagagcatcctgtttgccctgtgctacttccacgctgtggtggccgagaggaggaagtttggcccccagggctggaacagaagctaccccttcaacacaggagacctgaccatctctgtgaatgtgctgtacaacttcctggaggccaatgccaaggtgccctatgatgacctgcgctacctgtttggagagatcatgtatggaggccacatcacagatgactgggaccggcggctgtgcaggacctacctgggggagttcatccggcctgagatgctggagggggagctgagcctggcccctggcttccccctgcccggcaacatggactacaacggctaccaccagtacattgatgctgagctgcccccagagagcccctacctgtatggcctgcaccccaatgctgagatcggcttcctgacccagaccagcgagaagctgttcagaacagtgctggagctgcagccccgggacagccaggccagagatggagctggggccacccgggaggagaaggtgaaggccctgctggaggagatcctggagcgggtgacagatgagttcaacatccctgagctgatggccaaggtggaggagaggaccccctacatcgtggtggccttccaggagtgtggccgcatgaacatcctgacccgggagatccagaggagcctgcgggagctggagctgggcctgaagggggagctgaccatgaccagccacatggagaacctgcagaatgccctgtactttgacatggtgcctgagagctgggcccggcgggcctaccccagcacagctggcctggccgcctggttcccagacctgctgaaccgcatcaaggagctggaggcctggacaggagacttcaccatgcccagcacagtgtggctgaccggcttcttcaacccccagagcttcctgacagccatcatgcagagcacagccaggaagaatgagtggcccctggaccagatggccctgcagtgtgacatgaccaagaagaaccgggaggagttccgcagccccccccgggagggcgcctacatccacggcctcttcatggagggcgcctgctgggacacccaggccggcatcatcacagaggccaagctgaaggacctgaccccacccatgcctgtgatgttcatcaaggccatcccagctgacaagcaggactgccgctctgtgtacagctgccctgtgtacaagaccagccagaggggccccacctacgtgtggaccttcaacctgaagaccaaggagaaccccagcaagtgggtgctggccggcgtggccctgctgctgcagatctag

SEQ ID NO: 150652 - DNA, 1002 bp, synthetic construct
  misc_feature 1..1002: note = Description of Artificial Sequence: Synthetic coding sequence
  source 1..1002: mol_type = other DNA
atgaaggactttgtgctgggccgggacaaggtgcaggaggccaaggtgacagaggtgaagatcaatgaggcccgggagcactacagacctgctgctgcccgggccagcctgctgtacttcatcatgaatgacctgagcaagatccaccccatgtaccagttcagcctgaaggccttcagcatcgtgttccagaaggctgtggagcgggccgccccagatgagagcctgcgggagcgggtggccaacctgattgacagcatcaccttctctgtgtaccagtacaccatccggggcctgtttgaatgtgacaagctgacctacctggcccagctgaccttccagatcctgctgatgaaccgggaggtgaatgctgtggagctggacttcctgctgcggagccctgtgcagacaggaacagccagccctgtggagttcctgagccaccaggcctggggcgctgtgaaggtgctgagctccatggaggagttcagcaacctggaccgggacatcgagggcagcgccaagtcctggaagaagtttgtggagagcgagtgcccagagaaggagaagctgccccaggagtggaagaacaagacagccctgcagaggctgtgcatgctgcgggccatgaggccagacaggatgacctacgccctgcgggactttgtggaggagaagctgggcagcaaatatgtggtgggccgggccctggactttgccaccagctttgaggagagcggccctgccacccccatgttcttcatcctgagccctggggtggaccccctgaaggatgtggagagccagggcaggaagctgggctacaccttcaacaaccagaacttccacaacgtgtccctgggccagggccaggaggtggtggccgaggccgccctggacctggccgccaagaagggccactgggtgatcctgcaggtgaagcgctgcagcttcttcaccttctaccacccagcccactgcctggagcacagccgccactag

SEQ ID NO: 150653 - DNA, 2397 bp, synthetic construct
  misc_feature 1..2397: note = Description of Artificial Sequence: Synthetic coding sequence
  source 1..2397: mol_type = other DNA
atgaatgacctgagcaagatccaccccatgtaccagttcagcctgaaggccttcagcatcgtgttccagaaggctgtggagagagctgccccagatgagagcctgcgggagcgggtggccaacctgattgacagcatcaccttctctgtgtaccagtacaccatccggggcctgtttgaatgtgacaagctgacctacctggcccagctgaccttccagatcctgctgatgaaccgggaggtgaatgctgtggagctggacttcctgctgcggagccctgtgcagacaggaacagccagccctgtggagttcctgagccaccaggcctggggcgctgtgaaggtgctgagctccatggaggagttcagcaacctggaccgggacatcgagggcagcgccaagtcctggaagaagtttgtggagagtgaatgtcctgagaaggagaagctgccccaggagtggaagaacaagacagccctgcagaggctgtgcatgctgcgggccatgaggccagacaggatgacctacgccctgcgggactttgtggaggagaagctgggcagcaaatatgtggtgggccgggccctggactttgccaccagctttgaggagagcggccctgccacccccatgttcttcatcctgagccctggggtggaccccctgaaggatgtggagagccagggcaggaagctgggctacaccttcaacaaccagaacttccacaacgtgtccctgggccagggccaggaggtggtggccgaggccgccctggacctggccgccaagaagggccactgggtgatcctgcagaacatccacctggtggccaagtggctgagcaccctggagaagaagctggaggagcacagcgagaacagccaccctgagttccgggtcttcatgtctgctgagcccgcccccagccctgagggccacatcatcccccagggcatcctggagaacagcatcaagatcaccaatgagccccccaccggcatgcacgccaacctgcacaaggccctggacaacttcacccaggacaccctggagatgtgcagccgggagacagagttcaagagcatcctgtttgccctgtgctacttccacgctgtggtggccgagaggaggaagtttggcccccagggctggaacagaagctaccccttcaacacaggagacctgaccatctctgtgaatgtgctgtacaacttcctggaggccaatgccaaggtgccctatgatgacctgcgctacctgtttggagagatcatgtatggaggccacatcacagatgactgggaccggcggctgtgcaggacctacctgggggagttcatccggcctgagatgctggagggggagctgagcctggcccctggcttccccctgcccggcaacatggactacaacggctaccaccagtacattgatgctgagctgcccccagagagcccctacctgtatggcctgcaccccaatgctgagatcggcttcctgacccagaccagcgagaagctgttcagaacagtgctggagctgcagccccgggacagccaggccagagatggagctggggccacccgggaggagaaggtgaaggccctgctggaggagatcctggagcgggtgacagatgagttcaacatccctgagctgatggccaaggtggaggagaggaccccctacatcgtggtggccttccaggagtgtggccgcatgaacatcctgacccgggagatccagaggagcctgcgggagctggagctgggcctgaagggggagctgaccatgaccagccacatggagaacctgcagaatgccctgtactttgacatggtgcctgagagctgggcccggcgggcctaccccagcacagctggcctggccgcctggttcccagacctgctgaaccgcatcaaggagctggaggcctggacaggagacttcaccatgcccagcacagtgtggctgaccggcttcttcaacccccagagcttcctgacagccatcatgcagagcacagccaggaagaatgagtggcccctggaccagatggccctgcagtgtgacatgaccaagaagaaccgggaggagttccgcagccccccccgggagggcgcctacatccacggcctcttcatggagggcgcctgctgggacacccaggccggcatcatcacagaggccaagctgaaggacctgaccccacccatgcctgtgatgttcatcaaggccatcccagctgacaagcaggactgccgctctgtgtacagctgccctgtgtacaagaccagccagaggggccccacctacgtgtggaccttcaacctgaagaccaaggagaaccccagcaagtgggtgctggccggcgtggccctgctgctgcagatctag

SEQ ID NO: 150654 - DNA, 8979 bp, synthetic construct
  misc_feature 1..8979: note = Description of Artificial Sequence: Synthetic coding sequence
  source 1..8979: mol_type = other DNA
gaggtgcggggcatcgtggacaaggccgccaaggagatgggcatggagaagaccctgaaggagctgcagaccacctgggccggcatggagttccagtatgagccccaccccaggaccaacgtgcccctgctgtgcagtgatgaggacctgattgaggtgctggaggacaaccaggtgcagctgcagaacctggtgatgagcaaatatgtggccttcttcctggaggaggtgtctggctggcagaagaagctgagcacagtggatgctgtgatcagcatctggtttgaggtgcagaggacctggacccacctggagagcatcttcaccggcagcgaggacatccgggcccagctgccccaggacagcaagagatttgagggcatcgacatcgacttcaaggagctggcctatgatgcccagaagatccccaacgtggtgcagaccaccaacaagccaggcctgtatgagaagctggaggacatccagggccgcctgtgcctgtgtgagaaggccctggccgagtacctggacaccaagaggctggccttcccccgcttctacttcctgagcagcagtgacctgctggacatcctgagcaatggaacagccccccagcaggtgcagaggcacctgagcaagctgtttgacaacatggccaagatgaggttccagctggatgccagcggggagcccaccaagaccagcctgggcatgtacagcaaggaggaggagtatgtggccttcagcgagccctgtgactgcagcggccaggtggagatctggctgaaccacgtgctgggccacatgaaggccaccgtgagacatgagatgacagagggcgtgacagcctatgaggagaagccccgggagcagtggctgtttgaccacccagcccaggtggccctgacctgcacccagatctggtggaccacagaggtgggcatggcctttgcccggctggaggagggctatgagagcgccatgaaggactactacaagaagcaggtggcccagctgaagaccctcatcaccatgctgattggccagctgagcaagggggaccggcagaagatcatgaccatctgcaccattgatgtgcacgccagagatgtggtggccaagatgattgcccagaaggtggacaatgcccaggccttcctgtggctgagccagctgcggcaccgctgggatgatgaggtgaagcactgctttgccaacatctgtgatgcccagttcctgtacagctatgagtacctgggcaacaccccccggctggtgatcacccccctgacagaccgctgctacatcaccctgacccagagcctgcacctgaccatgtctggggccccagctggccctgctggcaccgggaagacagagaccaccaaggacctgggccgggccctgggcatcctggtgtatgtgttcaactgcagcgagcagatggactacaagagctgtggcaacatctacaagggcctggcccagacaggagcctggggctgctttgatgagttcaaccgcatctctgtggaggtgctgtctgtggtggccgtgcaggtgaagagcatccaggatgccatccgggacaagaagcagtggttctccttcctgggggaggagatcagcctgaaccccagcgtgggcatcttcatcaccatgaaccctggctacgccggccgcacagagctgcctgagaacctgaagagcctcttccggccctgtgccatggtggtgcctgactttgagctgatctgtgagatcatgctggtggccgagggcttcatcgaggcccagagcctggccaggaagttcatcaccctgtaccagctgtgcaaggagctgctgagcaagcaggaccactatgactggggcctgcgggccatcaagtctgtgctggtggtggccggcagcctgaagagaggagaccctgacaggcctgaggaccaggtgctgatgaggagcctgcgggacttcaacatccccaagatcgtgacagatgacatgcccatcttcatgggcctcatcggggacctcttccctgccctggatgtgccccggcggcgggaccccaactttgaggccctggtgaggaaggccatcgtggacctgaagctgcaggccgaggacaactttgtgctgaaggtggtgcagctggaggagctgctggccgtgcgccacagcgtgtttgtggtgggcggggccggcaccgggaagagccaggtgctgcggagcctgcacaagacctaccagatcatgaagagaagacctgtgtggacagacctgaaccccaaggctgtgaccaatgatgagctgtttggcatcatcaacccagccaccggggagtggaaggatggcctcttcagcagcatcatgagggagctggccaacatcacccatgatggccccaagtggatcctgctggatggagacatcgaccccatgtggattgagagcctgaacacagtgatggatgacaacaaggtgctgaccctggccagcaatgaaagaatccccctgaaccccaccatgaagctgctgtttgagatcagccacctgaggacagccaccccagccaccgtgtcccgggccggcatcctgtacatcaacccagctgacctgggctggaacccccctgtgtcctcctggattgagaagcgggagatccagacagagcgggccaacctgaccatcctgtttgacaagtacctgcccacctgcctggacaccctgcggacccgcttcaagaagatcatccccatccctgagcagagcatggtgcagatggtgtgccacctgctggagtgcctgctgaccacagaggacatcccagctgactgccccaaggagatctatgagcactactttgtgtttgctgccatctgggccttcggcggggccatggtgcaggaccagctggtggactacagagctgagttcagcaagtggtggctgacagagttcaagacagtgaagttccccagccagggcaccatctttgactactacatcgaccctgagaccaagaagtttgagccctggagcaagctggtgccccagtttgaatttgatcctgagatgcccctgcaggcctgcctggtgcacaccagcgagaccatccgggtgtgctacttcatggagcggctgatggcccggcagaggcctgtgatgctggtgggcacagctggcaccgggaagtctgtgctggtgggcgccaagctggccagcctggaccctgaggcctacctggtgaagaatgtgcccttcaactactacaccaccagcgccatgctgcaggccgtgctggagaagcccctggagaagaaggccggcaggaactacggccccccaggcaacaagaagctgatctacttcattgatgacatgaacatgcctgaggtggatgcctatggaacagtgcagccccacaccatcatccggcagcacctggactatggccactggtatgacaggagcaagctgagcctgaaggagatcaccaacgtgcagtatgtgtcctgcatgaaccccacagctggcagcttcaccatcaacccccggctgcagaggcacttctctgtgtttgtgctgtccttccctggagcagatgccctgagcagcatctacagcatcatcctgacccagcacctgaagctgggcaacttccctgccagcctgcagaagagcatcccccccctgattgacctggccctggccttccaccagaagatcgccaccaccttcctgcccaccggcatcaagttccactacatcttcaacctgcgggactttgccaacatcttccagggcatcctcttcagctctgtggagtgtgtgaagagcacctgggacctgatccggctgtacctgcacgagagcaacagagtgtacagagacaagatggtggaggagaaggactttgacctgtttgacaagatccagacagaggtgctgaagaagacctttgatgacatcgaggaccctgtggagcagacccagagccccaacctgtactgccactttgccaatggaattggagagcccaagtacatgcctgtgcagagctgggagctgctgacccagaccctggtggaggccctggagaaccacaatgaggtgaacacagtgatggacctggtgctgtttgaagatgccatgagacatgtgtgccacatcaaccgcatcctggagagccccagaggaaatgccctgctggtgggcgtgggcggcagcggcaagcagagcctgacccggctggccgccttcatcagctccatggatgtgttccagatcaccctgaggaagggctaccagatccaggacttcaagatggacctggccagcctgtgcctgaaggccggcgtgaagaacctgaacacagtgttcctgatgacagatgcccaggtggctgatgagcgcttcctggtgctgatcaatgacctgctggccagcggggagatcccagacctgtacagtgatgatgaggtggagaacatcatcagcaatgtgagaaatgaggtgaagagccagggcctggtggacaaccgggagaactgctggaagttcttcatcgaccgcatccggcggcagctgaaggtgaccctgtgcttcagccctgtgggcaacaagctgcgggtgcgcagcaggaagtttcctgccatcgtgaactgcacagccatccactggttccacgagtggccccagcaggccctggagagcgtgtccctgcgcttcctgcagaacacagagggcatcgagcccaccgtgaagcagagcatcagcaagttcatggcctttgtgcacacctctgtgaaccagaccagccagagctacctgagcaatgagcagcgctacaactacaccacccccaagagcttcctggagttcatccggctgtaccagagcctgctgcaccgccacaggaaggagctgaagtgcaagacagagcggctggagaatggcctgctgaagctgcacagcaccagcgcccaggtggatgacctgaaggccaagctggccgcccaggaggtggagctgaagcagaagaatgaagatgctgacaagctgatccaggtggtgggcgtggagacagacaaggtgtcccgggagaaggccatggctgatgaggaggagcagaaggtggccgtcatcatgctggaggtgaagcagaagcagaaggactgtgaggaggacctggccaaggccgagcccgccctgacagctgcccaggccgccctgaacaccctgaacaagaccaacctgacagagctgaagagctttggcagcccccccctggccgtgtccaatgtgtctgctgctgtgatggtgctgatggccccccggggccgggtgcccaaggaccgctcctggaaggccgccaaggtgaccatggccaaggtggatggcttcctggacagcctcatcaacttcaacaaggagaacatccacgagaactgcctgaaggccatccggccctacctgcaggaccctgagttcaaccctgagtttgtggccaccaagagctatgctgctgctggcctgtgctcctgggtgatcaacatcgtgcgcttctatgaggtgttctgtgatgtggagcccaagaggcaggccctgaacaaggccacagctgacctgacagctgcccaggagaagctggccgccatcaaggccaagatcgcccacctgaatgaaaacctggccaagctgacagccaggtttgagaaggccacagctgacaagctgaagtgccagcaggaggccgaggtgacagctgtgaccatcagcctggccaaccggctggtgggcggcctggcctctgaaaatgtgcgctgggcagatgctgtgcagaacttcaagcagcaggagaggaccctgtgtggggacatcctgctgatcacagccttcatctcctacctgggcttcttcaccaagaagtaccggcagagcctgctggacaggacctggaggccctacctgagccagctgaagacccccatccctgtgaccccagccctggaccccctgaggatgctgatggatgatgctgatgtggccgcctggcagaatgaaggcctgcctgctgacaggatgtctgtggagaatgccaccatcctgatcaactgtgagcgctggcccctgatggtggacccccagctgcagggcatcaagtggatcaagaacaagtacggggaggacctgcgggtgacccagatcggccagaagggctacctgcagatcatcgagcaggccctggaggccggggctgtggtgctgattgagaacctggaggagagcattgatcctgtgctgggccccctgctgggccgggaggtgatcaagaagggccgcttcatcaagatcggggacaaggaatgtgagtacaaccccaagttccgcctcatcctgcacaccaagctggccaacccccactaccagcctgagctgcaggcccaggccaccctcatcaacttcaccgtgaccagagatggcctggaggaccagctgctggccgctgtggtgtccatggagaggccagacctggagcagctgaagagtgacctgaccaagcagcagaatggcttcaagatcaccctgaagaccctggaggacagcctgctgagccggctgagcagcgccagcggcaacttcctgggggagaccgtgctggtggagaacctggagatcaccaagcagacagctgctgaggtggagaagaaggtgcaggaggccaaggtgacagaggtgaagatcaatgaggcccgggagcactacagacctgctgctgcccgggccagcctgctgtacttcatcatgaatgacctgagcaagatccaccccatgtaccagttcagcctgaaggccttcagcatcgtgttccagaaggctgtggagagagctgccccagatgagagcctgcgggagcgggtggccaacctgattgacagcatcaccttctctgtgtaccagtacaccatccggggcctgtttgaatgtgacaagctgacctacctggcccagctgaccttccagatcctgctgatgaaccgggaggtgaatgctgtggagctggacttcctgctgcggagccctgtgcagacaggaacagccagccctgtggagttcctgagccaccaggcctggggcgctgtgaaggtgctgagctccatggaggagttcagcaacctggaccgggacatcgagggcagcgccaagtcctggaagaagtttgtggagagtgaatgtcctgagaaggagaagctgccccaggagtggaagaacaagacagccctgcagaggctgtgcatgctgcgggccatgaggccagacaggatgacctacgccctgcgggactttgtggaggagaagctgggcagcaaatatgtggtgggccgggccctggactttgccaccagctttgaggagagcggccctgccacccccatgttcttcatcctgagccctggggtggaccccctgaaggatgtggagagccagggcaggaagctgggctacaccttcaacaaccagaacttccacaacgtgtccctgggccagggccaggaggtggtggccgaggccgccctggacctggccgccaagaagggccactgggtgatcctgcaggacaccctggagatgtgcagccgggagacagagttcaagagcatcctgtttgccctgtgctacttccacgctgtggtggccgagaggaggaagtttggcccccagggctggaacagaagctaccccttcaacacaggagacctgaccatctctgtgaatgtgctgtacaacttcctggaggccaatgccaaggtgccctatgatgacctgcgctacctgtttggagagatcatgtatggaggccacatcacagatgactgggaccggcggctgtgcaggacctacctgggggagttcatccggcctgagatgctggagggggagctgagcctggcccctggcttccccctgcccggcaacatggactacaacggctaccaccagtacattgatgctgagctgcccccagagagcccctacctgtatggcctgcaccccaatgctgagatcggcttcctgacccagaccagcgagaagctgttcagaacagtgctggagctgcagccccgggacagccaggccagagatggagctggggccacccgggaggagaaggtgaaggccctgctggaggagatcctggagcgggtgacagatgagttcaacatccctgagctgatggccaaggtggaggagaggaccccctacatcgtggtggccttccaggagtgtggccgcatgaacatcctgacccgggagatccagaggagcctgcgggagctggagctgggcctgaagggggagctgaccatgaccagccacatggagaacctgcagaatgccctgtactttgacatggtgcctgagagctgggcccggcgggcctaccccagcacagctggcctggccgcctggttcccagacctgctgaaccgcatcaaggagctggaggcctggacaggagacttcaccatgcccagcacagtgtggctgaccggcttcttcaacccccagagcttcctgacagccatcatgcagagcacagccaggaagaatgagtggcccctggaccagatggccctgcagtgtgacatgaccaagaagaaccgggaggagttccgcagccccccccgggagggcgcctacatccacggcctcttcatggagggcgcctgctgggacacccaggccggcatcatcacagaggccaagctgaaggacctgaccccacccatgcctgtgatgttcatcaaggccatcccagctgacaagcaggactgccgctctgtgtacagctgccctgtgtacaagaccagccagaggggccccacctacgtgtggaccttcaacctgaagaccaaggagaaccccagcaagtgggtgctggccggcgtggccctgctgctgcagatctag

SEQ ID NO: 150655 - DNA, 13233 bp, synthetic construct
  misc_feature 1..13233: note = Description of Artificial Sequence: Synthetic coding sequence
  source 1..13233: mol_type = other DNA
atgaggctggccgaggagcgggccgccctggccgcagaaaatgctgatggagagcctggagctgaccggcggctgcggctgctgggcacctacgtggccatgagcctgcggcctgctgctggggcctgggagcgctgtgccggcagcgctgaggccgagcagctgctgcaggccttcctgggcagagatgctgctgagggcccccggcccctgctggtggtgcggcccggcccccggggcctggccatccggcccggcctggaggtgggccctgagagcggcctggccggggccaaggccctcttcttcctgaggacaggccctgagcccccaggccctgacagcttcagaggagctgtggtgtgtggggacctgcctgctgcccccctggagcacctggccgccctcttcagcgaggtggtgctgcctgtgctggccaatgagaagaaccggctgaactggccccacatgatctgtgaagatgtgagaagacatgcccacagcctgcagtgtgacctgagcgtcatcctggagcaggtgaagggcaagaccctgctgcccctgcctgctggcagcgagaagatggagtttgctgacagcaagtctgagaccgtgctggacagcattgacaagagcgtcatctatgccattgaatctgctgtgatcaagtggagctaccaggtgcaggtggtgctgaagcgggagagcagccagcccctgctgcagggcgagaaccccacccccaaggtggagctggagttctggaagagccgctatgaggacctgaagtacatctacaaccagctgcggaccatcaccgtgcggggcatggccaagctgctggacaagctgcagagcagctacttccctgccttcaaggccatgtacagagatgtggtggccgccctggccgaggcccaggacatccacgtgcacctgatccccctgcagaggcacctggaggccctggagaatgctgagttccctgaggtgaagccccagctgcggcccctgctgcacgtggtgtgcctgatctgggccacctgcaagagctaccgcagccctggccgcctgactgtgctgctgcaggagatctgcaacctgctgatccagcaggccagcaactacctgagccctgaggacctgctgcggtctgaggtggaggagagccagaggaagctgcaggtggtgtctgacaccctgtccttcttcaagcaggagttccaggacagaagagagaacctgcacacctacttcaaggagaaccaggaggtgaaggagtgggacttccagagcagcctggtgtttgtgcggctggatggcttcctgggccagctgcacgtggtggagggcctgctgaagacagccctggacttccacaagctgggcaaggtggagttcagcggcgtgagaggaaatgccctgagccagcaggtgcagcagatgcatgaggagttccaggagatgtaccgcctgctgagcggcagcagcagtgactgcctgtacctgcagagcacagactttgaaaatgatgtgtctgagttcaaccagaaggtggaggacctggaccggcggctgggcaccatcttcatccaggcctttgatgatgcccctggcctggagcacgccttcaagctgctggacattgctggcaacctgctggagcggcccctggtggcccgggacaccagtgacaagtacctggtgctgatccagatgttcaacaaggacctggatgctgtgaggatgatctacagccagcacgtgcaggaggaggccgagctgggcttcagccctgtgcacaagaacatgcccaccgtggccggcggcctgcgctgggcccaggagctgcggcagaggatccagggccccttcagcaactttggccgcatcacccacccctgcatggagagcgctgagggcaagaggatgcagcagaagtatgaggacatgctgagcctgctggagaagtatgagacccggctgtatgaggactggtgcaggacagtgtctgagaagagccagtacaacctgagccagcccctgctgaagagggaccctgagaccaaggagatcaccatcaacttcaacccccagctgatctctgtgctgaaggagatgagctacctggagccccgggagatgaagcacatgcctgagacagctgctgccatgttcagcagccgggacttctaccggcagctggtggccaacctggagctgatggccaactggtacaacaaggtgatgaagaccctgctggaggtggagttccccctggtggaggaggagctgcagaacatcgacctgcggctgcgggctgctgaggagaccctgaactggaagacagagggcatctgtgactatgtgacagagatcaccagcagcatccatgacctggagcagaggatccagaagaccaaggacaacgtggaggagatccagaacatcatgaagacctgggtgacccccatcttcaagaccaaggatggcaagcgggagagcctgctgagcctggatgacagacatgacaggatggagaagtactacaacctgatcaaggagagcggcctgaagatccacgccctggtgcaggagaacctgggcctcttctctgctgaccccaccagcaacatctggaagacctacgtgaacagcattgacaacctgctgctgaatggcttcttcctggccatcgagtgcagcctgaagtacctgctggagaacacagagtgcaaggccggcctgacccccatctttgaggcccagctgagcctggccatccctgagctggtgttctaccccagcctggagagcggcgtgaagggcggcttctgtgacatcgtggagggcctcatcaccagcatcttccgcatccccagcctggtgccccggctgagcccccagaatggcagcccccactaccaggtggacctggatggcatcccagacctggccaacatgaggaggaccctgatggagcgggtgcagaggatgatgggcctgtgctgcggctaccagagcaccttcagccagtacagctacctgtatgtggaggacaggaaggaggtgctgggccagttcctgctgtatggccacatcctgaccccagaggagattgaagatcatgtggaggatggcatccctgagaacccccccctgctgagccagttcaaggtgcagattgacagctatgagaccctgtatgaggaggtgtgccgcctggagcccatcaaggtgtttgatggctggatgaagattgacatccggcccttcaaggccagcctgctgaacatcatcaagcgctggagcctgctcttcaagcagcacctggtggaccacgtgacccacagcctggccaacctggatgccttcatcaagaagtctgagagcggcctgctgaagaaggtggagaagggggacttccagggcctggtggagatcatgggccacctgatggctgtgaaggagcggcagagcaacacagatgagatgtttgagcccctgaagcagaccatcgagctgctgaagacctatgagcaggagctgcctgagaccgtcttcaagcagctggaggagctgcctgagaagtggaacaacatcaagaaggtggccatcaccgtgaagcagcaggtggcccccctgcaggccaatgaggtgaccctgctgcggcagcgctgcacagcctttgatgctgagcagcagcagttctgggagcagttccacaaggaggcccccttccgctttgacagcatccacccccaccagatgctggatgcccggcacatcgagatccagcagatggagagcaccatggccagcatcagcgagagcgccagcctgtttgaggtgaatgtgcctgactacaagcagctgcggcagtgcaggaaggaggtgtgccagctgaaggagctgtgggacaccatcggcatggtgaccagcagcatccacgcctgggagaccaccccctggaggaacatcaacgtggaggccatggagctggagtgcaagcagtttgcccggcacatccggaacctggacaaggaggtgcgggcctgggatgccttcaccggcctggagagcacagtgtggaacaccctgagcagcctgcgggctgtggccgagctgcagaacccagccatccgggagcggcactggaggcagctgatgcaggccactggagtgtccttcaccatggaccaggacaccaccctggcccacctgctgcagctgcagctgcaccactatgaagatgaggtgcggggcatcgtggacaaggccgccaaggagatgggcatggagaagaccctgaaggagctgcagaccacctgggccggcatggagttccagtatgagccccaccccaggaccaacgtgcccctgctgtgcagtgatgaggacctgattgaggtgctggaggacaaccaggtgcagctgcagaacctggtgatgagcaaatatgtggccttcttcctggaggaggtgtctggctggcagaagaagctgagcacagtggatgctgtgatcagcatctggtttgaggtgcagaggacctggacccacctggagagcatcttcaccggcagcgaggacatccgggcccagctgccccaggacagcaagagatttgagggcatcgacatcgacttcaaggagctggcctatgatgcccagaagatccccaacgtggtgcagaccaccaacaagccaggcctgtatgagaagctggaggacatccagggccgcctgtgcctgtgtgagaaggccctggccgagtacctggacaccaagaggctggccttcccccgcttctacttcctgagcagcagtgacctgctggacatcctgagcaatggaacagccccccagcaggtgcagaggcacctgagcaagctgtttgacaacatggccaagatgaggttccagctggatgccagcggggagcccaccaagaccagcctgggcatgtacagcaaggaggaggagtatgtggccttcagcgagccctgtgactgcagcggccaggtggagatctggctgaaccacgtgctgggccacatgaaggccaccgtgagacatgagatgacagagggcgtgacagcctatgaggagaagccccgggagcagtggctgtttgaccacccagcccaggtggccctgacctgcacccagatctggtggaccacagaggtgggcatggcctttgcccggctggaggagggctatgagagcgccatgaaggactactacaagaagcaggtggcccagctgaagaccctcatcaccatgctgattggccagctgagcaagggggaccggcagaagatcatgaccatctgcaccattgatgtgcacgccagagatgtggtggccaagatgattgcccagaaggtggacaatgcccaggccttcctgtggctgagccagctgcggcaccgctgggatgatgaggtgaagcactgctttgccaacatctgtgatgcccagttcctgtacagctatgagtacctgggcaacaccccccggctggtgatcacccccctgacagaccgctgctacatcaccctgacccagagcctgcacctgaccatgtctggggccccagctggccctgctggcaccgggaagacagagaccaccaaggacctgggccgggccctgggcatcctggtgtatgtgttcaactgcagcgagcagatggactacaagagctgtggcaacatctacaagggcctggcccagacaggagcctggggctgctttgatgagttcaaccgcatctctgtggaggtgctgtctgtggtggccgtgcaggtgaagagcatccaggatgccatccgggacaagaagcagtggttctccttcctgggggaggagatcagcctgaaccccagcgtgggcatcttcatcaccatgaaccctggctacgccggccgcacagagctgcctgagaacctgaagagcctcttccggccctgtgccatggtggtgcctgactttgagctgatctgtgagatcatgctggtggccgagggcttcatcgaggcccagagcctggccaggaagttcatcaccctgtaccagctgtgcaaggagctgctgagcaagcaggaccactatgactggggcctgcgggccatcaagtctgtgctggtggtggccggcagcctgaagagaggagaccctgacaggcctgaggaccaggtgctgatgaggagcctgcgggacttcaacatccccaagatcgtgacagatgacatgcccatcttcatgggcctcatcggggacctcttccctgccctggatgtgccccggcggcgggaccccaactttgaggccctggtgaggaaggccatcgtggacctgaagctgcaggccgaggacaactttgtgctgaaggtggtgcagctggaggagctgctggccgtgcgccacagcgtgtttgtggtgggcggggccggcaccgggaagagccaggtgctgcggagcctgcacaagacctaccagatcatgaagagaagacctgtgtggacagacctgaaccccaaggctgtgaccaatgatgagctgtttggcatcatcaacccagccaccggggagtggaaggatggcctcttcagcagcatcatgagggagctggccaacatcacccatgatggccccaagtggatcctgctggatggagacatcgaccccatgtggattgagagcctgaacacagtgatggatgacaacaaggtgctgaccctggccagcaatgaaagaatccccctgaaccccaccatgaagctgctgtttgagatcagccacctgaggacagccaccccagccaccgtgtcccgggccggcatcctgtacatcaacccagctgacctgggctggaacccccctgtgtcctcctggattgagaagcgggagatccagacagagcgggccaacctgaccatcctgtttgacaagtacctgcccacctgcctggacaccctgcggacccgcttcaagaagatcatccccatccctgagcagagcatggtgcagatggtgtgccacctgctggagtgcctgctgaccacagaggacatcccagctgactgccccaaggagatctatgagcactactttgtgtttgctgccatctgggccttcggcggggccatggtgcaggaccagctggtggactacagagctgagttcagcaagtggtggctgacagagttcaagacagtgaagttccccagccagggcaccatctttgactactacatcgaccctgagaccaagaagtttgagccctggagcaagctggtgccccagtttgaatttgatcctgagatgcccctgcaggcctgcctggtgcacaccagcgagaccatccgggtgtgctacttcatggagcggctgatggcccggcagaggcctgtgatgctggtgggcacagctggcaccgggaagtctgtgctggtgggcgccaagctggccagcctggaccctgaggcctacctggtgaagaatgtgcccttcaactactacaccaccagcgccatgctgcaggccgtgctggagaagcccctggagaagaaggccggcaggaactacggccccccaggcaacaagaagctgatctacttcattgatgacatgaacatgcctgaggtggatgcctatggaacagtgcagccccacaccatcatccggcagcacctggactatggccactggtatgacaggagcaagctgagcctgaaggagatcaccaacgtgcagtatgtgtcctgcatgaaccccacagctggcagcttcaccatcaacccccggctgcagaggcacttctctgtgtttgtgctgtccttccctggagcagatgccctgagcagcatctacagcatcatcctgacccagcacctgaagctgggcaacttccctgccagcctgcagaagagcatcccccccctgattgacctggccctggccttccaccagaagatcgccaccaccttcctgcccaccggcatcaagttccactacatcttcaacctgcgggactttgccaacatcttccagggcatcctcttcagctctgtggagtgtgtgaagagcacctgggacctgatccggctgtacctgcacgagagcaacagagtgtacagagacaagatggtggaggagaaggactttgacctgtttgacaagatccagacagaggtgctgaagaagacctttgatgacatcgaggaccctgtggagcagacccagagccccaacctgtactgccactttgccaatggaattggagagcccaagtacatgcctgtgcagagctgggagctgctgacccagaccctggtggaggccctggagaaccacaatgaggtgaacacagtgatggacctggtgctgtttgaagatgccatgagacatgtgtgccacatcaaccgcatcctggagagccccagaggaaatgccctgctggtgggcgtgggcggcagcggcaagcagagcctgacccggctggccgccttcatcagctccatggatgtgttccagatcaccctgaggaagggctaccagatccaggacttcaagatggacctggccagcctgtgcctgaaggccggcgtgaagaacctgaacacagtgttcctgatgacagatgcccaggtggctgatgagcgcttcctggtgctgatcaatgacctgctggccagcggggagatcccagacctgtacagtgatgatgaggtggagaacatcatcagcaatgtgagaaatgaggtgaagagccagggcctggtggacaaccgggagaactgctggaagttcttcatcgaccgcatccggcggcagctgaaggtgaccctgtgcttcagccctgtgggcaacaagctgcgggtgcgcagcaggaagtttcctgccatcgtgaactgcacagccatccactggttccacgagtggccccagcaggccctggagagcgtgtccctgcgcttcctgcagaacacagagggcatcgagcccaccgtgaagcagagcatcagcaagttcatggcctttgtgcacacctctgtgaaccagaccagccagagctacctgagcaatgagcagcgctacaactacaccacccccaagagcttcctggagttcatccggctgtaccagagcctgctgcaccgccacaggaaggagctgaagtgcaagacagagcggctggagaatggcctgctgaagctgcacagcaccagcgcccaggtggatgacctgaaggccaagctggccgcccaggaggtggagctgaagcagaagaatgaagatgctgacaagctgatccaggtggtgggcgtggagacagacaaggtgtcccgggagaaggccatggctgatgaggaggagcagaaggtggccgtcatcatgctggaggtgaagcagaagcagaaggactgtgaggaggacctggccaaggccgagcccgccctgacagctgcccaggccgccctgaacaccctgaacaagaccaacctgacagagctgaagagctttggcagcccccccctggccgtgtccaatgtgtctgctgctgtgatggtgctgatggccccccggggccgggtgcccaaggaccgctcctggaaggccgccaaggtgaccatggccaaggtggatggcttcctggacagcctcatcaacttcaacaaggagaacatccacgagaactgcctgaaggccatccggccctacctgcaggaccctgagttcaaccctgagtttgtggccaccaagagctatgctgctgctggcctgtgctcctgggtgatcaacatcgtgcgcttctatgaggtgttctgtgatgtggagcccaagaggcaggccctgaacaaggccacagctgacctgacagctgcccaggagaagctggccgccatcaaggccaagatcgcccacctgaatgaaaacctggccaagctgacagccaggtttgagaaggccacagctgacaagctgaagtgccagcaggaggccgaggtgacagctgtgaccatcagcctggccaaccggctggtgggcggcctggcctctgaaaatgtgcgctgggcagatgctgtgcagaacttcaagcagcaggagaggaccctgtgtggggacatcctgctgatcacagccttcatctcctacctgggcttcttcaccaagaagtaccggcagagcctgctggacaggacctggaggccctacctgagccagctgaagacccccatccctgtgaccccagccctggaccccctgaggatgctgatggatgatgctgatgtggccgcctggcagaatgaaggcctgcctgctgacaggatgtctgtggagaatgccaccatcctgatcaactgtgagcgctggcccctgatggtggacccccagctgcagggcatcaagtggatcaagaacaagtacggggaggacctgcgggtgacccagatcggccagaagggctacctgcagatcatcgagcaggccctggaggccggggctgtggtgctgattgagaacctggaggagagcattgatcctgtgctgggccccctgctgggccgggaggtgatcaagaagggccgcttcatcaagatcggggacaaggaatgtgagtacaaccccaagttccgcctcatcctgcacaccaagctggccaacccccactaccagcctgagctgcaggcccaggccaccctcatcaacttcaccgtgaccagagatggcctggaggaccagctgctggccgctgtggtgtccatggagaggccagacctggagcagctgaagagtgacctgaccaagcagcagaatggcttcaagatcaccctgaagaccctggaggacagcctgctgagccggctgagcagcgccagcggcaacttcctgggggagaccgtgctggtggagaacctggagatcaccaagcagacagctgctgaggtggagaagaaggtgcaggaggccaaggtgacagaggtgaagatcaatgaggcccgggagcactacagacctgctgctgcccgggccagcctgctgtacttcatcatgaatgacctgagcaagatccaccccatgtaccagttcagcctgaaggccttcagcatcgtgttccagaaggctgtggagagagctgccccagatgagagcctgcgggagcgggtggccaacctgattgacagcatcaccttctctgtgtaccagtacaccatccggggcctgtttgaatgtgacaagctgacctacctggcccagctgaccttccagatcctgctgatgaaccgggaggtgaatgctgtggagctggacttcctgctgcggagccctgtgcagacaggaacagccagccctgtggagttcctgagccaccaggcctggggcgctgtgaaggtgctgagctccatggaggagttcagcaacctggaccgggacatcgagggcagcgccaagtcctggaagaagtttgtggagagtgaatgtcctgagaaggagaagctgccccaggagtggaagaacaagacagccctgcagaggctgtgcatgctgcgggccatgaggccagacaggatgacctacgccctgcgggactttgtggaggagaagctgggcagcaaatatgtggtgggccgggccctggactttgccaccagctttgaggagagcggccctgccacccccatgttcttcatcctgagccctggggtggaccccctgaaggatgtggagagccagggcaggaagctgggctacaccttcaacaaccagaacttccacaacgtgtccctgggccagggccaggaggtggtggccgaggccgccctggacctggccgccaagaagggccactgggtgatcctgcaggacaccctggagatgtgcagccgggagacagagttcaagagcatcctgtttgccctgtgctacttccacgctgtggtggccgagaggaggaagtttggcccccagggctggaacagaagctaccccttcaacacaggagacctgaccatctctgtgaatgtgctgtacaacttcctggaggccaatgccaaggtgccctatgatgacctgcgctacctgtttggagagatcatgtatggaggccacatcacagatgactgggaccggcggctgtgcaggacctacctgggggagttcatccggcctgagatgctggagggggagctgagcctggcccctggcttccccctgcccggcaacatggactacaacggctaccaccagtacattgatgctgagctgcccccagagagcccctacctgtatggcctgcaccccaatgctgagatcggcttcctgacccagaccagcgagaagctgttcagaacagtgctggagctgcagccccgggacagccaggccagagatggagctggggccacccgggaggagaaggtgaaggccctgctggaggagatcctggagcgggtgacagatgagttcaacatccctgagctgatggccaaggtggaggagaggaccccctacatcgtggtggccttccaggagtgtggccgcatgaacatcctgacccgggagatccagaggagcctgcgggagctggagctgggcctgaagggggagctgaccatgaccagccacatggagaacctgcagaatgccctgtactttgacatggtgcctgagagctgggcccggcgggcctaccccagcacagctggcctggccgcctggttcccagacctgctgaaccgcatcaaggagctggaggcctggacaggagacttcaccatgcccagcacagtgtggctgaccggcttcttcaacccccagagcttcctgacagccatcatgcagagcacagccaggaagaatgagtggcccctggaccagatggccctgcagtgtgacatgaccaagaagaaccgggaggagttccgcagccccccccgggagggcgcctacatccacggcctcttcatggagggcgcctgctgggacacccaggccggcatcatcacagaggccaagctgaaggacctgaccccacccatgcctgtgatgttcatcaaggccatcccagctgacaagcaggactgccgctctgtgtacagctgccctgtgtacaagaccagccagaggggccccacctacgtgtggaccttcaacctgaagaccaaggagaaccccagcaagtgggtgctggccggcgtggccctgctgctgcagatctag

SEQ ID NO: 150656 - DNA, 2100 bp, synthetic construct
  misc_feature 1..2100: note = Description of Artificial Sequence: Synthetic coding sequence
  source 1..2100: mol_type = other DNA
atgatcccagccagcgccaaggccccccacaagcagccccacaagcagagcatcagcatcggccggggcaccaggaagagagatgaagattctggaacagaggtgggggagggcacagatgagtgggcccagagcaaggccaccgtgcggcccccagaccagctggagctgacagatgctgagctgaaggaggagttcacccgcatcctgacagccaacaacccccacgccccccagaacatcgtgcgctacagcttcaaggagggcacctacaagcccatcggctttgtgaaccagctggccgtgcactacacccaggtgggcaacctgatccccaaggacagtgatgagggccggcggcagcactacagagatgagctggtggccggcagccaggagagcgtgaaggtgatcagcgagactggaaacctggaggaggatgaggagcccaaggagctggagacagagcccggcagccagacagatgtgcctgctgctggagctgctgagaaggtgacagaggaggagctgatgacccccaagcagcccaaggagaggaagctgaccaaccagttcaacttcagcgagcgggccagccagacctacaacaaccctgtgcgggaccgggagtgccagacagagcccccacccaggaccaacttcagcgccacagccaaccagtgggagatctatgatgcctacgtggaggagctggagaagcaggagaagaccaaggagaaggagaaggccaagacccctgtggccaagaagagcggcaagatggccatgaggaagctgacctccatggagagccagacagatgacctgatcaagctgagccaggccgccaagatcatggagaggatggtgaaccagaacacctatgatgacatcgcccaggacttcaagtactatgatgatgctgctgatgagtacagagaccaggtgggcaccctgctgcccctgtggaagttccagaatgacaaggccaagaggctgtctgtgacagccctgtgctggaaccccaagtacagagacctgtttgctgtgggctacggcagctatgacttcatgaagcagagccggggcatgctgctgctgtacagcctgaagaaccccagcttccctgagtacatgttcagcagcaacagcggcgtgatgtgcctggacatccacgtggaccacccctacctggtggccgtgggccactatgatggaaatgtggccatctacaacctgaagaagccccacagccagcccagcttctgcagcagcgccaagagcggcaagcacagcgaccctgtgtggcaggtgaagtggcagaaggatgacatggaccagaacctgaacttcttctctgtgtccagtgatggccgcatcgtgtcctggaccctggtgaagaggaagctggtgcacattgatgtgatcaagctgaaggtggagggcagcaccacagaggtgcctgagggcctgcagctgcaccctgtgggctgcggcacagcctttgacttccacaaggagattgactacatgttcctggtgggcacagaggagggcaagatctacaagtgcagcaagagctacagcagccagttcctggacacctatgatgcccacaacatgtctgtggacacagtgtcctggaacccctaccacaccaaggtgttcatgagctgcagcagtgactggacagtgaagatctgggaccacaccatcaagacccccatgttcatctatgacctgaacagcgctgtgggagatgtggcctgggccccctacagcagcacagtgtttgctgctgtgaccacagatggcaaggcccacatctttgacctggccatcaacaagtatgaggccatctgcaaccagcctgtggccgccaagaagaaccggctgacccacgtgcagttcaacctgatccaccccatcatcatcgtgggagatgaccggggccacatcatcagcctgaagctgagccccaacctgaggaagatgcccaaggagaagaagggccaggaggtgcagaagggccctgctgtggagatcgccaagctggacaagctgctgaacctggtgcgggaggtgaagatcaagacctag

SEQ ID NO: 150657 - DNA, 585 bp, synthetic construct
  misc_feature 1..585: note = Description of Artificial Sequence: Synthetic coding sequence
  source 1..585: mol_type = other DNA
atggaccagaacctgaacttcttctctgtgtccagtgatggccgcatcgtgtcctggaccctggtgaagaggaagctggtgcacattgatgtgatcaagctgaaggtggagggcagcaccacagaggtgcctgagggcctgcagctgcaccctgtgggctgcggcacagcctttgacttccacaaggagattgactacatgttcctggtgggcacagaggagggcaagatctacaagtgcagcaagagctacagcagccagttcctggacacctatgatgcccacaacatgtctgtggacacagtgtcctggaacccctaccacaccaaggtgttcatgagctgcagcagtgactggacagtgaagatctgggaccacaccatcaagacccccatgttcatctatgacctgaacagcgctgtgggagatgtggcctgggccccctacagcagcacagtgtttgctgctgtgaccacagatggcaaggagaagaagggccaggaggtgcagaagggccctgctgtggagatcgccaagctggacaagctgctgaacctggtgcgggaggtgaagatcaagacctag

SEQ ID NO: 150658 - DNA, 870 bp, synthetic construct
  misc_feature 1..870: note = Description of Artificial Sequence: Synthetic coding sequence
  source 1..870: mol_type = other DNA
atgatcccagccagcgccaaggccccccacaagcagccccacaagcaggatgaggacagcggcacagaggtgggggagggcacagatgagtgggcccagagcaaggccaccgtgcggcccccagaccagctggagctgacagatgctgagctgaaggaggagttcacccgcatcctgacagccaacaacccccacgccccccagaacatcgtgcgctacagcttcaaggagggcacctacaagcccatcggctttgtgaaccagctggccgtgcactacacccaggtgggcaacctgatccccaaggacagtgatgagggccggcggcagcactacagagatgagctggtggccggcagccaggagagcgtgaaggtgatcagcgagaccggcaacctggaggaggatgaggagcccaaggagctggagacagagcccggcagccagacagatgtgcctgctgctggagctgctgagaaggtgacagaggaggagctgatgacccccaagcagcccaaggagaggaagctgaccaaccagttcaacttcagcgagcgggccagccagacctacaacaaccctgtgcgggaccgggagtgccagacagagcccccacccaggaccaacttcagcgccacagccaaccagtgggagatctatgatgcctacgtggaggagctggagaagcaggagaagaccaaggagaaggagaaggccaagacccctgtggccaagaagagcggcaagatggccatgaggaagctgacctccatggagagccagacagatgacctgatcaagctgagccaggccgccaagatcatggagaggatggtgaaccagaacacctatgatgacatcgcccagtag

SEQ ID NO: 150659 - DNA, 870 bp, synthetic construct; identical to SEQ ID NO: 150658
  misc_feature 1..870: note = Description of Artificial Sequence: Synthetic coding sequence
  source 1..870: mol_type = other DNA

SEQ ID NO: 150660 - DNA, 429 bp, synthetic construct
  misc_feature 1..429: note = Description of Artificial Sequence: Synthetic coding sequence
  source 1..429: mol_type = other DNA
tgatgtggcacagcctttgacttccacaaggagattgactacatgttcctggtgggcacagaggagggcaagatctacaagtgcagcaagagctacagcagccagttcctggacacctatgatgcccacaacatgtctgtggacacagtgtcctggaacccctaccacaccaaggtgttcatgagctgcagcagtgactggacagtgaagatctgggaccacaccatcaagacccccatgttcatctatgacctgaacagcgctgtgggagatgtggcctgggccccctacagcagcacagtgtttgctgctgtgaccacagatggcaaggagaagaagggccaggaggtgcagaagggccctgctgtggagatcgccaagctggacaagctgctgaacctggtgcgggaggtgaagatcaagacctag

SEQ ID NO: 150661 - DNA, 507 bp, synthetic construct
  misc_feature 1..507: note = Description of Artificial Sequence: Synthetic coding sequence
  source 1..507: mol_type = other DNA
atgatcccagccagcgccaaggccccccacaagcagccccacaagcagagcatcagcatcggccggggcaccaggaagagagatgaagattctggaacagaggtgggggagggcacagatgagtgggcccagagcaaggccaccgtgcggcccccagaccagctggagctgacagatgctgagctgaaggaggagttcacccgcatcctgacagccaacaacccccacgccccccagaacatcgtgcgctacagcttcaagaagcagtggagcctgggcttcatccccaagctgaagaggaagatccctgtgaactactggggccaggatgaaggagagatcagcaatgagaccgtgcgggtcatctacagcctgggcatcttcatcatgaagatcgtgaccatcctgctgaacatcaacatcgagcacctgctgtgtgtgcgccactgtgtgaacagactcttcctgctcttcctgatcctgatcatcatcatgcagatcagatag

SEQ ID NO: 150662 - DNA, 1209 bp, synthetic construct
  misc_feature 1..1209: note = Description of Artificial Sequence: Synthetic coding sequence
  source 1..1209: mol_type = other DNA
atgaggaccaccctgacccccagctgcagcagcgccctggacccccaggagatcaagagagctgccacccacctgtcctggcacccagatggcaacaggaagctggccgtggcctacagctgcctggacttccagagggcccctgtgggcatgagcagtgacagctacatctgggacctggagaaccccaacaagccagagctggccctgaagcccagcagccccctggtgaccctggagttcaaccccaaggacagccacgtgctgctgggcggctgctacaacggccagatcgcctgctgggacaccaggaagggcagcctggtggccgagctgagcaccatcgagagcagccaccgggaccctgtgtatggcaccatctggctgcagagcaagacaggaacagagtgcttcagcgccagcacagatggccaggtgatgtggtgggacatcaggaagatgtctgagcccacagaggtggtgatcctggacatcaccaagaaggagcagctggagaatgccctgggcgccatcagcctggagtttgagagcaccctgcccaccaagttcatggtgggcacagagcagggcatcgtcatcagctgcaacaggaaggccaagaccagcgctgagaagatcgtgtgcaccttccctggccaccacggccccatctatgccctgcagaggaaccccttctaccccaagaacttcctgactgtgggggactggacagcccgcatctggagcgaggacagccgggagagcagcatcatgtggaccaagtaccacatggcctacctgacagatgctgcctggagccctgtgcggcccaccgtcttcttcaccaccaggatggatggcaccctggacatctgggacttcatgtttgagcagtgtgaccccaccctgagcctgaaggtgtgtgatgaggccctcttctgcctgcgggtgcaggacaatggctgcctgattgcctgtggcagccagctgggcaccaccaccctgctggaggtgtccccaggcctgagcaccctgcagagaaatgagaagaatgtggccagctccatgtttgagcgggagacccggcgggagaagatcctggaggcccggcaccgggagatgaggctgaaggagaaggccgccaccaagagcagaagaagacctgggggcggcggcggccggggcagcagcggcggccggcggggctag

SEQ ID NO: 150663 - DNA, 1818 bp, synthetic construct
  misc_feature 1..1818: note = Description of Artificial Sequence: Synthetic coding sequence
  source 1..1818: mol_type = other DNA
atggagatcgtgtatgtgtatgtgaagaagagaagtgaatttgggaagcagtgcaacttcagtgaccggcaggccgagctgaacatcgacatcatgcccaaccctgagctggccgagcagtttgtggagaggaaccctgtggacaccggcatccagtgcagcatctccatgtctgagcacgaggccaacagcgagagatttgagatggagacccggggcgtgaaccacgtggagggcggctggcccaaggatgtgaaccccctggagctggagcagaccatccgcttcaggaagaaggtggagaaggatgagaactacgtgaatgccatcatgcagctgggcagcatcatggagcactgcatcaagcagaacaatgccatcgacatctatgaggagtacttcaatgatgaggaggccatggaggtgatggaggaggaccccagcgccaagaccatcaacgtgttccgggacccccaggagatcaagagagctgccacccacctgtcctggcacccagatggcaacaggaagctggccgtggcctacagctgcctggacttccagagggcccctgtgggcatgagcagtgacagctacatctgggacctggagaaccccaacaagccagagctggccctgaagcccagcagccccctggtgaccctggagttcaaccccaaggacagccacgtgctgctgggcggctgctacaacggccagatcgcctgctgggacaccaggaagggcagcctggtggccgagctgagcaccatcgagagcagccaccgggaccctgtgtatggcaccatctggctgcagagcaagacaggaacagagtgcttcagcgccagcacagatggccaggtgatgtggtgggacatcaggaagatgtctgagcccacagaggtggtgatcctggacatcaccaagaaggagcagctggagaatgccctgggcgccatcagcctggagtttgagagcaccctgcccaccaagttcatggtgggcacagagcagggcatcgtcatcagctgcaacaggaaggccaagaccagcgctgagaagatcgtgtgcaccttccctggccaccacggccccatctatgccctgcagaggaaccccttctaccccaagaacttcctgactgtgggggactggacagcccgcatctggagcgaggacagccgggagagcagcatcatgtggaccaagtaccacatggcctacctgacagatgctgcctggagccctgtgcggcccaccgtcttcttcaccaccaggatggatggcaccctggacatctgggacttcatgtttgagcagtgtgaccccaccctgagcctgaaggtgtgtgatgaggccctcttctgcctgcgggtgcaggacaatggctgcctgattgcctgtggcagccagctgggcaccaccaccctgctggaggtgtccccaggcctgagcaccctgcagagaaatgagaagaatgtggccagctccatgtttgagcgggagacccggcgggagaagatcctggaggcccggcaccgggagatgaggctgaaggagaagggcaaggccgagggcagagatgaggagcagacagatgaggagctggccgtggacctggaggccctggtgtccaaggccgaggaggagttctttgacatcatctttgctgagctgaagaagaaggaggctgatgccatcaagctgacccctgtgccccagcagcccagccctgaggaggaccaggtggtggaggagggggaggaggccgccggggaggagggagatgaggaggtggaggaggacctggcctag

SEQ ID NO: 150664 - DNA, 1818 bp, synthetic construct; identical to SEQ ID NO: 150663
  misc_feature 1..1818: note = Description of Artificial Sequence: Synthetic coding sequence
  source 1..1818: mol_type = other DNA

SEQ ID NO: 150665 - DNA, 234 bp, synthetic construct
  misc_feature 1..234: note = Description of Artificial Sequence: Synthetic coding sequence
  source 1..234: mol_type = other DNA
atgaagaagctgaagatcctgtacatgagcaacaacctggtgaaggactgggccgagtttgtgaagctggccgagctgccctgcctggaggacctggtgtttgtgggcaaccccctggaggagaagcacagcgctgagaacaactggattgaggaggccaccaagagggtgcccaagctgaagaagctggatggcacccctgtgatcaagggagatgaggaggaggacaactag

SEQ ID NO: 150666 - DNA, 456 bp, synthetic construct
  misc_feature 1..456: note = Description of Artificial Sequence: Synthetic coding sequence
  source 1..456: mol_type = other DNA
atggatgccagcctgtccatgctggccaactgtgagaagctgagcctgagcaccaactgcatcgagaagatcgccaacctgaatggcctgaagaacctgcgcatcctgagcctgggcaggaacaacatcaagaacctgaatggcctggaggccgtgggggacaccctggaggagctgtggatctcctacaacttcatcgagaagctgaagggcatccacatcatgaagaagctgaagatcctgtacatgagcaacaacctggtgaaggactgggccgagtttgtgaagctggccgagctgccctgcctggaggacctggtgtttgtgggcaaccccctggaggagaagcacagcgctgagaacaactggattgaggaggccaccaagagggtgcccaagctgaagaagctggatggcacccctgtgatcaagggagatgaggaggaggacaactag

SEQ ID NO: 150667 - DNA, 573 bp, synthetic construct
  misc_feature 1..573: note = Description of Artificial Sequence: Synthetic coding sequence
  source 1..573: mol_type = other DNA
atggccaaggccaccaccatcaaggaggccctggcccgctgggaggagaagacaggccagaggccttctgaggccaaggagatcaagctgtatgcccagatcccccccatcgagaagatggatgccagcctgtccatgctggccaactgtgagaagctgagcctgagcaccaactgcatcgagaagatcgccaacctgaatggcctgaagaacctgcgcatcctgagcctgggcaggaacaacatcaagaacctgaatggcctggaggccgtgggggacaccctggaggagctgtggatctcctacaacttcatcgagaagctgaagggcatccacatcatgaagaagctgaagatcctgtacatgagcaacaacctggtgaaggactgggccgagtttgtgaagctggccgagctgccctgcctggaggacctggtgtttgtgggcaaccccctggaggagaagcacagcgctgagaacaactggattgaggaggccaccaagagggtgcccaagctgaagaagctggatggcacccctgtgatcaagggagatgaggaggaggacaactag

SEQ ID NO: 150668 - DNA, 174 bp, synthetic construct
  misc_feature 1..174: note = Description of Artificial Sequence: Synthetic coding sequence
  source 1..174: mol_type = other DNA
atgaagaagctgaagatcctgtacatgagcaacaacctggtgaaggactgggccgagtttgtgaagctggccgagctgccctgcctggaggacctggtgtttgtgggcaaccccctggaggagaagcacagcgctgagaacaactggattgaggaggccaccaagagggtgtag

SEQ ID NO: 150669 - DNA, 456 bp, synthetic construct; identical to SEQ ID NO: 150666
  misc_feature 1..456: note = Description of Artificial Sequence: Synthetic coding sequence
  source 1..456: mol_type = other DNA

SEQ ID NO: 150670 - DNA, 195 bp, synthetic construct
  misc_feature 1..195: note = Description of Artificial Sequence: Synthetic coding sequence
  source 1..195: mol_type = other DNA
atgaagaagctgaagatcctgtacatgagcaacaacctggtgaaggactgggccgagtttgtgaagctggccgagctgccctgcctggaggacctggtgtttgtgggcaaccccctggaggagaagcacagcgctgagaacaactggattgaggaggccaccaagagggtgcccaagctgaagaagctggactag

SEQ ID NO: 150671 - DNA, 159 bp, synthetic construct
  misc_feature 1..159: note = Description of Artificial Sequence: Synthetic coding sequence
  source 1..159: mol_type = other DNA
atggatgccagcctgtccatgctggccaactgtgagaagctgagcctgagcaccaactgcatcgagaagatcgccaacctgaatggcctgaagaacctgcgcatcctgagcctgggcaggaacaacatcaagaacctgaatggcctggaggccgtgtag

SEQ ID NO: 150672 - DNA, 198 bp, synthetic construct
  misc_feature 1..198: note = Description of Artificial Sequence: Synthetic coding sequence
  source 1..198: mol_type = other DNA
atgaagaagctgaagatcctgtacatgagcaacaacctggtgaaggactgggccgagtttgtgaagctggccgagctgccctgcctggaggacctggtgtttgtgggcaaccccctggaggagaagcacagcgctgagaacaactggattgaggaggccaccaagagggtgcccaagctgaagaagctggatggatag

SEQ ID NO: 150673 - DNA, 843 bp, synthetic construct
  misc_feature 1..843: note = Description of Artificial Sequence: Synthetic coding sequence
  source 1..843: mol_type = other DNA
atggtgacagccaacaaggcccacacaggccagggcagctgctgggtggccaccctggccagcgccatgatccccccagctgacagcctgctgaagtatgacacccctgtgctggtgtccaggaacacagagaagaggagccccaaggcccggctgctgaaggtgagcccccagcagcccggccccagcggcagcgccccccagccccccaagaccaagctgcccagcaccccctgtgtgcctgaccccaccaagcaggccgaggagatcctgaatgccatcctgcccccccgggagtgggtggaggacacccagctgtggatccagcaggtgagcagcacccccagcaccaggatggatgtggtgcacctgcaggagcagctggacctgaagctgcagcagaggcaggcccgggagaccggcatctgccctgtgcggcgggagctgtacagccagtgctttgatgagctgatccgggaggtgaccatcaactgtgccgagcggggcctgctgctgctgcgggtgagagatgagatccgcatgaccatcgccgcctaccagaccctgtatgagagctctgtggccttcggcatgaggaaggccctgcaggccgagcagggcaagagtgacatggagaggaagattgctgagctggagacagagaagagggacctggagcggcaggtgaatgagcagaaggccaagtgtgaggccacagagaagcgggagagcgagcggcggcaggtggaggagaagaagcacaatgaggagatccagttcctgaagaggaccaaccagcagctgaaggcccagctggagggcatcatcgcccccaagaagtag

SEQ ID NO: 150674 - DNA, 399 bp, synthetic construct
  misc_feature 1..399: note = Description of Artificial Sequence: Synthetic coding sequence
  source 1..399: mol_type = other DNA
atgccctactacccccaggatgagctgatccgggaggtgaccatcaactgtgccgagcggggcctgctgctgctgcgggtgagagatgagatccgcatgaccatcgccgcctaccagaccctgtatgagagctctgtggccttcggcatgaggaaggccctgcaggccgagcagggcaagagtgacatggagaggaagattgctgagctggagacagagaagagggacctggagcggcaggtgaatgagcagaaggccaagtgtgaggccacagagaagcgggagagcgagcggcggcaggtggaggagaagaagcacaatgaggagatccagttcctgaagaggaccaaccagcagctgaaggcccagctggagggcatcatcgcccccaagaagtag

SEQ ID NO: 150675 - DNA, 13941 bp, synthetic construct
  misc_feature 1..13941: note = Description of Artificial Sequence: Synthetic coding sequence
  source 1..13941: mol_type = other DNA
atgtctgagcccggcggcggcggcggggaggatggcagcgctggcctggaggtgtctgctgtgcagaatgtggctgatgtgtctgtgctgcagaagcacctgaggaagctggtgcccctgctgctggaggatggaggagaggccccagctgccctggaggccgccctggaggagaagagcgccctggagcagatgaggaagttcctgagtgacccccaggtgcacacagtgctggtggagaggagcaccctgaaggaggatgtgggagatgaaggagaggaggagaaggagttcatctcctacaacatcaacatcgacatccactatggagtgaagagcaacagcctggccttcatcaagaggacccctgtgattgatgctgacaagcctgtgagcagccagctgcgggtgctgaccctgtctgaggacagcccctatgagaccctgcacagcttcatcagcaatgctgtggcccccttcttcaagagctacatccgggagagcggcaaggctgacagagatggagacaagatggcccccagcgtggagaagaagattgctgagctggagatgggcctgctgcacctgcagcagaacatcgagatccctgagatcagcctgcccatccaccccatgatcaccaacgtggccaagcagtgctatgagcggggggagaagcccaaggtgacagactttggagacaaggtggaggaccccaccttcctgaaccagctgcagagcggcgtgaaccgctggatccgggagatccagaaggtgaccaagctggaccgggaccctgccagcggcacagccctgcaggagatctccttctggctgaacctggagcgggccctgtaccgcatccaggagaagcgggagagccctgaggtgctgctgaccctggacatcctgaagcacggcaagcgcttccacgccaccgtgtcctttgacacagacaccggcctgaagcaggccctggagaccgtgaatgactacaaccccctgatgaaggacttccccctgaatgacctgctgagcgccacagagctggacaagatccggcaggccctggtggccatcttcacccacctgaggaagatccggaacaccaagtaccccatccagagggccctgcggctggtggaggccatcagccgggacctgagcagccagctgctgaaggtgctgggcaccaggaagctgatgcacgtggcctatgaggagtttgagaaggtgatggtggcctgctttgaggtgttccagacctgggatgatgaatatgagaagctgcaggtgctgctgcgggacatcgtgaagaggaagcgggaggagaacctgaagatggtgtggaggatcaacccagcccacaggaagctgcaggcccggctggaccagatgaggaagttccggcggcagcacgagcagctgcgggccgtcatcgtgcgggtgctgcggccccaggtgacagctgtggcccagcagaaccagggcgaggtgcctgagccccaggacatgaaggtggccgaggtgctgtttgatgctgctgatgccaatgccatcgaggaggtgaacctggcctatgaaaatgtgaaggaggtggatggcctggatgtgtccaaggagggcacagaggcctgggaggccgccatgaagagatatgatgaaagaattgacagagtggagacccgcatcacagcccggctgcgggaccagctgggcacagccaagaatgccaatgagatgttccgcatcttcagccgcttcaatgccctgtttgtgcggccccacatccggggggccatccgggagtaccagacccagctgatccagagggtgaaggatgacatcgagagcctgcatgacaagttcaaggtgcagtacccccagagccaggcctgcaagatgagccacgtgcgggacctgccccctgtgtctggcagcatcatctgggccaagcagattgaccggcagctgacagcctacatgaagagggtggaggatgtgctgggcaagggctgggagaaccacgtggagggccagaagctgaagcaggatggagacagcttcaggatgaagctgaacacccaggagatctttgatgactgggccaggaaggtgcagcagaggaacctgggcgtgtctggccgcatcttcaccatcgagagcaccagggtgcggggccgcactggaaatgtgctgaagctgaaggtgaacttcctgcctgagatcatcaccctgagcaaggaggtgaggaacctgaagtggctgggcttccgggtgcccctggccatcgtgaacaaggcccaccaggccaaccagctgtacccctttgccatcagcctcatcgagagcgtgaggacctatgaaagaacctgtgagaaggtggaggagaggaacaccatcagcctgctggtggccggcctgaagaaggaggtgcaggccctgattgctgagggcatcgccctggtgtgggagagctacaagctggacccctacgtgcagaggctggccgagaccgtcttcaacttccaggagaaggtggatgacctgctgatcatcgaggagaagattgacctggaggtgcgcagcctggagacctgcatgtatgaccacaagaccttcagcgagatcctgaacagagtgcagaaggctgtggatgacctgaacctgcacagctacagcaacctgcccatctgggtgaacaagctggacatggagattgagcgcatcctgggcgtgcggctgcaggccggcctgcgggcctggacccaggtgctgctgggccaggccgaggacaaggccgaggtggacatggacacagatgccccccaggtgagccacaagccaggaggagagcccaagatcaagaatgtggtgcatgagctgcgcatcaccaaccaggtgatctacctgaacccccccattgaagaatgtcgctacaagctgtaccaggagatgtttgcctggaagatggtggtgctgagcctgccccgcatccagagccagcgctaccaggtgggcgtgcactatgagctgacagaggaggagaagttctacagaaatgccctgaccaggatgccagatggccctgtggccctggaggagagctacagcgctgtgatgggcatcgtgtctgaggtggagcagtatgtgaaggtgtggctgcagtaccagtgcctgtgggacatgcaggccgagaacatctacaaccggctgggggaggacctgaacaagtggcaggccctgctggtgcagatcaggaaggcccggggcacctttgacaatgctgagaccaagaaggagtttggacctgtggtgattgattatggcaaggtgcagagcaaggtgaacctgaagtatgacagctggcacaaggaggtgctgagcaagtttggccagatgctgggcagcaacatgacagagttccacagccagatcagcaagagccggcaggagctggagcagcacagcgtggacacagccagcaccagtgatgctgtgaccttcatcacctacgtgcagagcctgaagaggaagatcaagcagtttgagaagcaggtggagctgtacagaaatggccagaggctgctggagaagcagcgcttccagtttcctccttcctggctgtacatcgacaacatcgagggggagtggggcgccttcaatgacatcatgaggaggaaggacagcgccatccagcagcaggtggccaacctgcagatgaagatcgtgcaggaggacagagctgtggagagcaggaccacagacctgctgacagactgggagaagaccaagcctgtgacaggcaacctgcggcctgaggaggccctgcaggccctgaccatctatgagggcaagtttggccgcctgaaggatgaccgggagaagtgtgccaaggccaaggaggccctggagctgacagacaccggcctgctgagcggcagcgaggagcgggtgcaggtggccctggaggagctgcaggacctgaagggcgtgtggagcgagctgagcaaggtgtgggagcagattgaccagatgaaggagcagccctgggtgtctgtgcagcccaggaagctgcggcagaacctggatgccctgctgaaccagctgaagagcttccctgcccggctgcggcagtatgccagctatgaatttgtgcagaggctgctgaagggctacatgaagatcaacatgctggtgattgagctgaagtctgaggccctgaaggacagacactggaagcagctgatgaagaggctgcacgtgaactgggtggtgtctgagctgaccctgggccagatctgggatgtggacctgcagaagaatgaggccatcgtgaaggatgtgctgctggtggcccagggcgagatggccctggaggagttcctgaagcagatccgggaggtgtggaacacctatgagctggacctggtgaactaccagaacaagtgccgcctcatccggggctgggatgacctcttcaacaaggtgaaggagcacatcaacagcgtgtctgccatgaagctgagcccctactacaaggtgtttgaggaggatgccctgtcctgggaggacaagctgaaccgcatcatggccctgtttgatgtgtggattgatgtgcagaggcgctgggtgtacctggagggcatcttcaccggcagcgctgacatcaagcacctgctgcctgtggagacccagcgcttccagagcatcagcacagagttcctggccctgatgaagaaggtgtccaagagccccctggtgatggatgtgctgaacatccagggcgtgcagaggagcctggagcggctggccgacctgctgggcaagatccagaaggccctgggggagtacctggagcgggagaggagcagcttcccccgcttctactttgtgggagatgaggacctgctggagatcatcggcaacagcaagaatgtggccaagctgcagaagcacttcaagaagatgtttgctggggtgagcagcatcatcctgaatgaagacaacagcgtggtgctgggcatcagcagccgggagggggaggaggtgatgttcaagacccctgtgtccatcacagagcaccccaagatcaatgagtggctgaccctggtggagaaggagatgagggtgaccctggccaagctgctggccgagagcgtgacagaggtggagatctttgggaaggccaccagcattgaccccaacacctacatcacctggattgacaagtaccaggcccagctggtggtgctgagcgcccagatcgcctggagcgaaaatgtggagacagccctgagctccatgggcggcggcggagatgctgcccccctgcacagcgtgctgagcaatgtggaggtgaccctgaatgtgctggccgacagcgtgctgatggagcagccccccctgcggcggaggaagctggagcacctgatcacagagctggtgcaccagagagatgtgaccaggagcctcatcaagagcaagattgacaatgccaagagctttgagtggctgagccagatgaggttctactttgaccccaagcagacagatgtgctgcagcagctgagcatccagatggccaatgccaagttcaactacggctttgagtacctgggcgtgcaggacaagctggtgcagacccccctgacagaccgctgctacctgaccatgacccaggccctggaggcccggctgggcggcagcccctttggacctgctggcaccgggaagacagaatctgtgaaggccctgggccaccagctgggccgctttgtgctggtgttcaactgtgatgagacctttgacttccaggccatgggccgcatctttgtgggcctgtgccaggtgggcgcctggggctgctttgatgagttcaaccggctggaggagaggatgctgtctgctgtgtcccagcaggtgcagtgcatccaggaggccctgcgggagcacagcaaccccaactatgacaagaccagcgcccccatcacctgtgagctgctgaacaagcaggtgaaggtgtccccagacatggccatcttcatcaccatgaaccctggctacgccggccgcagcaacctgcctgacaacctgaagaagctgttccgcagcctggccatgaccaagccagaccggcagctgattgcccaggtgatgctgtacagccagggcttcagaacagctgaggtgctggccaacaagatcgtgcccttcttcaagctgtgtgatgagcagctgagcagccagagccactatgactttggcctgcgggccctgaagtctgtgctggtgtctgctggaaatgtgaagcgggagcgcatccagaagatcaagcgggagaaggaggagcggggggaggccgtggatgaaggagaaattgctgagaacctgcctgagcaggagatcctgatccagagcgtgtgtgagaccatggtgcccaagctggtggccgaggacatccccctgctcttcagcctgctgagtgatgtgtttcctggggtgcagtaccacagaggagagatgacagccctgcgggaggagctgaagaaggtgtgccaggagatgtacctgacctatggagatggagaggaggtgggcggcatgtgggtggagaaggtgctgcagctgtaccagatcacccagatcaaccacggcctgatgatggtgggccccagcggcagcggcaagtccatggcctggagggtgctgctgaaggccctggagcggctggagggcgtggagggcgtggcccacatcatcgaccccaaggccatcagcaaggaccacctgtatggcaccctggaccccaacacccgggagtggacagatggcctcttcacccacgtgctgaggaagatcatcgacagcgtgcggggggagctgcagaagaggcagtggatcgtgtttgatggagatgtggaccctgagtgggtggagaacctgaacagcgtgctggatgacaacaagctgctgaccctgcccaatggagagcggctgagcctgccccccaacgtgcgcatcatgtttgaggtgcaggacctgaagtatgccaccctggccaccgtgagccgctgtggcatggtgtggttctctgaagatgtgctgagcacagacatgatcttcaacaacttcctggcccggctgcggagcatccccctggatgaaggagaagatgaggcccagaggaggaggaagggcaaggaggatgaaggagaggaggccgccagccccatgctgcagatccagagagatgctgccaccatcatgcagccctacttcaccagcaatggcctggtgaccaaggccctggagcacgccttccagctggagcacatcatggacctgacccggctgcgctgcctgggcagcctcttctccatgctgcaccaggcctgcagaaatgtggcccagtacaatgccaaccacccagacttccccatgcagatcgagcagctggagcgctacatccagcgctacctggtgtatgccatcctgtggagcctgagcggggacagccggctgaagatgagagctgagctgggggagtacatccgccgcatcaccaccgtgcccctgcccacagcccccaacatccccatcattgattatgaggtgtccatcagcggggagtggagcccctggcaggccaaggtgccccagatcgaggtggagacccacaaggtggccgccccagatgtggtggtgcccaccctggacacagtgagacatgaggccctgctgtacacctggctggccgagcacaagcccctggtgctgtgtggccccccaggcagcggcaagaccatgaccctcttcagcgccctgcgggccctgcctgacatggaggtggtgggcctgaacttcagcagcgccaccaccccagagctgctgctgaagacctttgaccactactgtgagtacagaaggacccccaacggggtggtgctggcccctgtgcagctgggcaagtggctggtgctcttctgtgatgagatcaacctgcctgacatggacaagtatggcacccagagggtcatctccttcatccggcagatggtggagcacggcggcttctaccgcaccagtgaccagacctgggtgaagctggagcgcatccagtttgtgggcgcctgcaaccccccaacagaccccggcaggaagcccctgagccaccgcttcctgcggcacgtgcctgtggtgtatgtggactacccaggccctgccagcctgacccagatctacggcaccttcaacagagccatgctgcggctcatccccagcctgcggacctacgccgagcccctgacagctgccatggtggagttctacaccatgagccaggagcgcttcacccaggacacccagccccactacatctacagcccccgggagatgacccgctgggtgcggggcatctttgaggccctgcggcccctggagaccctgcctgtggagggcctcatccgcatctgggcccacgaggccctgcggctcttccaggaccggctggtggaggatgaggagcggcgctggacagatgagaacatcgacacagtggccctgaagcacttccccaacatcgaccgggagaaggccatgagccggcccatcctgtacagcaactggctgagcaaggactacatccctgtggaccaggaggagctgcgggactatgtgaaggcccggctgaaggtgttctatgaggaggagctggatgtgcccctggtgctcttcaatgaggtgctggaccacgtgctgagaattgaccgcatcttccggcagccccagggccacctgctgctgattggagtgtctggagctgggaagaccaccctgagcagatttgtggcctggatgaatggcctgtctgtgtaccagatcaaggtgcacaggaagtacaccggggaggactttgatgaggacctgaggacagtgctgcggcgcagcggctgcaagaatgagaagatcgccttcatcatggatgagagcaatgtgctggacagcggcttcctggagaggatgaacaccctgctggccaacggggaggtgcccggcctgtttgaaggagatgaatatgccaccctgatgacccagtgcaaggagggcgcccagaaggagggcctgatgctggacagccatgaggagctgtacaagtggttcaccagccaggtgatccggaacctgcacgtggtgttcaccatgaaccccagcagcgagggcctgaaggacagagctgccaccagccctgccctcttcaacagatgtgtgctgaactggtttggagactggagcacagaggccctgtaccaggtgggcaaggagttcaccagcaagatggacctggagaagcccaactacatcgtgcctgactacatgcctgtggtgtatgacaagctgccccagccccccagccaccgggaggccatcgtgaacagctgtgtgtttgtgcaccagaccctgcaccaggccaatgcccggctggccaagagaggaggccgcaccatggccatcacccccaggcactacctggacttcatcaaccactacgccaacctcttccacgagaagaggtctgagctggaggagcagcagatgcacctgaatgtgggcctgaggaagatcaaggagaccgtggaccaggtggaggagctgcggcgggacctgcgcatcaagagccaggagctggaggtgaagaatgctgctgccaatgacaagctgaagaagatggtgaaggaccagcaggaggccgagaagaagaaggtgatgagccaggagatccaggagcagctgcacaagcagcaggaggtgattgctgacaagcagatgtctgtgaaggaggacctggacaaggtggagcctgctgtgattgaggcccagaatgctgtgaagagcatcaagaagcagcacctggtggaggtgcgctccatggccaaccccccagctgctgtgaagctggccctggagagcatctgcctgctgctgggggagagcaccacagactggaagcagatccgcagcatcatcatgagggagaacttcatccccaccatcgtgaacttctctgctgaggagatcagtgatgccatccgggagaagatgaagaagaactacatgagcaaccccagctacaactatgaaattgtgaacagagccagcctggcctgtggccccatggtgaagtgggccatcgcccagctgaactatgctgacatgctgaagagggtggagcccctgagaaatgagctgcagaagctggaggatgatgccaaggacaaccagcagaaggccaatgaggtggagcagatgatccgggacctggaggccagcatcgcccgctacaaggaggagtatgctgtgctgatcagcgaggcccaggccatcaaggctgacctggccgctgtggaggccaaggtgaacagaagcacagccctgctgaagagcctgtctgctgagcgggagcgctgggagaagaccagcgagaccttcaagaaccagatgagcaccatcgccggggactgcctgctgtctgctgccttcatcgcctatgccggctactttgaccagcagatgaggcagaacctcttcaccacctggagccaccacctgcagcaggccaacatccagttcagaacagacatcgccaggacagagtacctgagcaatgctgatgagcggctgcgctggcaggccagcagcctgcctgcagatgacctgtgcacagaaaatgccatcatgctgaagcgcttcaaccgctaccccctcatcatcgaccccagcggccaggccacagagttcatcatgaatgagtacaaggacaggaagatcaccaggaccagcttcctggatgatgccttcaggaagaacctggagagcgccctgcgctttggaaaccccctgctggtgcaggatgtggagagctatgaccctgtgctgaaccctgtgctgaaccgggaggtgcggaggactggaggccgggtgctgatcaccctgggggaccaggacatcgacctgagccccagctttgtgatcttcctgagcacccgggaccccaccgtggagttccccccagacctgtgcagccgggtgacctttgtgaacttcaccgtgaccaggagcagcctgcagagccagtgcctgaatgaggtgctgaaggccgagaggccagatgtggatgagaagagaagtgacctgctgaagctgcagggcgagttccagctgcggctgcggcagctggagaagagcctgctgcaggccctgaatgaggtgaagggccgcatcctggatgatgacaccatcatcaccaccctggagaacctgaagcgggaggccgctgaggtgaccaggaaggtggaggagacagacatcgtgatgcaggaggtggagaccgtgtcccagcagtacctgcccctgagcacagcctgcagcagcatctacttcaccatggagagcctgaagcagatccacttcctgtaccagtacagcctgcagttcttcctggacatctaccacaacgtgctgtatgagaaccccaacctgaagggcgtgacagaccacacccagaggctgagcatcatcaccaaggacctcttccaggtggccttcaacagagtggcccggggcatgctgcaccaggaccacatcacctttgccatgctgctggcccgcatcaagctgaagggcaccgtgggggagcccacctatgatgctgagttccagcacttcctgcggggaaatgagatcgtgctgtctgctggcagcaccccccgcatccagggcctgactgtggagcaggccgaggccgtggtgcggctgagctgcctgcctgccttcaaggacctgattgccaaggtgcaggctgatgagcagtttggcatctggctggacagcagcagccctgagcagacagtgccctacctgtggagcgaggagaccccagccacccccatcggccaggccatccaccggctgctgctgatccaggccttccggccagaccggctgctggccatggcccacatgtttgtgtccaccaacctgggggagagcttcatgagcatcatggagcagcccctggacctgacccacatcgtgggcacagaggtgaagcccaacacccctgtgctgatgtgcagcgtgcccggctatgatgccagcggccacgtggaggacctggccgctgagcagaacacccagatcaccagcatcgccatcggcagcgctgagggcttcaaccaggccgacaaggccatcaacacagctgtgaagagcggccgctgggtgatgctgaagaatgtgcacctggcccctggctggctgatgcagctggagaagaagctgcacagcctgcagccccacgcctgcttccgcctcttcctgaccatggagatcaaccccaaggtgcctgtgaacctgctgcgggccggccgcatctttgtgtttgagcccccacctggggtgaaggccaacatgctgcggaccttcagcagcatccctgtgagccgcatctgcaagagccccaatgaaagagcccggctgtacttcctgctggcctggttccacgccatcatccaggagcggctgcgctatgcccccctgggctggagcaagaagtatgaatttggagagagtgacctgcggagcgcctgtgacacagtggacacctggctggatgacacagccaagggccggcagaacatcagcccagacaagatcccctggagcgccctgaagaccctgatggcccagagcatctacggcggccgggtggacaatgaatttgaccagaggctgctgaacaccttcctggagcggctcttcaccaccaggagctttgacagcgagttcaagctggcctgcaaggtggatggccacaaggacatccagatgccagatggcatcagaagagaggagtttgtgcagtgggtggagctgctgcctgacacccagacccccagctggctgggcctgcccaacaatgctgagcgggtgctgctgaccacccagggcgtggacatgatcagcaagatgctgaagatgcagatgctggaggatgaagatgacctggcctatgcagagacagagaagaagaccaggacagacagcaccagtgatggccggcctgcctggatgaggaccctgcacaccacagccagcaactggctgcacctgatcccccagaccctgagccacctgaagaggacagtggagaacatcaaggaccccctcttccgcttctttgagcgggaggtgaagatgggcgccaagctgctgcaggatgtgcggcaggacctggctgatgtggtgcaggtgtgtgagggcaagaagaagcagaccaactacctgcggaccctcatcaatgagctggtgaagggcatcctgcccaggtcctggagccactacacagtgcctgctggcatgaccgtcatccagtgggtgtctgacttcagcgagcgcatcaagcagctgcagaacatcagcctggccgccgccagcggcggggccaaggagctgaagaacatccacgtgtgcctgggcggcctgtttgtgcctgaggcctacatcacagccacccggcagtatgtggcccaggccaacagctggagcctggaggagctgtgcctggaggtgaatgtgaccaccagccagggcgccaccctggatgcctgcagctttggagtgacaggcctgaagctgcagggcgccacctgcaacaacaacaagctgagcctgagcaatgccatcagcacagccctgcccctgacccagctgcgctgggtgaagcagaccaacacagagaagaaggcctctgtggtgaccctgcctgtgtacctgaacttcaccagggctgacctgatcttcaccgtggactttgagatcgccaccaaggaggaccccaggagcttctatgaaagaggagtggccgtgctgtgcacagaatag

SEQ ID NO: 150676 - DNA, 1899 bp, synthetic construct
  misc_feature 1..1899: note = Description of Artificial Sequence: Synthetic coding sequence
  source 1..1899: mol_type = other DNA
atgtctgacaagtctgagctgaaggccgagctggagaggaagaagcagaggctggcccagatccgggaggagaagaagaggaaggaggaggagaggaagaagaaggagacagaccagaagaaggaggccgtggcccctgtgcaggaggagagtgacctggagaagaagagaagagaggccgaggccctgctgcagagcatgggcctgaccccagagagccccatcgtgcccccacccatgagccccagcagcaagtctgtgtccaccccatctgaggccggcagccaggacagcggagatggagctgtgggcagcaggaccctgcactgggacacagaccccagcgtgctgcagctgcacagcgacagcgacctgggccggggccccatcaagctgggcatggccaagatcacccaggtggacttccccccccgggagatcgtgacctacaccaaggagacccagacccctgtgatggcccagcccaaggaggatgaggaggaggatgatgatgtggtggcccccaagccacccatcgagcctgaggaggagaagaccctgaagaaggatgaggagaatgacagcaaggcccctcctcatgagctgacagaggaggagaagcagcagatcctgcacagcgaggagttcctgtccttctttgaccacagcacccgcatcgtggagcgggccctgtctgagcagatcaacatcttctttgactacagcggccgggacctggaggacaaggagggggagatccaggccggggccaagctgagcctgaaccggcagttctttgatgagcgctggagcaagcaccgggtggtgtcctgcctggactggagcagccagtacccagagctgctggtggccagctacaacaacaatgaagatgcccctcatgagccagatggagtggccctggtgtggaacatgaagtacaagaagaccaccccagaatatgtgttccactgccagagcgctgtgatgtctgccacctttgccaagttccaccccaacctggtggtgggcggcacctacagcggccagatcgtgctgtgggacaacagaagcaacaagaggacccctgtgcagaggacccccctgtctgctgctgcccacacccaccctgtgtactgtgtgaatgtggtgggcacccagaatgcccacaacctgatcagcatcagcacagatggcaagatctgctcctggagcctggacatgctgagccacccccaggacagcatggagctggtgcacaagcagagcaaggctgtggccgtgacctccatgtccttccctgtgggagatgtgaacaactttgtggtgggcagcgaggagggctctgtgtacacagcctgccgccacggcagcaaggccggcatcagcgagatgtttgagggccaccagggccccatcaccggcatccactgccacgccgctgtgggcgctgtggacttcagccacctgtttgtgaccagcagctttgactggacagtgaagctgtggaccaccaagaacaacaagcccctgtacagctttgaagataatgctgactatgtgtatgatgtgatgtggagccccacccacccagccctgtttgcctgtgtggatggcatgggccgcctggacctgtggaacctgaacaatgacacagaggtgcccacagccagcatctctgtggagggcaacccagccctgaacagagtgcgctggacccacagcggccgggagattgctgtgggggacagcgagggccagatcgtcatctatgatgtgggggagcagattgctgtgcccagaaatgatgagtgggcccgcttcggccgcaccctggccgagatcaatgccaacagagcagatgctgaggaggaggccgccacccgcatcccagcctag

SEQ ID NO: 150677 - DNA, 1839 bp, synthetic construct
  misc_feature 1..1839: note = Description of Artificial Sequence: Synthetic coding sequence
  source 1..1839: mol_type = other DNA
atgtctgacaagtctgagctgaaggccgagctggagaggaagaagcagaggctggcccagatccgggaggagaagaagaggaaggaggaggagaggaagaagaaggagacagaccagaagaaggaggccgtggcccctgtgcaggaggagagtgacctggagaagaagagaagagaggccgaggccctgctgcagagcatgggcctgaccccagagagccccatcgtgcccccacccatgagccccagcagcaagtctgtgtccaccccatctgaggccggcagccaggacagcggagatggagctgtgggcagccggcggggccccatcaagctgggcatggccaagatcacccaggtggacttccccccccgggagatcgtgacctacaccaaggagacccagacccctgtgatggcccagcccaaggaggatgaggaggaggatgatgatgtggtggcccccaagccacccatcgagcctgaggaggagaagaccctgaagaaggatgaggagaatgacagcaaggcccctcctcatgagctgacagaggaggagaagcagcagatcctgcacagcgaggagttcctgtccttctttgaccacagcacccgcatcgtggagcgggccctgtctgagcagatcaacatcttctttgactacagcggccgggacctggaggacaaggagggggagatccaggccggggccaagctgagcctgaaccggcagttctttgatgagcgctggagcaagcaccgggtggtgtcctgcctggactggagcagccagtacccagagctgctggtggccagctacaacaacaatgaagatgcccctcatgagccagatggagtggccctggtgtggaacatgaagtacaagaagaccaccccagaatatgtgttccactgccagagcgctgtgatgtctgccacctttgccaagttccaccccaacctggtggtgggcggcacctacagcggccagatcgtgctgtgggacaacagaagcaacaagaggacccctgtgcagaggacccccctgtctgctgctgcccacacccaccctgtgtactgtgtgaatgtggtgggcacccagaatgcccacaacctgatcagcatcagcacagatggcaagatctgctcctggagcctggacatgctgagccacccccaggacagcatggagctggtgcacaagcagagcaaggctgtggccgtgacctccatgtccttccctgtgggagatgtgaacaactttgtggtgggcagcgaggagggctctgtgtacacagcctgccgccacggcagcaaggccggcatcagcgagatgtttgagggccaccagggccccatcaccggcatccactgccacgccgctgtgggcgctgtggacttcagccacctgtttgtgaccagcagctttgactggacagtgaagctgtggaccaccaagaacaacaagcccctgtacagctttgaagataatgctgactatgtgtatgatgtgatgtggagccccacccacccagccctgtttgcctgtgtggatggcatgggccgcctggacctgtggaacctgaacaatgacacagaggtgcccacagccagcatctctgtggagggcaacccagccctgaacagagtgcgctggacccacagcggccgggagattgctgtgggggacagcgagggccagatcgtcatctatgatgtgggggagcagattgctgtgcccagaaatgatgagtgggcccgcttcggccgcaccctggccgagatcaatgccaacagagcagatgctgaggaggaggccgccacccgcatcccagcctag

SEQ ID NO: 150678 - DNA, 1893 bp, synthetic construct
  misc_feature 1..1893: note = Description of Artificial Sequence: Synthetic coding sequence
  source 1..1893: mol_type = other DNA
atgtctgacaagtctgagctgaaggccgagctggagaggaagaagcagaggctggcccagatccgggaggagaagaagaggaaggaggaggagaggaagaagaaggagacagaccagaagaaggaggccgtggcccctgtgcaggaggagagtgacctggagaagaagagaagagaggccgaggccctgctgcagagcatgggcctgaccccagagagccccatcgccgagcagcccctgcgggtggtgacagctgacacctgcctcttccactacctggtgcccccacccatgagccccagcagcaagtctgtgtccaccccatctgaggccggcagccaggacagcggagatggagctgtgggcagccggcggggccccatcaagctgggcatggccaagatcacccaggtggacttccccccccgggagatcgtgacctacaccaaggagacccagacccctgtgatggcccagcccaaggaggatgaggaggaggatgatgatgtggtggcccccaagccacccatcgagcctgaggaggagaagaccctgaagaaggatgaggagaatgacagcaaggcccctcctcatgagctgacagaggaggagaagcagcagatcctgcacagcgaggagttcctgtccttctttgaccacagcacccgcatcgtggagcgggccctgtctgagcagatcaacatcttctttgactacagcggccgggacctggaggacaaggagggggagatccaggccggggccaagctgagcctgaaccggcagttctttgatgagcgctggagcaagcaccgggtggtgtcctgcctggactggagcagccagtacccagagctgctggtggccagctacaacaacaatgaagatgcccctcatgagccagatggagtggccctggtgtggaacatgaagtacaagaagaccaccccagaatatgtgttccactgccagagcgctgtgatgtctgccacctttgccaagttccaccccaacctggtggtgggcggcacctacagcggccagatcgtgctgtgggacaacagaagcaacaagaggacccctgtgcagaggacccccctgtctgctgctgcccacacccaccctgtgtactgtgtgaatgtggtgggcacccagaatgcccacaacctgatcagcatcagcacagatggcaagatctgctcctggagcctggacatgctgagccacccccaggacagcatggagctggtgcacaagcagagcaaggctgtggccgtgacctccatgtccttccctgtgggagatgtgaacaactttgtggtgggcagcgaggagggctctgtgtacacagcctgccgccacggcagcaaggccggcatcagcgagatgtttgagggccaccagggccccatcaccggcatccactgccacgccgctgtgggcgctgtggacttcagccacctgtttgtgaccagcagctttgactggacagtgaagctgtggaccaccaagaacaacaagcccctgtacagctttgaagataatgctgactatgtgtatgatgtgatgtggagccccacccacccagccctgtttgcctgtgtggatggcatgggccgcctggacctgtggaacctgaacaatgacacagaggtgcccacagccagcatctctgtggagggcaacccagccctgaacagagtgcgctggacccacagcggccgggagattgctgtgggggacagcgagggccagatcgtcatctatgatgtgggggagcagattgctgtgcccagaaatgatgagtgggcccgcttcggccgcaccctggccgagatcaatgccaacagagcagatgctgaggaggaggccgccacccgcatcccagcctag

SEQ ID NO: 150679 - DNA, 1917 bp, synthetic construct
  misc_feature 1..1917: note = Description of Artificial Sequence: Synthetic coding sequence
  source 1..1917: mol_type = other DNA
atgtctgacaagtctgagctgaaggccgagctggagaggaagaagcagaggctggcccagatccgggaggagaagaagaggaaggaggaggagaggaagaagaaggagacagaccagaagaaggaggccgtggcccctgtgcaggaggagagtgacctggagaagaagagaagagaggccgaggccctgctgcagagcatgggcctgaccccagagagccccatcgtgttcagcgagtactgggtgcccccacccatgagccccagcagcaagtctgtgtccaccccatctgaggccggcagccaggacagcggagatggagctgtgggcagcaggaccctgcactgggacacagaccccagcgtgctgcagctgcacagcgacagcgacctgggccggggccccatcaagctgggcatggccaagatcacccaggtggacttccccccccgggagatcgtgacctacaccaaggagacccagacccctgtgatggcccagcccaaggaggatgaggaggaggatgatgatgtggtggcccccaagccacccatcgagcctgaggaggagaagaccctgaagaaggatgaggagaatgacagcaaggcccctcctcatgagctgacagaggaggagaagcagcagatcctgcacagcgaggagttcctgtccttctttgaccacagcacccgcatcgtggagcgggccctgtctgagcagatcaacatcttctttgactacagcggccgggacctggaggacaaggagggggagatccaggccggggccaagctgagcctgaaccggcagttctttgatgagcgctggagcaagcaccgggtggtgtcctgcctggactggagcagccagtacccagagctgctggtggccagctacaacaacaatgaagatgcccctcatgagccagatggagtggccctggtgtggaacatgaagtacaagaagaccaccccagaatatgtgttccactgccagagcgctgtgatgtctgccacctttgccaagttccaccccaacctggtggtgggcggcacctacagcggccagatcgtgctgtgggacaacagaagcaacaagaggacccctgtgcagaggacccccctgtctgctgctgcccacacccaccctgtgtactgtgtgaatgtggtgggcacccagaatgcccacaacctgatcagcatcagcacagatggcaagatctgctcctggagcctggacatgctgagccacccccaggacagcatggagctggtgcacaagcagagcaaggctgtggccgtgacctccatgtccttccctgtgggagatgtgaacaactttgtggtgggcagcgaggagggctctgtgtacacagcctgccgccacggcagcaaggccggcatcagcgagatgtttgagggccaccagggccccatcaccggcatccactgccacgccgctgtgggcgctgtggacttcagccacctgtttgtgaccagcagctttgactggacagtgaagctgtggaccaccaagaacaacaagcccctgtacagctttgaagataatgctgactatgtgtatgatgtgatgtggagccccacccacccagccctgtttgcctgtgtggatggcatgggccgcctggacctgtggaacctgaacaatgacacagaggtgcccacagccagcatctctgtggagggcaacccagccctgaacagagtgcgctggacccacagcggccgggagattgctgtgggggacagcgagggccagatcgtcatctatgatgtgggggagcagattgctgtgcccagaaatgatgagtgggcccgcttcggccgcaccctggccgagatcaatgccaacagagcagatgctgaggaggaggccgccacccgcatcccagcctag

SEQ ID NO: 150680 - DNA, 1839 bp, synthetic construct; identical to SEQ ID NO: 150677
  misc_feature 1..1839: note = Description of Artificial Sequence: Synthetic coding sequence
  source 1..1839: mol_type = other DNA

SEQ ID NO: 150681 - DNA, 1899 bp, synthetic construct; identical to SEQ ID NO: 150676
  misc_feature 1..1899: note = Description of Artificial Sequence: Synthetic coding sequence
  source 1..1899: mol_type = other DNA

SEQ ID NO: 150682 - DNA, 1914 bp, synthetic construct
  misc_feature 1..1914: note = Description of Artificial Sequence: Synthetic coding sequence
  source 1..1914: mol_type = other DNA
atgtctgacaagtctgagctgaaggccgagctggagaggaagaagcagaggctggcccagatccgggaggagaagaagaggaaggaggaggagaggaagaagaaggagacagaccagaagaaggaggccgtggcccctgtgcaggaggagagtgacctggagaagaagagaagagaggccgaggccctgctgcagagcatgggcctgaccccagagagccccatcgtgttcagcgagtactgggtgcccccacccatgagccccagcagcaagtctgtgtccaccccatctgaggccggcagccaggacagcggagatggagctgtgggcagcaggaccctgcactgggacacagaccccagcgtgctgcagctgcacagcgacagcgacctgggccggggccccatcaagctgggcatggccaagatcacccaggtggacttccccccccgggagatcgtgacctacaccaaggagacccagacccctgtgatggcccagcccaaggaggatgaggaggaggatgatgatgtggtggcccccaagccacccatcgagcctgaggaggagaagaccctgaagaaggatgaggagaatgacagcaaggcccctcctcatgagctgacagaggaggagaagcagcagatcctgcacagcgaggagttcctgtccttctttgaccacagcacccgcatcgtggagcgggccctgtctgagcagatcaacatcttctttgactacagcggccgggacctggaggacaaggagggggagatccaggccggggccaagctgagcctgaaccggcagttctttgatgagcgctggagcaagcaccgggtggtgtcctgcctggactggagcagccagtacccagagctgctggtggccagctacaacaacaatgaagatgcccctcatgagccagatggagtggccctggtgtggaacatgaagtacaagaagaccaccccagaatatgtgttccactgccagagcgctgtgatgtctgccacctttgccaagttccaccccaacctggtggtgggcggcacctacagcggccagatcgtgctgtgggacaacagaagcaacaagaggacccctgtgcagaggacccccctgtctgctgctgcccacacccaccctgtgtactgtgtgaatgtggtgggcacccagaatgcccacaacctgatcagcatcagcacagatggcaagatctgctcctggagcctggacatgctgagccacccccaggacagcatggagctggtgcacaagcagagcaaggctgtggccgtgacctccatgtccttccctgtgggagatgtgaacaactttgtggtgggcagcgaggagggctctgtgtacacagcctgccgccacggcagcaaggccggcatcagcgagatgtttgagggccaccagggccccatcaccggcatccactgccacgccgctgtgggcgctgtggacttcagccacctgtttgtgaccagcagctttgactggacagtgaagctgtggaccaccaagaacaacaagcccctgtacagctttgaagataatgctgactatgtgtatgatgtgatgtggagccccacccacccagccctgtttgcctgtgtggatggcatgggccgcctggacctgtggaacctgaacaatgacacagaggtgcccacagccagcatctctgtggagggcaacccagccctgaacagagtgcgctggacccacagcggccgggagattgctgtgggggacagcgagggccagatcgtcatctatgatgtgggggagattgctgtgcccagaaatgatgagtgggccaggtttggaagaaccctggccgagatcaatgccaacagagcagatgctgaggaggaggccgccacccgcatcccagcctag

SEQ ID NO: 150683 - DNA, 1917 bp, synthetic construct; identical to SEQ ID NO: 150679
  misc_feature 1..1917: note = Description of Artificial Sequence: Synthetic coding sequence
  source 1..1917: mol_type = other DNA

SEQ ID NO: 150684 - DNA, 1836 bp, synthetic construct
  misc_feature 1..1836: note = Description of Artificial Sequence: Synthetic coding sequence
  source 1..1836: mol_type = other DNA
atgtctgacaagtctgagctgaaggccgagctggagaggaagaagcagaggctggcccagatccgggaggagaagaagaggaaggaggaggagaggaagaagaaggagacagaccagaagaaggaggccgtggcccctgtgcaggaggagagtgacctggagaagaagagaagagaggccgaggccctgctgcagagcatgggcctgaccccagagagccccatcgtgcccccacccatgagccccagcagcaagtctgtgtccaccccatctgaggccggcagccaggacagcggagatggagctgtgggcagccggcggggccccatcaagctgggcatggccaagatcacccaggtggacttccccccccgggagatcgtgacctacaccaaggagacccagacccctgtgatggcccagcccaaggaggatgaggaggaggatgatgatgtggtggcccccaagccacccatcgagcctgaggaggagaagaccctgaagaaggatgaggagaatgacagcaaggcccctcctcatgagctgacagaggaggagaagcagcagatcctgcacagcgaggagttcctgtccttctttgaccacagcacccgcatcgtggagcgggccctgtctgagcagatcaacatcttctttgactacagcggccgggacctggaggacaaggagggggagatccaggccggggccaagctgagcctgaaccggcagttctttgatgagcgctggagcaagcaccgggtggtgtcctgcctggactggagcagccagtacccagagctgctggtggccagctacaacaacaatgaagatgcccctcatgagccagatggagtggccctggtgtggaacatgaagtacaagaagaccaccccagaatatgtgttccactgccagagcgctgtgatgtctgccacctttgccaagttccaccccaacctggtggtgggcggcacctacagcggccagatcgtgctgtgggacaacagaagcaacaagaggacccctgtgcagaggacccccctgtctgctgctgcccacacccaccctgtgtactgtgtgaatgtggtgggcacccagaatgcccacaacctgatcagcatcagcacagatggcaagatctgctcctggagcctggacatgctgagccacccccaggacagcatggagctggtgcacaagcagagcaaggctgtggccgtgacctccatgtccttccctgtgggagatgtgaacaactttgtggtgggcagcgaggagggctctgtgtacacagcctgccgccacggcagcaaggccggcatcagcgagatgtttgagggccaccagggccccatcaccggcatccactgccacgccgctgtgggcgctgtggacttcagccacctgtttgtgaccagcagctttgactggacagtgaagctgtggaccaccaagaacaacaagcccctgtacagctttgaagataatgctgactatgtgtatgatgtgatgtggagccccacccacccagccctgtttgcctgtgtggatggcatgggccgcctggacctgtggaacctgaacaatgacacagaggtgcccacagccagcatctctgtggagggcaacccagccctgaacagagtgcgctggacccacagcggccgggagattgctgtgggggacagcgagggccagatcgtcatctatgatgtgggggagattgctgtgcccagaaatgatgagtgggccaggtttggaagaaccctggccgagatcaatgccaacagagcagatgctgaggaggaggccgccacccgcatcccagcctag

SEQ ID NO: 150685 - DNA, 1917 bp, synthetic construct
  misc_feature 1..1917: note = Description of Artificial Sequence: Synthetic coding sequence
  source 1..1917: mol_type = other DNA
atgtctgacaagtctgagctgaaggccgagctggagaggaagaagcagaggctggcccagatccgggaggagaagaagaggaaggaggaggagaggaagaagaaggagacagaccagaagaaggaggccgtggcccctgtgcaggaggagagtgacctggagaagaagagaagagaggccgaggccctgctgcagagcatgggcctgaccccagagagccccattgatattgctgagtacctggtgcccccacccatgagccccagcagcaagtctgtgtccaccccatctgaggccggcagccaggacagcggagatggagctgtgggcagcaggaccctgcactgggacacagaccccagcgtgctgcagctgcacagcgacagcgacctgggccggggccccatcaagctgggcatggccaagatcacccaggtggacttccccccccgggagatcgtgacctacaccaaggagacccagacccctgtgatggcccagcccaaggaggatgaggaggaggatgatgatgtggtggcccccaagccacccatcgagcctgaggaggagaagaccctgaagaaggatgaggagaatgacagcaaggcccctcctcatgagctgacagaggaggagaagcagcagatcctgcacagcgaggagttcctgtccttctttgaccacagcacccgcatcgtggagcgggccctgtctgagcagatcaacatcttctttgactacagcggccgggacctggaggacaaggagggggagatccaggccggggccaagctgagcctgaaccggcagttctttgatgagcgctggagcaagcaccgggtggtgtcctgcctggactggagcagccagtacccagagctgctggtggccagctacaacaacaatgaagatgcccctcatgagccagatggagtggccctggtgtggaacatgaagtacaagaagaccaccccagaatatgtgttccactgccagagcgctgtgatgtctgccacctttgccaagttccaccccaacctggtggtgggcggcacctacagcggccagatcgtgctgtgggacaacagaagcaacaagaggacccctgtgcagaggacccccctgtctgctgctgcccacacccaccctgtgtactgtgtgaatgtggtgggcacccagaatgcccacaacctgatcagcatcagcacagatggcaagatctgctcctggagcctggacatgctgagccacccccaggacagcatggagctggtgcacaagcagagcaaggctgtggccgtgacctccatgtccttccctgtgggagatgtgaacaactttgtggtgggcagcgaggagggctctgtgtacacagcctgccgccacggcagcaaggccggcatcagcgagatgtttgagggccaccagggccccatcaccggcatccactgccacgccgctgtgggcgctgtggacttcagccacctgtttgtgaccagcagctttgactggacagtgaagctgtggaccaccaagaacaacaagcccctgtacagctttgaagataatgctgactatgtgtatgatgtgatgtggagccccacccacccagccctgtttgcctgtgtggatggcatgggccgcctggacctgtggaacctgaacaatgacacagaggtgcccacagccagcatctctgtggagggcaacccagccctgaacagagtgcgctggacccacagcggccgggagattgctgtgggggacagcgagggccagatcgtcatctatgatgtgggggagcagattgctgtgcccagaaatgatgagtgggcccgcttcggccgcaccctggccgagatcaatgccaacagagcagatgctgaggaggaggccgccacccgcatcccagcctag

SEQ ID NO: 150686 - DNA, 2763 bp, synthetic construct
  misc_feature 1..2763: note = Description of Artificial Sequence: Synthetic coding sequence
  source 1..2763: mol_type = other DNA
atggccaatggaacagcagatgtgaggaagctgttcatcttcaccaccacccagaactacttcggcctgatgtctgagctgtgggaccagcccctgctgtgcaactgcctggagatcaacaacttcctggatgatggcaaccagatgctgctgcgggtgcagaggagtgatgctggcatctccttcagcaacaccatcgagtttggagacaccaaggacaaggtgctggtgttcttcaagctgcggcctgaggtgatcacagatgagaacctgcatgacaacatcctggtgtcctccatgctggagagccccatcagcagcctgtaccaggccgtgcggcaggtgtttgcccccatgctgctgaaggaccaggagtggagcaggaactttgaccccaagctgcagaacctgctgtctgagctggaggccggcctgggcatcgtgctgcggcggagtgacaccaacctgaccaagctgaagttcaaggaggatgacacccggggcatcctgacccccagtgatgagttccagttctggattgagcaggcccaccggggcaacaagcagatcagcaaggagcgggccaactacttcaaggagctgtttgagaccatcgcccgggagttctacaacctggacagcctgagcctgctggaggtggtggacctggtggagaccacccaggatgtggtggatgatgtgtggaggcagacagaacatgaccactacccagagagcaggatgctgcacctgctggacatcattggaggcagctttggccgctttgtgcagaagaagctgggcaccctgaacctgtgggaggacccctactacctggtgaaggagagcctgaaggccggcatcagcatctgtgagcagtgggtgattgtgtgcaaccacctgaccggccaggtgtggcagagatatgtgccccacccctggaagaatgagaagtacttccctgagaccctggacaagctgggcaagaggctggaggaggtgctggccatccgcaccatccacgagaagttcctgtacttcctgcctgccagcgaggagaagatcatctgcctgaccagggtgtttgagcccttcaccggcctgaaccctgtgcagtacaacccctacacagagcccctgtggaaggctgctgtgtcccagtatgagaagatcatcgccccagctgagcagaagattgctgggaagctgaagaactacatcagcgagatccaggacagcccccagcagctgctgcaggccttcctgaagtacaaggagctggtgaagaggcccaccatcagcaaggagctgatgctggagcgggagaccctgctggcccggctggtggacagcatcaaggacttccggctggactttgagaaccgctgccggggcatccctggagatgccagcggccccctgagcggcaagaacctgtctgaggtggtgaacagcatcgtgtgggtgcggcagctggagctgaaggtggatgacaccatcaagattgctgaggccctgctgagtgacctgcccggcttccgctgcttccaccagagcgccaaggacctgctggaccagctgaagctgtatgagcaggagcagtttgatgactggagccgggacatccagagcggcctgagtgacagccgcagcggcctgtgcatcgaggccagcagccgcatcatggagctggacagcaatgatggcctgctgaaggtgcactacagcgaccggctggtgatcctgctgcgggaggtgcggcagctgagcgccctgggcttcgtcatcccagccaagatccagcaggtggccaacatcgcccagaagttctgcaagcaggccatcatcctgaagcaggtggcccacttctacaacagcattgaccagcagatgatccagagccagaggcccatgatgctgcagagcgccctggcctttgagcagatcatcaagaacagcaaggccggcagcggcggcaagagccagatcacctgggacaaccccaaggagctggagggctacatccagaagctgcagaatgctgctgagcggctggccacagagaacaggaagctgaggaagtggcacaccaccttctgtgagaaggtggtggtgctgatgaacatcgacctgctgcggcagcagcagcgctggaaggatggcctgcaggagctgaggacaggcctggccaccgtggaggcccagtgccccctggcctggcagagcaagtgggagggccctgaggaccccctgcagtacctgcggggcctggtggcccgggccctggccatccagaactgggtggacaaggccgagaagcaggccctgctgtctgagaccctggacctgtctgagctgttccacccagacaccttcctgaatgccctgcggcaggagacagcccgggctgtgggccgctctgtggacagcctgaagtttgtggcctcctggaagggccgcctgcaggaggccaagctgcagatcaagatcagcggcctgctgctggagggctgcagctttgatggcaaccagctgtctgagaaccagctggacagccccagcgtgtcctctgtgctgccctgcttcatgggctggatcccccaggatgcctgtggcccctacagcccagatgagtgcatcagcctgcctgtgtacaccagcgctgagcgggacagagtggtgaccaacattgatgtgccctgtggcggcaaccaggaccagtggatccagtgtggggccgccctcttcctgaagaaccagtag

SEQ ID NO: 150687 - DNA, 12924 bp, synthetic construct
  misc_feature 1..12924: note = Description of Artificial Sequence: Synthetic coding sequence
  source 1..12924: mol_type = other DNA
atggccaatggaacagcagatgtgaggaagctgttcatcttcaccaccacccagaactacttcggcctgatgtctgagctgtgggaccagcccctgctgtgcaactgcctggagatcaacaacttcctggatgatggcaaccagatgctgctgcgggtgcagaggagtgatgctggcatctccttcagcaacaccatcgagtttggagacaccaaggacaaggtgctggtgttcttcaagctgcggcctgaggtgatcacagatgagaacctgcatgacaacatcctggtgtcctccatgctggagagccccatcagcagcctgtaccaggccgtgcggcaggtgtttgcccccatgctgctgaaggaccaggagtggagcaggaactttgaccccaagctgcagaacctgctgtctgagctggaggccggcctgggcatcgtgctgcggcggagtgacaccaacctgaccaagctgaagttcaaggaggatgacacccggggcatcctgacccccagtgatgagttccagttctggattgagcaggcccaccggggcaacaagcagatcagcaaggagcgggccaactacttcaaggagctgtttgagaccatcgcccgggagttctacaacctggacagcctgagcctgctggaggtggtggacctggtggagaccacccaggatgtggtggatgatgtgtggaggcagacagaacatgaccactacccagagagcaggatgctgcacctgctggacatcattggaggcagctttggccgctttgtgcagaagaagctgggcaccctgaacctgtgggaggacccctactacctggtgaaggagagcctgaaggccggcatcagcatctgtgagcagtgggtgattgtgtgcaaccacctgaccggccaggtgtggcagagatatgtgccccacccctggaagaatgagaagtacttccctgagaccctggacaagctgggcaagaggctggaggaggtgctggccatccgcaccatccacgagaagttcctgtacttcctgcctgccagcgaggagaagatcatctgcctgaccagggtgtttgagcccttcaccggcctgaaccctgtgcagtacaacccctacacagagcccctgtggaaggctgctgtgtcccagtatgagaagatcatcgccccagctgagcagaagattgctgggaagctgaagaactacatcagcgagatccaggacagcccccagcagctgctgcaggccttcctgaagtacaaggagctggtgaagaggcccaccatcagcaaggagctgatgctggagcgggagaccctgctggcccggctggtggacagcatcaaggacttccggctggactttgagaaccgctgccggggcatccctggagatgccagcggccccctgagcggcaagaacctgtctgaggtggtgaacagcatcgtgtgggtgcggcagctggagctgaaggtggatgacaccatcaagattgctgaggccctgctgagtgacctgcccggcttccgctgcttccaccagagcgccaaggacctgctggaccagctgaagctgtatgagcaggagcagtttgatgactggagccgggacatccagagcggcctgagtgacagccgcagcggcctgtgcatcgaggccagcagccgcatcatggagctggacagcaatgatggcctgctgaaggtgcactacagcgaccggctggtgatcctgctgcgggaggtgcggcagctgagcgccctgggcttcgtcatcccagccaagatccagcaggtggccaacatcgcccagaagttctgcaagcaggccatcatcctgaagcaggtggcccacttctacaacagcattgaccagcagatgatccagagccagaggcccatgatgctgcagagcgccctggcctttgagcagatcatcaagaacagcaaggccggcagcggcggcaagagccagatcacctgggacaaccccaaggagctggagggctacatccagaagctgcagaatgctgctgagcggctggccacagagaacaggaagctgaggaagtggcacaccaccttctgtgagaaggtggtggtgctgatgaacatcgacctgctgcggcagcagcagcgctggaaggatggcctgcaggagctgaggacaggcctggccaccgtggaggcccagggcttccaggccagtgacatgcacgcctggaagcagcactggaaccaccagctgtacaaggccctggagcaccagtaccagatgggcctggaggccctgaatgaaaacctgcctgagatcaacatcgacctgacctacaagcagggccgcctgcagttccggcccccatttgaggagatccgggccaagtactaccgggagatgaagcgcttcatcggcatccccaaccagttcaagggcgtgggggaggccggagatgagagcatcttcagcatcatgattgacagaaatgccagcggcttcctgaccatcttcagcaaggccgaggacctcttccggcggctgtctgctgtgctgcaccagcacaaggagtggatcgtgattggccaggtggacatggaggccctggtggagaagcacctgttcaccgtgcatgactgggagaagaacttcaaggccctgaagatcaagggcaaggaggtggagcggctgcccagcgctgtgaaggtggactgcctgaacatcaactgcaaccctgtgaagacagtgattgatgacctgatccagaagctgtttgacctgctggtgctgagcctgaagaagagcatccaggcccacctgcatgaaattgacacctttgtgacagaggccatggaggtgctgaccatcatgccccagagcgtggaggagattggagatgccaacctgcagtacagcaagctgcaggagaggaagccagagatcctgcccctcttccaggaggccgaggacaagaaccggctgctgaggacagtggccggcggcggcctggagaccatcagcaacctgaaggccaagtgggacaagtttgagctgatgatggagagccaccagctgatgatcaaggaccagatcgaggtgatgaagggaaatgtgaagagccggctgcagatctactaccaggagctggagaagttcaaggcccgctgggaccagctgaagccaggagatgatgtgattgagaccggccagcacaacaccctggacaagagcgccaagctgatcaaggagaagaagattgaatttgatgacctggaggtgaccaggaagaagctggtggatgactgccaccacttccggctggaggagcccaacttcagcctggccagcagcatcagcaaggacatcgagagctgtgcccagatctgggccttctatgaggagttccagcagggcttccaggagatggccaatgaagactggatcaccttccgcaccaagacctacctgtttgaggagttcctgatgaactggcatgaccggctgaggaaggtggaggagcacagcgtgatgacagtgaagctgcagagcgaggtggacaagtacaagatcgtcatccccatcctgaagtatgtgcggggggagcacctgagcccagaccactggctggacctcttccggctgctgggcctgccccggggcaccagcctggagaagctgctgtttggagacctgctgcgggtggccgacaccatcgtggccaaggctgctgacctgaaggacctgaacagccgggcccagggcgaggtgaccatccgggaggccctgcgggagctggacctgtggggcgtgggcgctgtgttcaccctgattgattatgaggacagccagagcaggaccatgaagctgatcaaggactggaaggacatcgtgaaccaggtgggggacaaccgctgcctgctgcagagcctgaaggacagcccctactacaagggctttgaggacaaggtgtccatctgggagaggaagctggccgagctggatgagtacctgcagaacctgaaccacatccagaggaagtgggtgtacctggagcccatcttcggccgcggggccctgcccaaggagcagacccgcttcaacagagtggatgaggacttccgcagcatcatgacagacatcaagaaggacaacagagtgaccaccctgaccacccatgctggcatccggaacagcctgctgaccatcctggaccagctgcagcgctgccagaagagcctgaatgagttcctggaggagaagaggtctgccttcccccgcttctacttcatcggagatgatgacctgctggagatcctgggccagagcaccaaccccagcgtcatccagagccacctgaagaagctgtttgctggcatcaacagcgtgtgctttgatgagaagagcaagcacatcacagccatgaagagcctggagggggaggtggtgcccttcaagaacaaggtgcccctgagcaacaacgtggagacctggctgaatgacctggccctggagatgaagaagaccctggagcagctgctgaaggaatgtgtgaccaccggccgcagcagccagggcgctgtggaccccagcctcttccccagccagatcctgtgcctggccgagcagatcaagttcacagaagatgtggagaatgccatcaaggaccacagcctgcaccagatcgagacccagctggtgaacaagctggagcagtacaccaacatcgacaccagcagcgaggaccccggcaacacagaaagtggcatcctggagctgaagctgaaggccctgatcctggacatcatccacaacattgatgtggtgaagcagctgaaccagatccaggtgcacaccacagaggactgggcctggaagaagcagctgcgcttctacatgaagagtgaccacacctgctgcgtgcagatggtggacagcgagttccagtacacctatgagtaccagggcaatgccagcaagctggtgtacacccccctgacagacaagtgctacctgaccctgacccaggccatgaagatgggcctgggcggcaacccctacggccctgctggcaccgggaagacagagagcgtgaaggccctgggcggcctgctgggccggcaggtgctggtgttcaactgtgatgagggcattgatgtgaagtccatgggccgcatctttgtgggcctggtgaagtgtggggcctggggctgctttgatgagttcaaccggctggaggagagcgtgctgtctgctgtgtccatgcagatccagaccatccaggatgccctgaagaaccacaggacagtgtgtgagctgctgggcaaggaggtggaggtgaacagcaacagcggcatcttcatcaccatgaacccagctgggaagggctacggcggccggcagaagctgcctgacaacctgaagcagctgttccggcctgtggccatgagccacccagacaatgagctgattgctgaggtgatcctgtacagcgagggcttcaaggatgccaaggtgctgagcaggaagctggtggccatcttcaacctgagccgggagctgctgaccccccagcagcactatgactggggcctgcgggccctgaagacagtgctgcggggcagcggcaacctgctgcggcagctgaacaagagcggcaccacccagaatgccaatgaaagccacatcgtggtgcaggccctgcggctgaacaccatgagcaagttcaccttcacagactgcaccaggtttgatgccctgatcaaggatgtgtttcctggcatcgagctgaaggaggtggagtatgatgagctgtctgctgccctgaagcaggtgtttgaggaggccaactatgagatcatccccaaccagatcaagaaggccctggagctgtatgagcagctgtgccagaggatgggcgtggtgattgtgggccccagcggggccggcaagagcaccctgtggaggatgctgcgggccgccctgtgcaagacaggcaaggtggtgaagcagtacaccatgaaccccaaggccatgccccgctaccagctgctgggccacatcgacatggacacccgggagtggagcgatggagtgctgaccaacagcgcccggcaggtggtgcgggagccccaggatgtgtcctcctggatcatctgtgatggagacatcgaccctgagtggattgagagcctgaacagcgtgctggatgacaaccggctgctgaccatgcccagcggggagcgcatccagtttggccccaacgtgaactttgtgtttgagacccatgacctgagctgtgccagccctgccaccatcagcaggatgggcatgatcttcctgagtgatgaggagacagacctgaacagcctcatcaagtcctggctgaggaaccagcctgctgagtacagaaacaacctggagaactggattggagactactttgagaaggccctgcagtgggtgctgaagcagaatgactatgtggtggagaccagcctggtgggcaccgtgatgaatggcctgagccacctgcacggctgccgggaccatgatgagttcatcatcaacctgatccggggcctgggcggcaacctgaacatgaagagccggctggagttcaccaaggaggtgttccactgggcccgggagagccccccagacttccacaagcccatggacacctactatgacagcacccggggccgcctggccacctacgtgctgaagaagccagaggacctgacagcagatgacttcagcaatggcctgaccctgcctgtgatccagaccccagacatgcagaggggcctggactacttcaagccctggctgagcagtgacaccaagcagcccttcatcctggtgggccctgagggctgtgggaagggcatgctgctgcgctatgccttcagccagctgcggagcacccagatcgccaccgtgcactgcagcgcccagaccaccagccgccacctgctgcagaagctgagccagacctgcatggtgatcagcaccaacacaggccgggtgtaccggcccaaggactgtgagcggctggtgctgtacctgaaggacatcaacctgcccaagctggacaagtggggcaccagcaccctggtggccttcctgcagcaggtgctgacctaccagggcttctatgatgagaacctggagtgggtgggcctggagaacatccagatcgtggcctccatgtctgctgggggccgcctgggccgccacaagctgaccacccgcttcaccagcatcgtgcggctgtgcagcattgactacccagagcgggagcagctgcagaccatctacggggcctacctggagcctgtgctgcacaagaacctgaagaaccacagcatctggggcagcagcagcaagatctacctgctggccggctccatggtgcaggtgtatgagcaggtgcgggccaagttcaccgtggatgactacagccactacttcttcaccccctgcatcctgacccagtgggtgctgggcctcttccgctatgacctggagggcggcagcagcaaccaccccctggactatgtgctggagatcgtggcctatgaggcccggcggctcttccgggacaagatcgtgggcgccaaggagctgcacctgtttgacatcatcctgaccagcgtcttccagggcgactggggcagtgacatcctggacaacatgtctgacagcttctacgtgacctggggcgcccggcacaacagcggggcccgggccgcccctggccagcccctgccccctcatggcaagcccctgggcaagctgaacagcacagacctgaaggatgtgatcaagaagggcctcatccactacggccgggacaaccagaacctggacatcctgctcttccacgaggtgctggagtacatgagcagaattgacagagtgctgtccttccctgggggcagcctgctgctggccggccgctctggagtgggccgccgcaccatcaccagcctggtgagccacatgcacggggctgtgctcttcagccccaagatcagccggggctatgagctgaagcagttcaagaatgacctgaagcacgtgctgcagctggccggcatcgaggcccagcaggtggtgctgctgctggaggactaccagtttgtgcaccccaccttcctggagatgatcaacagcctgctgagcagcggggaggtgcccggcctgtacaccctggaggagctggagcccctgctgctgcccctgaaggaccaggccagccaggacggcttctttggacctgtgttcaactacttcacctaccgcatccagcagaacctgcacatcgtgctgatcatggacagcgccaacagcaacttcatgatcaactgtgagagcaacccagccctgcacaagaagtgccaggtgctgtggatggagggctggagcaacagctccatgaagaagatccctgagatgctgttcagcgagactggaggaggagagaagtacaatgacaagaagaggaaggaggagaagaagaagaacagcgtggaccctgacttcctgaagagcttcctgctgattcatgagagctgcaaggcctatggagccacccccagccgctacatgaccttcctgcacgtgtacagcgccatcagcagcagcaagaagaaggagctgctgaagaggcagagccacctgcaggccggcgtgtccaagctgaatgaggccaaggccctggtggatgagctgaacaggaaggccggggagcagagcgtgctgctgaagaccaagcaggatgaagcagatgctgccctgcagatgatcaccgtgtccatgcaggatgccagcgagcagaagacagagctggagcggctgaagcacagaattgctgaggaggtggtgaagattgaggagaggaagaacaagattgatgatgagctgaaggaggtgcagcccctggtgaatgaggccaagctggccgtgggcaacatcaagccagagagcctgtctgagatccgcagcctgaggatgcccccagatgtgatccgggacatcctggagggcgtgctgcggctgatgggcatctttgacacctcctgggtgtccatgaagagcttcctggccaagaggggcgtgagagaagatattgccacctttgatgccaggaacatcagcaaggagatccgggagagcgtggaggagctgctcttcaagaacaagggcagctttgaccccaagaatgccaagagggccagcacagctgctgcccccctggccgcctgggtgaaggccaacatccagtacagccacgtgctggagcgcatccaccccctggagacagagcaggccggcctggagagcaacctgaagaagacagaggacaggaagaggaagctggaggagctgctgaacagcgtgggccagaaggtgtctgagctgaaggagaagttccagagcaggaccagcgaggccgccaagctggaggccgaggtgtccaaggcccaggagaccatcaaggctgctgaggtgctgatcaaccagctggaccgggagcacaagcgctggaatgcccaggtggtggagatcacagaggagctggccaccctgcccaagagggcccagctggccgccgccttcatcacctacctgtctgctgcccctgagagcctgaggaagacctgcctggaggagtggaccaagtctgctggcctggagaagtttgacctgcggcgcttcctgtgcacagagagcgagcagctgatctggaagtctgagggcctgcccagtgatgacctgagcattgaaaatgccctggtgatcctgcagagccgggtgtgccccttcctgattgaccccagcagccaggccacagagtggctgaagacccacctgaaggacagccggctggaggtgatcaaccagcaggacagcaacttcatcacagccctggagctggccgtgcgctttgggaagaccctcatcatccaggagatggatggagtggagcctgtgctgtaccccctgctgcggcgggacctggtggcccagggccccaggtatgtggtgcagattggagacaagatcatcgactacaatgaggagttccgcctcttcctgagcaccaggaaccccaaccccttcatccccccagatgctgccagcatcgtgacagaggtgaacttcaccaccaccaggagcggcctgcggggccagctgctggccctgaccatccagcacgagaagccagacctggaggagcagaagaccaagctgctgcagcaggaggaggacaagaagatccagctggccaagctggaggagagcctgctggagaccctggccaccagccagggcaacatcctggagaacaaggacctgattgagagcctgaaccagaccaaggccagcagcgccctgatccaggagagcctgaaggagagctacaagctgcagatcagcctggaccaggagagagatgcctacctgcccctggccgagagcgccagcaagatgtacttcatcatcagtgacctgagcaagatcaacaacatgtaccgcttcagcctggccgccttcctgcggctcttccagagggccctgcagaacaagcaggacagcgagaacacagagcagaggatccagagcctcatcagcagcctgcagcacatggtgtatgagtacatctgccgctgcctcttcaaggctgaccagctgatgtttgccctgcactttgtgcggggcatgcaccctgagctgttccaggagaatgagtgggacaccttcaccggggtggtggtgggggacatgctgaggaaggctgacagccagcagaagatccgggaccagctgcccagctggattgaccaggagaggtcctgggccgtggccaccctgaagatcgccctgcccagcctgtaccagaccctgtgctttgaagatgctgccctgtggaggacctactacaacaacagcatgtgtgagcaggagttccccagcatcctggccaagaaggtgtccctcttccagcagatcctggtggtgcaggccctgcggccagaccggctgcagagcgccatggccctgtttgcctgcaagaccctgggcctgaaggaggtgagccccctgcccctgaacctgaagaggctgtacaaggagaccctggagattgagcccatcctgatcatcatcagccctggagctgaccccagccaggagctgcaggagctggccaatgctgagaggtctggagagtgctaccaccaggtggccatgggccagggccaggccgacctggccatccagatgctgaaggaatgtgccagaaatggagactggctgtgcctgaagaacctgcacctggtggtgtcctggctgcctgtgctggagaaggagctgaacaccctgcagcccaaggacaccttccggctgtggctgacagctgaggtgcaccccaacttcacccccatcctgctgcagagcagcctgaagatcacctatgagagccccccaggcctgaagaagaacctgatgaggacctatgagagctggaccccagagcagatcagcaagaaggacaacacccaccgggcccacgccctcttcagcctggcctggttccacgccgcctgccaggagaggaggaactacatcccccagggctggaccaagttctatgagttcagcctgagtgacctgcgggccggctacaacatcatcgaccggctgtttgatggagccaaggatgtgcagtgggagtttgtgcacggcctgctggagaatgccatctatggaggaagaattgacaactactttgacctgcgggtgctgcagagctacctgaagcagttcttcaacagctctgtgattgatgtgttcaaccagaggaacaagaagagcatcttcccctacagcgtgtccctgccccagagctgcagcatcctggactaccgggccgtcatcgagaagatcccagaagatgacaagcccagcttcttcggcctgcctgccaacatcgcccggagcagccagaggatgatcagcagccaggtgatcagccagctgcgcatcctgggccgcagcatcacagctggcagcaagtttgaccgggagatctggagcaatgagctgagccctgtgctgaacctgtggaagaagctgaaccagaacagcaacctgatccaccagaaggtgcccccaccaaatgaccggcagggcagccccatcctgtccttcatcatcctggagcagttcaatgccatccggctggtgcagagcgtgcaccagagcctggccgccctgagcaaggtgatccggggcaccaccctgctgagcagcgaggtgcagaagctggccagcgccctgctgaaccagaagtgccccctggcctggcagagcaagtgggagggccctgaggaccccctgcagtacctgcggggcctggtggcccgggccctggccatccagaactgggtggacaaggccgagaagcaggccctgctgtctgagaccctggacctgtctgagctgttccacccagacaccttcctgaatgccctgcggcaggagacagcccgggctgtgggccgctctgtggacagcctgaagtttgtggcctcctggaagggccgcctgcaggaggccaagctgcagatcaagatcagcggcctgctgctggagggctgcagctttgatggcaaccagctgtctgagaaccagctggacagccccagcgtgtcctctgtgctgccctgcttcatgggctggatcccccaggatgcctgtggcccctacagcccagatgagtgcatcagcctgcctgtgtacaccagcgctgagcgggacagagtggtgaccaacattgatgtgccctgtggcggcaaccaggaccagtggatccagtgtggggccgccctcttcctgaagaaccagtag

SEQ ID NO: 150688 - DNA, 12945 bp, synthetic construct
  misc_feature 1..12945: note = Description of Artificial Sequence: Synthetic coding sequence
  source 1..12945: mol_type = other DNA
atggccaatggaacagcagatgtgaggaagctgttcatcttcaccaccacccagaactacttcggcctgatgtctgagctgtgggaccagcccctgctgtgcaactgcctggagatcaacaacttcctggatgatggcaaccagatgctgctgcgggtgcagaggagtgatgctggcatctccttcagcaacaccatcgagtttggagacaccaaggacaaggtgctggtgttcttcaagctgcggcctgaggtgatcacagatgagaacctgcatgacaacatcctggtgtcctccatgctggagagccccatcagcagcctgtaccaggccgtgcggcaggtgtttgcccccatgctgctgaaggaccaggagtggagcaggaactttgaccccaagctgcagaacctgctgtctgagctggaggccggcctgggcatcgtgctgcggcggagtgacaccaacctgaccaagctgaagttcaaggaggatgacacccggggcatcctgacccccagtgatgagttccagttctggattgagcaggcccaccggggcaacaagcagatcagcaaggagcgggccaactacttcaaggagctgtttgagaccatcgcccgggagttctacaacctggacagcctgagcctgctggaggtggtggacctggtggagaccacccaggatgtggtggatgatgtgtggaggcagacagaacatgaccactacccagagagcaggatgctgcacctgctggacatcattggaggcagctttggccgctttgtgcagaagaagctgggcaccctgaacctgtgggaggacccctactacctggtgaaggagagcctgaaggccggcatcagcatctgtgagcagtgggtgattgtgtgcaaccacctgaccggccaggtgtggcagagatatgtgccccacccctggaagaatgagaagtacttccctgagaccctggacaagctgggcaagaggctggaggaggtgctggccatccgcaccatccacgagaagttcctgtacttcctgcctgccagcgaggagaagatcatctgcctgaccagggtgtttgagcccttcaccggcctgaaccctgtgcagtacaacccctacacagagcccctgtggaaggctgctgtgtcccagtatgagaagatcatcgccccagctgagcagaagattgctgggaagctgaagaactacatcagcgagatccaggacagcccccagcagctgctgcaggccttcctgaagtacaaggagctggtgaagaggcccaccatcagcaaggagctgatgctggagcgggagaccctgctggcccggctggtggacagcatcaaggacttccggctggactttgagaaccgctgccggggcatccctggagatgccagcggccccctgagcggcaagaacctgtctgaggtggtgaacagcatcgtgtgggtgcggcagctggagctgaaggtggatgacaccatcaagattgctgaggccctgctgagtgacctgcccggcttccgctgcttccaccagagcgccaaggacctgctggaccagctgaagctgtatgagcaggagcagtttgatgactggagccgggacatccagagcggcctgagtgacagccgcagcggcctgtgcatcgaggccagcagccgcatcatggagctggacagcaatgatggcctgctgaaggtgcactacagcgaccggctggtgatcctgctgcgggaggtgcggcagctgagcgccctgggcttcgtcatcccagccaagatccagcaggtggccaacatcgcccagaagttctgcaagcaggccatcatcctgaagcaggtggcccacttctacaacagcattgaccagcagatgatccagagccagaggcccatgatgctgcagagcgccctggcctttgagcagatcatcaagaacagcaaggccggcagcggcggcaagagccagatcacctgggacaaccccaaggagctggagggctacatccagaagctgcagaatgctgctgagcggctggccacagagaacaggaagctgaggaagtggcacaccaccttctgtgagaaggtggtggtgctgatgaacatcgacctgctgcggcagcagcagcgctggaaggatggcctgcaggagctgaggacaggcctggccaccgtggaggcccagggcttccaggccagtgacatgcacgcctggaagcagcactggaaccaccagctgtacaaggccctggagcaccagtaccagatgggcctggaggccctgaatgaaaacctgcctgagatcaacatcgacctgacctacaagcagggccgcctgcagttccggcccccatttgaggagatccgggccaagtactaccgggagatgaagcgcttcatcggcatccccaaccagttcaagggcgtgggggaggccggagatgagagcatcttcagcatcatgattgacagaaatgccagcggcttcctgaccatcttcagcaaggccgaggacctcttccggcggctgtctgctgtgctgcaccagcacaaggagtggatcgtgattggccaggtggacatggaggccctggtggagaagcacctgttcaccgtgcatgactgggagaagaacttcaaggccctgaagatcaagggcaaggaggtggagcggctgcccagcgctgtgaaggtggactgcctgaacatcaactgcaaccctgtgaagacagtgattgatgacctgatccagaagctgtttgacctgctggtgctgagcctgaagaagagcatccaggcccacctgcatgaaattgacacctttgtgacagaggccatggaggtgctgaccatcatgccccagagcgtggaggagattggagatgccaacctgcagtacagcaagctgcaggagaggaagccagagatcctgcccctcttccaggaggccgaggacaagaaccggctgctgaggacagtggccggcggcggcctggagaccatcagcaacctgaaggccaagtgggacaagtttgagctgatgatggagagccaccagctgatgatcaaggaccagatcgaggtgatgaagggaaatgtgaagagccggctgcagatctactaccaggagctggagaagttcaaggcccgctgggaccagctgaagccaggagatgatgtgattgagaccggccagcacaacaccctggacaagagcgccaagctgatcaaggagaagaagattgaatttgatgacctggaggtgaccaggaagaagctggtggatgactgccaccacttccggctggaggagcccaacttcagcctggccagcagcatcagcaaggacatcgagagctgtgcccagatctgggccttctatgaggagttccagcagggcttccaggagatggccaatgaagactggatcaccttccgcaccaagacctacctgtttgaggagttcctgatgaactggcatgaccggctgaggaaggtggaggagcacagcgtgatgacagtgaagctgcagagcgaggtggacaagtacaagatcgtcatccccatcctgaagtatgtgcggggggagcacctgagcccagaccactggctggacctcttccggctgctgggcctgccccggggcaccagcctggagaagctgctgtttggagacctgctgcgggtggccgacaccatcgtggccaaggctgctgacctgaaggacctgaacagccgggcccagggcgaggtgaccatccgggaggccctgcgggagctggacctgtggggcgtgggcgctgtgttcaccctgattgattatgaggacagccagagcaggaccatgaagctgatcaaggactggaaggacatcgtgaaccaggtgggggacaaccgctgcctgctgcagagcctgaaggacagcccctactacaagggctttgaggacaaggtgtccatctgggagaggaagctggccgagctggatgagtacctgcagaacctgaaccacatccagaggaagtgggtgtacctggagcccatcttcggccgcggggccctgcccaaggagcagacccgcttcaacagagtggatgaggacttccgcagcatcatgacagacatcaagaaggacaacagagtgaccaccctgaccacccatgctggcatccggaacagcctgctgaccatcctggaccagctgcagcgctgccagaagagcctgaatgagttcctggaggagaagaggtctgccttcccccgcttctacttcatcggagatgatgacctgctggagatcctgggccagagcaccaaccccagcgtcatccagagccacctgaagaagctgtttgctggcatcaacagcgtgtgctttgatgagaagagcaagcacatcacagccatgaagagcctggagggggaggtggtgcccttcaagaacaaggtgcccctgagcaacaacgtggagacctggctgaatgacctggccctggagatgaagaagaccctggagcagctgctgaaggaatgtgtgaccaccggccgcagcagccagggcgctgtggaccccagcctcttccccagccagatcctgtgcctggccgagcagatcaagttcacagaagatgtggagaatgccatcaaggaccacagcctgcaccagatcgagacccagctggtgaacaagctggagcagtacaccaacatcgacaccagcagcgaggaccccggcaacacagaaagtggcatcctggagctgaagctgaaggccctgatcctggacatcatccacaacattgatgtggtgaagcagctgaaccagatccaggtgcacaccacagaggactgggcctggaagaagcagctgcgcttctacatgaagagtgaccacacctgctgcgtgcagatggtggacagcgagttccagtacacctatgagtaccagggcaatgccagcaagctggtgtacacccccctgacagacaagtgctacctgaccctgacccaggccatgaagatgggcctgggcggcaacccctacggccctgctggcaccgggaagacagagagcgtgaaggccctgggcggcctgctgggccggcaggtgctggtgttcaactgtgatgagggcattgatgtgaagtccatgggccgcatctttgtgggcctggtgaagtgtggggcctggggctgctttgatgagttcaaccggctggaggagagcgtgctgtctgctgtgtccatgcagatccagaccatccaggatgccctgaagaaccacaggacagtgtgtgagctgctgggcaaggaggtggaggtgaacagcaacagcggcatcttcatcaccatgaacccagctgggaagggctacggcggccggcagaagctgcctgacaacctgaagcagctgttccggcctgtggccatgagccacccagacaatgagctgattgctgaggtgatcctgtacagcgagggcttcaaggatgccaaggtgctgagcaggaagctggtggccatcttcaacctgagccgggagctgctgaccccccagcagcactatgactggggcctgcgggccctgaagacagtgctgcggggcagcggcaacctgctgcggcagctgaacaagagcggcaccacccagaatgccaatgaaagccacatcgtggtgcaggccctgcggctgaacaccatgagcaagttcaccttcacagactgcaccaggtttgatgccctgatcaaggatgtgtttcctggcatcgagctgaaggaggtggagtatgatgagctgtctgctgccctgaagcaggtgtttgaggaggccaactatgagatcatccccaaccagatcaagaaggccctggagctgtatgagcagctgtgccagaggatgggcgtggtgattgtgggccccagcggggccggcaagagcaccctgtggaggatgctgcgggccgccctgtgcaagacaggcaaggtggtgaagcagtacaccatgaaccccaaggccatgccccgctaccagctgctgggccacatcgacatggacacccgggagtggagcgatggagtgctgaccaacagcgcccggcaggtggtgcgggagccccaggatgtgtcctcctggatcatctgtgatggagacatcgaccctgagtggattgagagcctgaacagcgtgctggatgacaaccggctgctgaccatgcccagcggggagcgcatccagtttggccccaacgtgaactttgtgtttgagacccatgacctgagctgtgccagccctgccaccatcagcaggatgggcatgatcttcctgagtgatgaggagacagacctgaacagcctcatcaagtcctggctgaggaaccagcctgctgagtacagaaacaacctggagaactggattggagactactttgagaaggccctgcagtgggtgctgaagcagaatgactatgtggtggagaccagcctggtgggcaccgtgatgaatggcctgagccacctgcacggctgccgggaccatgatgagttcatcatcaacctgatccggggcctgggcggcaacctgaacatgaagagccggctggagttcaccaaggaggtgttccactgggcccgggagagccccccagacttccacaagcccatggacacctactatgacagcacccggggccgcctggccacctacgtgctgaagaagccagaggacctgacagcagatgacttcagcaatggcctgaccctgcctgtgatccagaccccagacatgcagaggggcctggactacttcaagccctggctgagcagtgacaccaagcagcccttcatcctggtgggccctgagggctgtgggaagggcatgctgctgcgctatgccttcagccagctgcggagcacccagatcgccaccgtgcactgcagcgcccagaccaccagccgccacctgctgcagaagctgagccagacctgcatggtgatcagcaccaacacaggccgggtgtaccggcccaaggactgtgagcggctggtgctgtacctgaaggacatcaacctgcccaagctggacaagtggggcaccagcaccctggtggccttcctgcagcaggtgctgacctaccagggcttctatgatgagaacctggagtgggtgggcctggagaacatccagatcgtggcctccatgtctgctgggggccgcctgggccgccacaagctgaccacccgcttcaccagcatcgtgcggctgtgcagcattgactacccagagcgggagcagctgcagaccatctacggggcctacctggagcctgtgctgcacaagaacctgaagaaccacagcatctggggcagcagcagcaagatctacctgctggccggctccatggtgcaggtgtatgagcaggtgcgggccaagttcaccgtggatgactacagccactacttcttcaccccctgcatcctgacccagtgggtgctgggcctcttccgctatgacctggagggcggcagcagcaaccaccccctggactatgtgctggagatcgtggcctatgaggcccggcggctcttccgggacaagatcgtgggcgccaaggagctgcacctgtttgacatcatcctgaccagcgtcttccagggcgactggggcagtgacatcctggacaacatgtctgacagcttctacgtgacctggggcgcccggcacaacagcggggcccgggccgcccctggccagcccctgccccctcatggcaagcccctgggcaagctgaacagcacagacctgaaggatgtgatcaagaagggcctcatccactacggccgggacaaccagaacctggacatcctgctcttccacgaggtgctggagtacatgagcagaattgacagagtgctgtccttccctgggggcagcctgctgctggccggccgctctggagtgggccgccgcaccatcaccagcctggtgagccacatgcacggggctgtgctcttcagccccaagatcagccggggctatgagctgaagcagttcaagaatgacctgaagcacgtgctgcagctggccggcatcgaggcccagcaggtggtgctgctgctggaggactaccagtttgtgcaccccaccttcctggagatgatcaacagcctgctgagcagcggggaggtgcccggcctgtacaccctggaggagctggagcccctgctgctgcccctgaaggaccaggccagccaggacggcttctttggacctgtgttcaactacttcacctaccgcatccagcagaacctgcacatcgtgctgatcatggacagcgccaacagcaacttcatgatcaactgtgagagcaacccagccctgcacaagaagtgccaggtgctgtggatggagggctggagcaacagctccatgaagaagatccctgagatgctgttcagcgagactggaggaggagagaagtacaatgacaagaagaggaaggaggagaagaagaagaacagcgtggaccctgacttcctgaagagcttcctgctgattcatgagagctgcaaggcctatggagccacccccagccgctacatgaccttcctgcacgtgtacagcgccatcagcagcagcaagaagaaggagctgctgaagaggcagagccacctgcaggccggcgtgtccaagctgaatgaggccaaggccctggtggatgagctgaacaggaaggccggggagcagagcgtgctgctgaagaccaagcaggatgaagcagatgctgccctgcagatgatcaccgtgtccatgcaggatgccagcgagcagaagacagagctggagcggctgaagcacagaattgctgaggaggtggtgaagattgaggagaggaagaacaagattgatgatgagctgaaggaggtgcagcccctggtgaatgaggccaagctggccgtgggcaacatcaagccagagagcctgtctgagatccgcagcctgaggatgcccccagatgtgatccgggacatcctggagggcgtgctgcggctgatgggcatctttgacacctcctgggtgtccatgaagagcttcctggccaagaggggcgtgagagaagatattgccacctttgatgccaggaacatcagcaaggagatccgggagagcgtggaggagctgctcttcaagaacaagggcagctttgaccccaagaatgccaagagggccagcacagctgctgcccccctggccgcctgggtgaaggccaacatccagtacagccacgtgctggagcgcatccaccccctggagacagagcaggccggcctggagagcaacctgaagaagacagaggacaggaagaggaagctggaggagctgctgaacagcgtgggccagaaggtgtctgagctgaaggagaagttccagagcaggaccagcgaggccgccaagctggaggccgaggtgtccaaggcccaggagaccatcaaggctgctgaggtgctgatcaaccagctggaccgggagcacaagcgctggaatgcccaggtggtggagatcacagaggagctggccaccctgcccaagagggcccagctggccgccgccttcatcacctacctgtctgctgcccctgagagcctgaggaagacctgcctggaggagtggaccaagtctgctggcctggagaagtttgacctgcggcgcttcctgtgcacagagagcgagcagctgatctggaagtctgagggcctgcccagtgatgacctgagcattgaaaatgccctggtgatcctgcagatcatcggcctgaagtcctggagccgggtgtgccccttcctgattgaccccagcagccaggccacagagtggctgaagacccacctgaaggacagccggctggaggtgatcaaccagcaggacagcaacttcatcacagccctggagctggccgtgcgctttgggaagaccctcatcatccaggagatggatggagtggagcctgtgctgtaccccctgctgcggcgggacctggtggcccagggcccccgctacgtggtgcagatcggggacaagatcatcgactacaatgaggagttccgcctcttcctgagcaccaggaaccccaaccccttcatccccccagatgctgccagcatcgtgacagaggtgaacttcaccaccaccaggagcggcctgcggggccagctgctggccctgaccatccagcacgagaagccagacctggaggagcagaagaccaagctgctgcagcaggaggaggacaagaagatccagctggccaagctggaggagagcctgctggagaccctggccaccagccagggcaacatcctggagaacaaggacctgattgagagcctgaaccagaccaaggccagcagcgccctgatccaggagagcctgaaggagagctacaagctgcagatcagcctggaccaggagagagatgcctacctgcccctggccgagagcgccagcaagatgtacttcatcatcagtgacctgagcaagatcaacaacatgtaccgcttcagcctggccgccttcctgcggctcttccagagggccctgcagaacaagcaggacagtgaaaatacagagcagaggatccagagcctcatcagcagcctgcagcacatggtgtatgagtacatctgccgctgcctcttcaaggctgaccagctgatgtttgccctgcactttgtgcggggcatgcaccctgagctgttccaggagaatgagtgggacaccttcaccggggtggtggtgggggacatgctgaggaaggctgacagccagcagaagatccgggaccagctgcccagctggattgaccaggagaggtcctgggccgtggccaccctgaagatcgccctgcccagcctgtaccagaccctgtgctttgaagatgctgccctgtggaggacctactacaacaacagcatgtgtgagcaggagttccccagcatcctggccaagaaggtgtccctcttccagcagatcctggtggtgcaggccctgcggccagaccggctgcagagcgccatggccctgtttgcctgcaagaccctgggcctgaaggaggtgagccccctgcccctgaacctgaagaggctgtacaaggagaccctggagattgagcccatcctgatcatcatcagccctggagctgaccccagccaggagctgcaggagctggccaatgctgagaggtctggagagtgctaccaccaggtggccatgggccagggccaggccgacctggccatccagatgctgaaggaatgtgccagaaatggagactggctgtgcctgaagaacctgcacctggtggtgtcctggctgcctgtgctggagaaggagctgaacaccctgcagcccaaggacaccttccggctgtggctgacagctgaggtgcaccccaacttcacccccatcctgctgcagagcagcctgaagatcacctatgagagccccccaggcctgaagaagaacctgatgaggacctatgaatcctggaccccagagcagatcagcaagaaggacaacacccaccgggcccacgccctcttcagcctggcctggttccacgccgcctgccaggagaggaggaactacatcccccagggctggaccaagttctatgagttcagcctgagtgacctgcgggccggctacaacatcatcgaccggctgtttgatggagccaaggatgtgcagtgggagtttgtgcacggcctgctggagaatgccatctacggcggcagaattgacaactactttgacctgcgggtgctgcagagctacctgaagcagttcttcaacagctctgtgattgatgtgttcaaccagaggaacaagaagagcatcttcccctacagcgtgtccctgccccagagctgcagcatcctggactacagagctgtgattgagaagatcccagaagatgacaagcccagcttcttcggcctgcctgccaacatcgcccggagcagccagaggatgatcagcagccaggtgatcagccagctgcgcatcctgggccgcagcatcacagctggcagcaagtttgaccgggagatctggagcaatgagctgagccctgtgctgaacctgtggaagaagctgaaccagaacagcaacctgatccaccagaaggtgcccccaccaaatgaccggcagggcagccccatcctgtccttcatcatcctggagcagttcaatgccatccggctggtgcagagcgtgcaccagagcctggccgccctgagcaaggtgatccggggcaccaccctgctgagcagcgaggtgcagaagctggccagcgccctgctgaaccagaagtgccccctggcctggcagagcaagtgggagggccctgaggaccccctgcagtacctgcggggcctggtggcccgggccctggccatccagaactgggtggacaaggccgagaagcaggccctgctgtctgagaccctggacctgtctgagctgttccacccagacaccttcctgaatgccctgcggcaggagacagcccgggctgtgggccgctctgtggacagcctgaagtttgtggcctcctggaagggccgcctgcaggaggccaagctgcagatcaagatcagcggcctgctgctggagggctgcagctttgatggcaaccagctgtctgagaaccagctggacagccccagcgtgtcctctgtgctgccctgcttcatgggctggatcccccaggatgcctgtggcccctacagcccagatgagtgcatcagcctgcctgtgtacaccagcgctgagcgggacagagtggtgaccaacattgatgtgccctgtggcggcaaccaggaccagtggatccagtgtggggccgccctcttcctgaagaaccagtag

SEQ ID NO: 150689 - DNA, 1515 bp, synthetic construct
  misc_feature 1..1515: note = Description of Artificial Sequence: Synthetic coding sequence
  source 1..1515: mol_type = other DNA
atgggccagggccaggccgacctggccatccagatgctgaaggaatgtgccagaaatggagactggctgtgcctgaagaacctgcacctggtggtgtcctggctgcctgtgctggagaaggagctgaacaccctgcagcccaaggacaccttccggctgtggctgacagctgaggtgcaccccaacttcacccccatcctgctgcagagcagcctgaagatcacctatgagagccccccaggcctgaagaagaacctgatgaggacctatgagagctggaccccagagcagatcagcaagaaggacaacacccaccgggcccacgccctcttcagcctggcctggttccacgccgcctgccaggagaggaggaactacatcccccagggctggaccaagttctatgagttcagcctgagtgacctgcgggccggctacaacatcatcgaccggctgtttgatggagccaaggatgtgcagtgggagtttgtgcacggcctgctggagaatgccatctatggaggaagaattgacaactactttgacctgcgggtgctgcagagctacctgaagcagttcttcaacagctctgtgattgatgtgttcaaccagaggaacaagaagagcatcttcccctacagcgtgtccctgccccagagctgcagcatcctggactaccgggccgtcatcgagaagatcccagaagatgacaagcccagcttcttcggcctgcctgccaacatcgcccggagcagccagaggatgatcagcagccaggtgatcagccagctgcgcatcctgggccgcagcatcacagctggcagcaagtttgaccgggagatctggagcaatgagctgagccctgtgctgaacctgtggaagaagctgaaccagaacagcaacctgatccaccagaaggtgcccccaccaaatgaccggcagggcagccccatcctgtccttcatcatcctggagcagttcaatgccatccggctggtgcagagcgtgcaccagagcctggccgccctgagcaaggtgatccggggcaccaccctgctgagcagcgaggtgcagaagctggccagcgccctgctgaaccagaagtgccccctggcctggcagagcaagtgggagggccctgaggaccccctgcagtacctgcggggcctggtggcccgggccctggccatccagaactgggtggacaaggccgagaagcaggccctgctgtctgagaccctggacctgtctgagctgttccacccagacaccttcctgaatgccctgcggcaggagacagcccgggctgtgggccgctctgtggacagcctgaagtttgtggcctcctggaagggccgcctgcaggaggccaagctgcagatcaagatcagcggcctgctgctggagggctgcagctttgatggcaaccagctgtctgagaaccagctggacagccccagcgtgtcctctgtgctgccctgcttcatgggctggatcccccaggacctgctgtag

SEQ ID NO: 150690 - DNA, 270 bp, synthetic construct
  misc_feature 1..270: note = Description of Artificial Sequence: Synthetic coding sequence
  source 1..270: mol_type = other DNA
atgtgtgacaggaaggccgtcatcaagaatgctgacatgtctgaggagatgcagcaggacagcgtggagtgtgccacccaggccctggagaagtacaacatcgagaaggacattgctgcccacatcaagaaggagtttgacaagaagtacaaccccacctggcactgcatcgtgggcaggaactttggcagctatgtgacccatgagaccaagcacttcatctacttctacctgggccaggtggccatcctgctcttcaagagcggctag

SEQ ID NO: 150691 - DNA, 270 bp, synthetic construct; identical to SEQ ID NO: 150690
  misc_feature 1..270: note = Description of Artificial Sequence: Synthetic coding sequence
  source 1..270: mol_type = other DNA

SEQ ID NO: 150692 - DNA, 270 bp, synthetic construct; identical to SEQ ID NO: 150690
  misc_feature 1..270: note = Description of Artificial Sequence: Synthetic coding sequence
  source 1..270: mol_type = other DNA

SEQ ID NO: 150693 - DNA, 270 bp, synthetic construct; identical to SEQ ID NO: 150690
  misc_feature 1..270: note = Description of Artificial Sequence: Synthetic coding sequence
  source 1..270: mol_type = other DNA

SEQ ID NO: 150694 - DNA, 129 bp, synthetic construct
  misc_feature 1..129: note = Description of Artificial Sequence: Synthetic coding sequence
  source 1..129: mol_type = other DNA
atgtgtgacaggaaggccgtcatcaagaatgctgacatgtctgaggagatgcagcaggacagcgtggagtgtgccacccaggccctggagaagtacaacatcgagaaggacattgctgcccacatctag

SEQ ID NO: 150695 - DNA, 270 bp, synthetic construct; identical to SEQ ID NO: 150690
  misc_feature 1..270: note = Description of Artificial Sequence: Synthetic coding sequence
  source 1..270: mol_type = other DNA

SEQ ID NO: 150696 - DNA, 270 bp, synthetic construct
  misc_feature 1..270: note = Description of Artificial Sequence: Synthetic coding sequence
  source 1..270: mol_type = other DNA
atgtctgacaggaaggccgtcatcaagaatgctgacatgtctgaggacatgcagcaggatgctgtggactgtgccacccaggccatggagaagtacaacatcgagaaggacattgctgcctacatcaagaaggagtttgacaagaagtacaaccccacctggcactgcatcgtgggcaggaactttggcagctatgtgacccatgagaccaagcacttcatctacttctacctgggccaggtggccatcctgctcttcaagagcggctag

SEQ ID NO: 150697 - DNA, 144 bp, synthetic construct
  misc_feature 1..144: note = Description of Artificial Sequence: Synthetic coding sequence
  source 1..144: mol_type = other DNA
atggccgaggtggaggagaccctgaagaggctgcagagccagaagggcgtgcagggcatcatcgtggtgaacacagaaggaggctgggagcccctgggccactgtggggacaggagccggcccccagcccagggctgcccctag

SEQ ID NO: 150698 - DNA, 291 bp, synthetic construct
  misc_feature 1..291: note = Description of Artificial Sequence: Synthetic coding sequence
  source 1..291: mol_type = other DNA
atggccgaggtggaggagaccctgaagaggctgcagagccagaagggcgtgcagggcatcatcgtggtgaacacagagggcatccccatcaagagcaccatggacaaccccaccaccacccagtatgccagcctgatgcacagcttcatcctgaaggcccggagcacagtgcgggacatcgacccccagaatgacctgaccttcctgcgcatccgcagcaagaagaatgagatcatggtggccccagacaaggactacttcctgattgtcatccagaaccccacagaatag

SEQ ID NO: 150699 - DNA, 366 bp, synthetic construct
  misc_feature 1..366: note = Description of Artificial Sequence: Synthetic coding sequence
  source 1..366: mol_type = other DNA
atggccgaggtggaggagaccctgaagaggctgcagagccagaagggcgtgcagggcatcatcgtggtgaacacagagggcatccccatcaagagcaccatggacaaccccaccaccacccagtatgccagcctgatgcacagcttcatcctgaaggcccggagcacagtgcgggacatcgacccccagaatgacctgaccttcctgcgcatccgcagcaagaagaatgagatcatggtggcccctgggaagggcagcagcaccagcccctgcaggaaccggccccacggcaccttctctgtggcccaccaggagagctggcacagcggcgtgtcccggggcagcaagcagggccccaggagctag

SEQ ID NO: 150700 - DNA, 291 bp, synthetic construct
  misc_feature 1..291: note = Description of Artificial Sequence: Synthetic coding sequence
  source 1..291: mol_type = other DNA
atggccgaggtggaggagaccctgaagaggatccagagccacaagggcgtcatcggcaccatggtggtgaatgctgagggcatccccatccgcaccaccctggacaacagcaccaccgtgcagtatgccggcctgctgcaccacctgaccatgaaggccaagagcacagtgcgggacatcgacccccagaatgacctgaccttcctgcgcatccgcagcaagaagcatgagatcatggtggccccagacaaggagtacctgctgattgtcatccagaacccctgtgagtag

SEQ ID NO: 150701 - DNA, 165 bp, synthetic construct
  misc_feature 1..165: note = Description of Artificial Sequence: Synthetic coding sequence
  source 1..165: mol_type = other DNA
atggccgaggtggaggagaccctgaagaggatccagagccacaagggcgtcatcggcaccatggtggtgaatgctgaggaccccaggtttgtgaccttcaagtatgcccggcagctgacagccttccagaggaagagcggccagcagatcaccatcaaggactag

SEQ ID NO: 150702 - DNA, 486 bp, synthetic construct
  misc_feature 1..486: note = Description of Artificial Sequence: Synthetic coding sequence
  source 1..486: mol_type = other DNA
atggaccccaaccccagggctgccctggagcggcagcagctgcggctgcgggagcggcagaagttctttgaggacatcctgcagcctgagacagaatttgtgttccccctgagccacctgcacctggagagccagaggcctcccatcggcagcatcagctccatggaggtgaatgtggacaccctggagcaggtggagctgattgacctgggggaccctgatgctgctgatgtgttcctgccctgtgaagatcctccacccaccccccagagcagcggcatggacaaccacctggaggagctgagcctgcctgtgcccaccagtgacaggaccaccagcaggaccagcagcagcagcagcagtgacagcagcaccaacctgcacagccccaaccccagtgatgatggagctgacacccccctggcccagagtgatgaggaggaggagagaggagatggcggcgctgagcccggggcctgcagctag

SEQ ID NO: 150703 - DNA, 486 bp, synthetic construct; identical to SEQ ID NO: 150702
  misc_feature 1..486: note = Description of Artificial Sequence: Synthetic coding sequence
  source 1..486: mol_type = other DNA

SEQ ID NO: 150704 - DNA, 792 bp, synthetic construct
  misc_feature 1..792: note = Description of Artificial Sequence: Synthetic coding sequence
  source 1..792: mol_type = other DNA
atggagagctgggccctggccgtgtttcctgagtacagagtgtccctgctgtggtgcctggagctggccagccccctgtggagcctgggccaggccccacccctgcacgagacctggtttgtgggccacacctggttccagggccggggcaagaggagccccagggctgaggtgtccaggcctgagcccggggcccccctgctgggctgctggctgcagtggggcgcccccagccctggccccctgtgcctgctcttccggctgtgcagctgcacctgctttgcccccctgcctgctggagctgacatggaccccaaccccagggctgccctggagcggcagcagctgcggctgcgggagcggcagaagttctttgaggacatcctgcagcctgagacagaatttgtgttccccctgagccacctgcacctggagagccagaggcctcccatcggcagcatcagctccatggaggtgaatgtggacaccctggagcaggtggagctgattgacctgggggaccctgatgctgctgatgtgttcctgccctgtgaagatcctccacccaccccccagagcagcggcatggacaaccacctggaggagctgagcctgcctgtgcccaccagtgacaggaccaccagcaggaccagcagcagcagcagcagtgacagcagcaccaacctgcacagccccaaccccagtgatgatggagctgacacccccctggcccagagtgatgaggaggaggagagaggagatggcggcgctgagcccggggcctgcagctag

SEQ ID NO: 150705 - DNA, 486 bp, synthetic construct; identical to SEQ ID NO: 150702
  misc_feature 1..486: note = Description of Artificial Sequence: Synthetic coding sequence
  source 1..486: mol_type = other DNA

SEQ ID NO: 150706 - DNA, 339 bp, synthetic construct
  misc_feature 1..339: note = Description of Artificial Sequence: Synthetic coding sequence
  source 1..339: mol_type = other DNA
atggaccccaaccccagggctgccctggagcggcagcagctgcggctgcgggagcggcagaagttctttgaggacatcctgcagcctgagacagaatttgtgttccccctgagccacctgcacctggagagccagaggcctcccatcggcagcatcagctccatggaggtgaatgtggacaccctggagcaggtggagctgattgacctgggggaccctgatgctgctgatgtgttcctgccctgtgaagatcctccacccaccccccagagcagcggcatgcccctgtgcttcggggacttcagcgccagccagcctgagccagatgtgcggctgtag

SEQ ID NO: 150707 - DNA, 780 bp, synthetic construct
  misc_feature 1..780: note = Description of Artificial Sequence: Synthetic coding sequence
  source 1..780: mol_type = other DNA
atgggcgccggcaacttcctgacagccctggaggtgcctgtggccgccctggccggggccgccagtgaccggcgggccagctgtgagcgggtgtccccacctccacccctgccccacttccggctgccccccctgcccaggagccggctgcccggccctgtgtccaggcctgagcccggggcccccctgctgggctgctggctgcagtggggcgcccccagccctggccccctgtgcctgctcttccggctgtgcagctgcacctgctttgcccccctgcctgctggagctgacatggaccccaaccccagggctgccctggagcggcagcagctgcggctgcgggagcggcagaagttctttgaggacatcctgcagcctgagacagaatttgtgttccccctgagccacctgcacctggagagccagaggcctcccatcggcagcatcagctccatggaggtgaatgtggacaccctggagcaggtggagctgattgacctgggggaccctgatgctgctgatgtgttcctgccctgtgaagatcctccacccaccccccagagcagcggcatggacaaccacctggaggagctgagcctgcctgtgcccaccagtgacaggaccaccagcaggaccagcagcagcagcagcagtgacagcagcaccaacctgcacagccccaaccccagtgatgatggagctgacacccccctggcccagagtgatgaggaggaggagagaggagatggcggcgctgagcccggggcctgcagctag

SEQ ID NO: 150708 - DNA, 339 bp, synthetic construct; identical to SEQ ID NO: 150706
  misc_feature 1..339: note = Description of Artificial Sequence: Synthetic coding sequence
  source 1..339: mol_type = other DNA

SEQ ID NO: 150709 - DNA, 486 bp, synthetic construct; identical to SEQ ID NO: 150702
  misc_feature 1..486: note = Description of Artificial Sequence: Synthetic coding sequence
  source 1..486: mol_type = other DNA

SEQ ID NO: 150710 - DNA, 519 bp, synthetic construct
  misc_feature 1..519: note = Description of Artificial Sequence: Synthetic coding sequence
  source 1..519: mol_type = other DNA
tgaacctggttccagggccggggcaagaggagccccagggctgaggtgtccaggcctgagcccggggcccccctgctgggctgctggctgcagtggggcgcccccagccctggccccctgtgcctgctcttccggctgtgcagctgcacctgctttgcccccctgcctgctggagctgacatggaccccaaccccagggctgccctggagcggcagcagctgcggctgcgggagcggcagaagttctttgaggacatcctgcagcctgagacagaatttgtgttccccctgagccacctgcacctggagagccagaggcctcccatcggcagcatcagctccatggaggtgaatgtggacaccctggagcaggtggagctgattgacctgggggaccctgatgctgctgatgtgttcctgccctgtgaagatcctccacccaccccccagagcagcggcatgcccctgtgcttcggggacttcagcgccagccagcctgagccagatgtgcggctgtag

SEQ ID NO: 150711 - DNA, 15516 bp, synthetic construct
  misc_feature 1..15516: note = Description of Artificial Sequence: Synthetic coding sequence
  source 1..15516: mol_type = other DNA
atgcacagcagcagctacagctaccgcagcagtgacagcgtcttcagcaacaccaccagcaccaggaccagcctggacagcaatgaaaacctgctgctggtgcactgcggccccaccctcatcaacagctgcatcagctttggaagtgagagctttgatggccaccggctggagatgctgcagcagatcgccaacagagtgcagagggacagcgtcatctgtgaggacaagctgatcctggccggaaatgccctgcagagcgacagcaagaggctggagagcggcgtgcagttccagaatgaggccgagattgctggctacatcctggagtgtgagaacctgctgcggcagcacgtgattgatgtgcagatcctgattgatggcaagtactaccaggccgaccagctggtgcagagggtggccaagctgagagatgagatcatggccctgagaaatgaatgttcttctgtgtacagcaagggccgcatcctgaccacagagcagaccaagctgatgatcagcggcatcacccagagcctgaacagcggctttgcccagaccctgcaccccagcctgaccagcggcctgacccagagcctgacccccagcctgaccagcagctccatgaccagcggcctgagcagcggcatgaccagccggctgacccccagcgtgaccccagcctacaccccaggcttccccagcggcctggtgcccaacttcagcagtggagtggagcccaacagcctgcagaccctgaagctgatgcagatcaggaagcccctgctgaagagcagcctgctggaccagaacctgacagaggaggagatcaacatgaagtttgtgcaggacctgctgaactgggtggatgagatgcaggtgcagctggacagaacagagtggggcagtgacctgcccagcgtggagagccacctggagaaccacaagaatgtgcaccgggccatcgaggagtttgagagcagcctgaaggaggccaagatcagcgagatccagatgacagcccccctgaagctgacctacgccgagaagctgcaccggctggagagccagtatgccaagctgctgaacaccagcaggaaccaggagcggcacctggacaccctgcacaactttgtgtcccgggccaccaatgagctgatctggctgaatgagaaggaggaggaggaggtggcctatgactggagcgagaggaacaccaacatcgccaggaagaaggactaccacgccgagctgatgagggagctggaccagaaggaggagaacatcaagtctgtgcaggagattgctgagcagctgctgctggagaaccacccagcccggctgaccatcgaggcctacagagctgccatgcagacccagtggagctggatcctgcagctgtgccagtgtgtggagcagcacatcaaggaaaatacagcctactttgagttcttcaatgatgccaaggaggccacagactacctgaggaacctgaaggatgccatccagaggaagtacagctgtgacaggagcagcagcatccacaagctggaggacctggtgcaggagagcatggaggagaaggaggagctgctgcagtacaagagcaccatcgccaacctgatgggcaaggccaagaccatcatccagctgaagcccaggaacagcgactgccccctgaagaccagcatccccatcaaggccatctgtgactaccggcagatcgagatcaccatctacaaggatgatgaatgtgtgctggccaacaacagccaccgggccaagtggaaggtgatcagccccactggaaatgaggccatggtgcccagcgtgtgcttcaccgtgcccccacccaacaaggaggccgtggacctggccaacagaattgagcagcagtaccagaatgtgctgaccctgtggcatgagagccacatcaacatgaagtctgtggtgtcctggcactacctgatcaatgaaattgaccgcatccgggccagcaatgtggccagcatcaagaccatgctgcccggggagcaccagcaggtgctgagcaacctgcagagcagatttgaggacttcctggaggacagccaggagagccaggtgttcagcggcagtgacatcacccagctggagaaggaggtgaatgtgtgcaagcagtactaccaggagctgctgaagtctgctgagcgggaggagcaggaggagagcgtgtacaacctgtacatcagcgaggtgaggaacatccggctgcggctggagaactgtgaagatagactcatccggcagatccgcacccccctggagagagatgacctgcacgagagcgtcttccgcatcacagagcaggagaagctgaagaaggagctggagcggctgaaggatgacctgggcaccatcaccaacaagtgtgaggagttcttcagccaggccgccgccagcagctctgtgcccaccctgcggtctgagctgaatgtggtgctgcagaacatgaaccaggtgtacagcatgagcagcacctacatcgacaagctgaagacagtgaacctggtgctgaagaacacccaggccgctgaggccctggtgaagctgtatgagaccaagctgtgtgaggaggaggccgtgattgctgacaagaacaacattgaaaatctcatcagcaccctgaagcagtggaggtctgaggtggatgagaagaggcaggtgttccacgccctggaggatgagctgcagaaggccaaggccatcagtgatgagatgttcaagacctacaaggagcgggacctggactttgactggcacaaggagaaggctgaccagctggtggagcgctggcagaatgtgcacgtgcagattgacaaccggctgcgggacctggagggcatcggcaagagcctgaagtactacagagacacctaccaccccctggatgactggatccagcaggtggagaccacccagaggaagatccaggagaaccagcctgagaacagcaagaccctggccacccagctgaaccagcagaagatgctggtgtctgaaattgagatgaagcagagcaagatggatgagtgccagaagtatgcagagcagtacagcgccaccgtgaaggactatgagctgcagaccatgacctaccgggccatggtggacagccagcagaagagccctgtgaagagaagaaggatgcagagcagcgctgacctgatcatccaggagttcatggacctgcggacccgctacacagccctggtgaccctgatgacccagtacatcaagtttgctggggacagcctgaagaggctggaggaggaggagaagagcctggaggaggagaagaaggagcacgtggagaaggccaaggagctgcagaagtgggtgagcaacatcagcaagaccctgaaggatgctgagaaggccggcaagccacccttcagcaagcagaagatcagcagcgaggagatcagcaccaagaaggagcagctgtctgaggccctgcagaccatccagctgttcctggccaagcacggggacaagatgacagatgaggagagaaatgagctggagaagcaggtgaagaccctgcaggagagctacaacctgctcttcagcgagagcctgaagcagctgcaggagagccagaccagcggagatgtgaaggtggaggagaagatcgtggccgagcggcagcaggagtacaaggagaagctgcagggcatctgtgacctgctgacccagacagagaacagactcatcggccaccaggaggccttcatgattggagatggcaccgtggagctgaagaagtaccagagcaagcaggaggagctgcagaaggacatgcagggcagcgcccaggccctggccgaggtggtgaagaacacagagaacttcctgaaggaaaatggagagaagctgagccaggaggacaaggccctgattgagcagaagctgaatgaggccaagatcaagtgtgagcagctgaacctgaaggccgagcagagcaagaaggagctggacaaggtggtgaccacagccatcaaggaggagacagagaaggtggccgctgtgaagcagctggaggagagcaagaccaagattgagaacctgctggactggctgagcaatgtggacaaggacagcgagcgggccggcaccaagcacaagcaggtgattgagcagaatggcacccacttccaggagggagatggcaagagcgccatcggggaggaggatgaggtgaatggaaacctgctggagacagatgtggatggccaggtgggcaccacccaggagaacctgaaccagcagtaccagaaggtgaaggcccagcacgagaagatcatcagccagcaccaggccgtcatcatcgccacccagagcgcccaggtgctgctggagaagcagggccagtacctgagccctgaggagaaggagaagctgcagaagaacatgaaggagctgaaggtgcactatgaaacagccctggccgagagcgagaagaagatgaagctgacccacagcctgcaggaggagctggagaagtttgatgctgactacacagaatttgagcactggctgcagcagagcgagcaggagctggagaacctggaggccggggctgatgacatcaatggcctgatgaccaagctgaagaggcagaagagcttctctgaagatgtgatcagccacaagggggacctgcgctacatcaccatcagcggcaacagagtgctggaggccgccaagagctgcagcaagagagatggcggcaaggtggacaccagcgccacccaccgggaggtgcagaggaagctggaccacgccacagaccgcttccgcagcctgtacagcaaatgtaatgtgctgggcaacaacctgaaggacctggtggacaagtaccagcactatgaagatgccagctgtggcctgctggccggcctgcaggcctgtgaggccacagccagcaagcacctgtctgagcccatcgctgtggaccccaagaacctgcagaggcagctggaggagaccaaggccctgcagggccagatcagcagccagcaggtggccgtggagaagctgaagaagacagctgaggtgctgctggatgcccggggcagcctgctgcctgccaagaatgacatccagaagaccctggatgacatcgtgggccgctatgaggacctgagcaagtctgtgaatgaaagaaatgagaagctgcagatcaccctgaccaggagcctgtctgtgcaggacggcctggatgagatgctggactggatgggaaatgtggagagcagcctgaaggagcagggccaggtgcccctgaacagcacagccctgcaggacatcatcagcaagaacatcatgctggagcaggacattgctggccggcagagcagcatcaatgccatgaatgagaaggtgaagaagttcatggagaccacagaccccagcacagccagcagcctgcaggccaagatgaaggacctgagcgcccgcttcagcgaggccagccacaagcacaaggagaccctggccaagatggaggagctgaagaccaaggtggagctgtttgagaacctgtctgagaagctgcagaccttcctggagaccaagacccaggccctgacagaggtggatgtgcctgggaaggatgtgacagagctgagccagtacatgcaggagagcaccagcgagttcctggagcacaagaagcacctggaggtgctgcacagcctgctgaaggagatcagcagccacggcctgcccagcgacaaggccctggtgctggagaagaccaacaacctgagcaagaagttcaaggagatggaggacaccatcaaggagaagaaggaggccgtgaccagctgccaggagcagctggatgccttccaggtgctggtgaagagcctgaagtcctggatcaaggagaccaccaagaaggtgcccatcgtgcagcccagctttggagctgaggacctgggcaagagcctggaggacaccaagaagctgcaggagaagtggagcctgaagaccccagagatccagaaggtgaacaacagcggcatcagcctgtgcaacctgatctctgctgtgaccaccccagccaaggccatcgctgctgtgaagtctggaggagctgtgctgaatggagagggcacagccaccaacacagaggagttctgggccaacaagggcctgaccagcatcaagaaggacatgacagacatcagccacggctatgaggacctgggcctgctgctgaaggacaagattgctgagctgaacaccaagctgagcaagctgcagaaggcccaggaggagagcagcgccatgatgcagtggctgcagaagatgaacaagacagccaccaagtggcagcagaccccagcccccacagacacagaggccgtgaagacccaggtggagcagaacaagagctttgaagctgagctgaagcagaatgtgaacaaggtgcaggagctgaaggacaagctgacagagctgctggaggagaacccagacaccccagaggccccccgctggaagcagatgctgacagaaattgacagcaagtggcaggagctgaaccagctgaccatcgaccggcagcagaagctggaggagagcagcaacaacctgacccagttccagacagtggaggcccagctgaagcagtggctggtggagaaggagctgatggtgtctgtgctgggccccctgagcattgaccccaacatgctgaacacccagaggcagcaggtgcagatcctgctgcaggagtttgccaccaggaagccccagtatgagcagctgacagctgctggccagggcatcctgagcaggcctggagaggaccccagcctgcggggcatcgtgaaggagcagctggccgctgtgacccagaagtgggacagcctgaccggccagctgagtgacagatgtgactggattgaccaggccatcgtgaagagcacccagtaccagagcctgctgcggagcctgagtgacaagctgagtgacctggacaacaagctgagcagcagcctggccgtgtccacccacccagatgccatgaaccagcagctggagacagcccagaagatgaagcaggagatccagcaggagaagaagcagatcaaggtggcccaggccctgtgtgaggacctgagcgccctggtgaaggaggagtacctgaaggccgagctgagccggcagctggagggcatcctgaagagcttcaaggatgtggagcagaaggcagaaaatcatgtgcagcacctgcagagcgcctgtgccagcagccaccagttccagcagatgagccgggacttccaggcctggctggacaccaagaaggaggagcagaacaagagccaccccatcagcgccaagctggatgtgctggagagcctcatcaaggaccacaaggacttcagcaagaccctgacagcccagagccacatgtatgagaagaccatcgccgagggggagaacctgctgctgaagacccagggcagcgagaaggccgccctgcagctgcagctgaacaccatcaagaccaactgggacaccttcaacaagcaggtgaaggagcgggagaacaagctgaaggagagcctggagaaggccctgaagtacaaggagcaggtggagaccctgtggccctggattgacaagtgccagaacaacctggaggagatcaagttctgcctggaccctgcagaaggagaaaattccatcgccaagctgaagagcctgcagaaggagatggaccagcacttcggcatggtggagctgctgaacaacacagccaacagcctgctgtctgtgtgtgaaattgacaaggaggtggtgacagatgagaacaagagcctcatccagaaggtggacatggtgacagagcagctgcacagcaagaagttctgcctggagaacatgacccagaagttcaaggagttccaggaggtgtccaaggagagcaagaggcagctgcagtgtgccaaggagcagctggacatccatgacagcctgggcagccaggcctacagcaacaagtacctgaccatgctgcagacccagcagaagagcctgcaggccctgaagcaccaggtggacctggccaagaggctggcccaggacctggtggtggaggccagtgacagcaagggcaccagtgatgtgctgctgcaggtggagaccatcgcccaggagcacagcaccctgagccagcaggtggatgagaagtgcagcttcctggagaccaagctgcagggcatcggccacttccagaacaccatccgggagatgttcagccagtttgctgagtttgatgatgagctggacagcatggcccctgtgggcagagatgctgagaccctgcagaagcagaaggagaccatcaaggccttcctgaagaagctggaggccctgatggccagcaatgacaatgccaacaagacctgcaagatgatgctggccacagaggagaccagcccagacctggtgggcatcaagagggacctggaggccctgagcaagcagtgcaacaagctgctggaccgggcccaggcccgggaggagcaggtggagggcaccatcaagaggctggaggagttctacagcaagctgaaggagttcagcatcctgctgcagaaggccgaggagcacgaggagagccagggccctgtgggcatggagacagagaccatcaaccagcagctgaacatgttcaaggtgttccagaaggaggagattgagcccctgcagggcaagcagcaggatgtgaactggctgggccagggcctcatccagagcgctgccaagagcaccagcacccagggcctggagcatgacctggatgatgtgaatgcccgctggaagaccctgaacaagaaggtggcccagagagctgcccagctgcaggaggccctgctgcactgcggccgcttccaggatgccctggagagcctgctgtcctggatggtggacacagaggagctggtggccaaccagaagccacccagcgctgagttcaaggtggtgaaggcccagatccaggagcagaagctgctgcagaggctgctggatgacaggaagagcacagtggaggtgatcaagcgggagggggagaagatcgccaccacagctgagcctgctgacaaggtgaagatcctgaagcagctgagcctgctggacagccgctgggaggccctgctgaacaaggccgagaccaggaaccggcagctggagggcatctctgtggtggcccagcagttccacgagaccctggagcccctgaatgagtggctgaccaccatcgagaagaggctggtgaactgtgagcccatcggcacccaggccagcaagctggaggagcagatcgcccagcacaaggccctggaggatgacatcatcaaccacaacaagcacctgcaccaggccgtgtccatcggccagagcctgaaggtgctgagcagccgggaggacaaggacatggtgcagagcaagctggacttcagccaggtgtggtacatcgagatccaggagaagagccacagccgctctgagctgctgcagcaggccctgtgcaatgccaagatctttggagaagatgaggtggagctgatgaactggctgaatgaggtgcatgacaagctgagcaagctgtctgtgcaggactacagcacagagggcctgtggaagcagcagagcgagctgcgggtgctgcaggaggacatcctgctgaggaagcagaatgtggaccaggccctgctgaatggcctggagctgctgaagcagaccactggagatgaggtgctgatcatccaggacaagctggaggccatcaaggcccgctacaaggacatcaccaagctgagcacagatgtggccaagaccctggagcaggccctgcagctggcccggcggctgcacagcacccatgaggagctgtgcacctggctggacaaggtggaggtggagctgctgtcctatgagacccaggtgctgaagggggaggaggccagccaggcccagatgaggcccaaggagctgaagaaggaggccaagaacaacaaggccctgctggacagcctgaatgaggtgagcagcgccctgctggagctggtgccctggagggcccgggagggcctggagaagatggtggccgaggacaatgaaagataccgcctggtgtctgacaccatcacccagaaggtggaggagattgatgctgccatcctgcggagccagcagtttgaccaggccgcagatgctgagctgtcctggatcacagaaacagagaagaagctgatgagcctgggggacatccggctggagcaggaccagaccagcgcccagctgcaggtgcagaagaccttcaccatggagatcctgcggcacaaggacatcattgatgacctggtgaagagcggccacaagatcatgacagcctgcagcgaggaggagaagcagagcatgaagaagaagctggacaaggtgctgaagaactatgacaccatctgccagatcaacagcgagcgctacctgcagctggagcgggcccagagcctggtgaaccagttctgggagacctatgaggagctgtggccctggctgacagagacccagagcatcatcagccagctgcctgccccagccctggagtatgagaccctgcggcagcagcaggaggagcaccggcagctgcgggagctgattgctgagcacaagccccacatcgacaagatgaacaagacaggcccccagctgctggagctgagccctggagagggcttcagcatccaggagaagtatgtggccgctgacaccctgtacagccagatcaaggaggatgtgaagaagagagctgtggccctggatgaggccatcagccagagcacccagttccatgacaagattgaccagatcctggagagcctggagcgcatcgtggagcggctgcggcagcccccatccatctctgctgaggtggagaagatcaaggagcagatcagcgagaacaagaatgtgtctgtggacatggagaagctgcagcccctgtatgagaccctgaagcagagaggagaggagatgattgcccggagcggcggcacagacaaggacatcagcgccaaggctgtgcaggacaagctggaccagatggtgttcatctgggagaacatccacaccctggtggaggagcgggaggccaagctgctggatgtgatggagctggccgagaagttctggtgtgaccacatgagcctgattgtgaccatcaaggacacccaggacttcatccgggacctggaggaccccggcatcgaccccagcgtggtgaagcagcagcaggaggccgctgagaccatccgggaggagattgatggcctgcaggaggagctggacatcgtcatcaacctgggcagcgagctgattgctgcctgtggggagccagacaagcccatcgtgaagaagagcattgatgagctgaacagcgcctgggacagcctgaacaaggcctggaaggacagaattgacaagctggaggaggccatgcaggccgctgtgcagtaccaggacggcctgcaggccgtgtttgactgggtggacattgctgggggcaagctggcctccatgagccccatcggcacagacctggagaccgtgaagcagcagatcgaggagctgaagcagttcaagtctgaggcctaccagcagcagatcgagatggagcggctgaaccaccaggccgagctgctgctgaagaaggtgacagaggagagtgacaagcacacagtgcaggaccccctgatggagctgaagctgatctgggacagcctggaggagcgcatcatcaaccggcagcacaagctggagggcgccctgctggccctgggccagttccagcacgccctggatgagctgctggcctggctgacccacacagagggcctgctgtctgagcagaagcctgtgggcggggaccccaaggccattgaaattgagctggccaagcaccacgtgctgcagaatgatgtgctggcccaccagagcacagtggaggccgtgaacaaggctggaaatgacctgattgagagcagcgctggggaggaggccagcaacctgcagaacaagctggaggtgctgaaccagcgctggcagaatgtgctggagaagacagagcagaggaagcagcagctggatggagccctgcggcaggccaagggcttccacggggagattgaggacctgcagcagtggctgacagacacagagcggcacctgctggccagcaagcccctgggcggcctgcctgagacagccaaggagcagctgaatgtgcacatggaggtgtgtgccgcctttgaggccaaggaggagacctacaagagcctgatgcagaagggccagcagatgctggcccgctgccccaagtctgctgagaccaacatcgaccaggacatcaacaacctgaaggagaagtgggagagcgtggagaccaagctgaatgaaaggaagaccaagctggaggaggccctgaacctggccatggagttccacaacagcctgcaggacttcatcaactggctgacccaggccgagcagaccctgaatgtggccagccggcccagcctcatcctggacacagtgctcttccagattgatgagcacaaggtgtttgccaatgaggtgaacagccaccgggagcagatcatcgagctggacaagacaggcacccacctgaagtacttcagccagaagcaggatgtggtgctgatcaagaacctgctgatctctgtgcagagccgctgggagaaggtggtgcagaggctggtggagcggggccgcagcctggatgatgccaggaagagggccaagcagttccacgaggcctggagcaagctgatggagtggctggaggagagcgagaagagcctggacagcgagctggagatcgccaatgaccctgacaagatcaagacccagctggcccagcacaaggagttccagaagagcctgggcgccaagcacagcgtgtatgacaccaccaacagaacaggccgcagcctgaaggagaagaccagcctggctgatgacaacctgaagctggatgacatgctgtctgagctgcgggacaagtgggacaccatctgtgggaagtctgtggagcggcagaacaagctggaggaggccctgctcttcagcggccagttcacagatgccctgcaggccctgattgactggctgtacagagtggagccccagctggccgaggaccagcctgtgcacggggacatcgacctggtgatgaacctgattgacaaccacaaggccttccagaaggagctgggcaagaggaccagctctgtgcaggccctgaagaggtctgcccgggagctgattgagggcagcagagatgacagctcctgggtgaaggtgcagatgcaggagctgagcacccgctgggagaccgtgtgtgccctgagcatcagcaagcagacccggctggaggccgccctgcggcaggccgaggagttccacagcgtggtgcacgccctgctggagtggctggccgaggccgagcagaccctgcgcttccacggcgtgctgcctgatgatgaagatgccctgcggaccctgattgaccagcacaaggagttcatgaagaagctggaggagaagagagctgagctgaacaaggccaccaccatgggagacacagtgctggccatctgccacccagacagcatcaccaccatcaagcactggatcaccatcatccgggccaggtttgaggaggtgctggcctgggccaagcagcaccagcagaggctggccagcgccctggccggcctcatcgccaagcaggagctgctggaggccctgctggcctggctgcagtgggccgagaccaccctgacagacaaggacaaggaggtgatcccccaggagattgaggaggtgaaggccctgattgctgagcaccagaccttcatggaggagatgaccaggaagcagccagatgtggacaaggtgaccaagacctacaagagaagagctgctgaccccagcagcctgcagagccacatccctgtgctggacaagggccgggccggcaggaagcgcttccctgccagcagcctgtaccccagcggcagccagacccagatcgagaccaagaacccccgggtgaacctgctggtgtccaagtggcagcaggtgtggctgctggccctggagaggaggaggaagctgaatgatgccctggaccggctggaggagctgcgggagtttgccaactttgattttgacatctggaggaagaagtacatgcgctggatgaaccacaagaagagccgggtgatggacttcttcagaagaattgacaaggaccaggacggcaagatcacccggcaggagttcattgatggcatcctgagcagcaagttccccaccagccggctggagatgtctgctgtggccgacatctttgacagagatggagatggctacatcgactactatgaatttgtggccgccctgcaccccaacaaggatgcctacaagcccatcacagatgctgacaagattgaagatgaggtgacccggcaggtggccaagtgcaagtgtgccaagcgcttccaggtggagcagatcggggacaacaagtaccgcttcttcctgggcaaccagtttggagacagccagcagctgcggctggtgcgcatcctgcggagcacagtgatggtgcgggtgggcggcggctggatggccctggatgagttcctggtgaagaatgacccctgccgggccaagggccgcaccaacatggagctgcgggagaagttcatcctggctgatggagccagccagggcatggccgccttccggccccggggccgccgcagccggcccagcagcagaggagccagccccaacagaagcacctctgtgagcagccaggccgcccaggccgccagcccccaggtgcctgccaccaccacccccaagatcctgcaccccctgaccagaaattatggcaagccctggctgaccaacagcaagatgagcaccccctgcaaggccgcagaatgtagtgacttccctgtgcccagcgctgagggcacccccatccagggcagcaagctgcggctgcccggctacctgagcggcaagggcttccacagcggagaagattctggcctcatcaccacagctgctgcccgggtgaggacccagtttgctgacagcaagaagacccccagcaggcctggcagcagagctggcagcaaggccggcagccgggccagcagccggcggggcagtgatgccagtgactttgacatcagcgagatccagagcgtgtgcagtgatgtggagaccgtgccccagacccaccggcccacccccagggctggcagccggcccagcacagccaagcccagcaagatccccaccccccagaggaagagccctgccagcaagctggacaagagcagcaagaggtag

SEQ ID NO: 150712 - DNA, 12603 bp, synthetic construct
  misc_feature 1..12603: note = Description of Artificial Sequence: Synthetic coding sequence
  source 1..12603: mol_type = other DNA
atggccggctacctgagccctgctgcctacctgtatgtggaggagcaggagtacctgcaggcctatgaagatgtgctggagcgctacaaggatgagcgggacaaggtgcagaagaagaccttcaccaagtggatcaaccagcacctgatgaaggtgaggaagcacgtgaatgacctgtatgaggacctgagagatggccacaacctgatcagcctgctggaggtgctgagcggggacaccctgccccgggagaagggccgcatgaggttccaccggctgcagaatgtgcagatcgccctggactacctgaagaggcggcaggtgaagctggtgaacatcagaaatgatgacatcacagatggcaaccccaagctgaccctgggcctcatctggaccatcatcctgcacttccagatcagtgacatccacgtgactggagagagcgaggacatgtctgccaaggagcggctgctgctgtggacccagcaggccacagagggctacgccggcatccgctgtgagaacttcaccacctgctggagagatggcaagctgttcaatgccatcatccacaagtacagaccagacctgattgacatgaacacagtggccgtgcagagcaacctggccaacctggagcacgccttctacgtggccgagaagattggagtcatccggctgctggaccctgaagatgtggatgtgagcagcccagatgagaagagcgtcatcacctacgtgagcagcctgtatgatgccttccccaaggtgcctgagggcggggagggcatcggggccaatgatgtggaggtgaagtggattgagtaccagaacatggtgaactacctgatccagtggatccgccaccacgtgaccaccatgtctgagaggaccttccccaacaaccctgtggagctgaaggccctgtacaaccagtacctgcagttcaaggagacagagatcccccccaaggagacagagaagagcaagatcaagaggctgtacaagctgctggagatctggattgaatttggccgcatcaagctgctgcagggctaccaccccaatgacatcgagaaggagtggggcaagctgatcatcgccatgctggagcgggagaaggccctgcggcctgaggtggagcggctggagatgctgcagcagatcgccaacagagtgcagagggacagcgtcatctgtgaggacaagctgatcctggccggaaatgccctgcagagcgacagcaagaggctggagagcggcgtgcagttccagaatgaggccgagattgctggctacatcctggagtgtgagaacctgctgcggcagcacgtgattgatgtgcagatcctgattgatggcaagtactaccaggccgaccagctggtgcagagggtggccaagctgagagatgagatcatggccctgagaaatgaatgttcttctgtgtacagcaagggccgcatcctgaccacagagcagaccaagctgatgatcagcggcatcacccagagcctgaacagcggctttgcccagaccctgcaccccagcctgaccagcggcctgacccagagcctgacccccagcctgaccagcagctccatgaccagcggcctgagcagcggcatgaccagccggctgacccccagcgtgaccccagcctacaccccaggcttccccagcggcctggtgcccaacttcagcagtggagtggagcccaacagcctgcagaccctgaagctgatgcagatcaggaagcccctgctgaagagcagcctgctggaccagaacctgacagaggaggagatcaacatgaagtttgtgcaggacctgctgaactgggtggatgagatgcaggtgcagctggacagaacagagtggggcagtgacctgcccagcgtggagagccacctggagaaccacaagaatgtgcaccgggccatcgaggagtttgagagcagcctgaaggaggccaagatcagcgagatccagatgacagcccccctgaagctgacctacgccgagaagctgcaccggctggagagccagtatgccaagctgctgaacaccagcaggaaccaggagcggcacctggacaccctgcacaactttgtgtcccgggccaccaatgagctgatctggctgaatgagaaggaggaggaggaggtggcctatgactggagcgagaggaacaccaacatcgccaggaagaaggactaccacgccgagctgatgagggagctggaccagaaggaggagaacatcaagtctgtgcaggagattgctgagcagctgctgctggagaaccacccagcccggctgaccatcgaggcctacagagctgccatgcagacccagtggagctggatcctgcagctgtgccagtgtgtggagcagcacatcaaggaaaatacagcctactttgagttcttcaatgatgccaaggaggccacagactacctgaggaacctgaaggatgccatccagaggaagtacagctgtgacaggagcagcagcatccacaagctggaggacctggtgcaggagagcatggaggagaaggaggagctgctgcagtacaagagcaccatcgccaacctgatgggcaaggccaagaccatcatccagctgaagcccaggaacagcgactgccccctgaagaccagcatccccatcaaggccatctgtgactaccggcagatcgagatcaccatctacaaggatgatgaatgtgtgctggccaacaacagccaccgggccaagtggaaggtgatcagccccactggaaatgaggccatggtgcccagcgtgtgcttcaccgtgcccccacccaacaaggaggccgtggacctggccaacagaattgagcagcagtaccagaatgtgctgaccctgtggcatgagagccacatcaacatgaagtctgtggtgtcctggcactacctgatcaatgaaattgaccgcatccgggccagcaatgtggccagcatcaagaccatgctgcccggggagcaccagcaggtgctgagcaacctgcagagcagatttgaggacttcctggaggacagccaggagagccaggtgttcagcggcagtgacatcacccagctggagaaggaggtgaatgtgtgcaagcagtactaccaggagctgctgaagtctgctgagcgggaggagcaggaggagagcgtgtacaacctgtacatcagcgaggtgaggaacatccggctgcggctggagaactgtgaagatagactcatccggcagatccgcacccccctggagagagatgacctgcacgagagcgtcttccgcatcacagagcaggagaagctgaagaaggagctggagcggctgaaggatgacctgggcaccatcaccaacaagtgtgaggagttcttcagccaggccgccgccagcagctctgtgcccaccctgcggtctgagctgaatgtggtgctgcagaacatgaaccaggtgtacagcatgagcagcacctacatcgacaagctgaagacagtgaacctggtgctgaagaacacccaggccgctgaggccctggtgaagctgtatgagaccaagctgtgtgaggaggaggccgtgattgctgacaagaacaacattgaaaatctcatcagcaccctgaagcagtggaggtctgaggtggatgagaagaggcaggtgttccacgccctggaggatgagctgcagaaggccaaggccatcagtgatgagatgttcaagacctacaaggagcgggacctggactttgactggcacaaggagaaggctgaccagctggtggagcgctggcagaatgtgcacgtgcagattgacaaccggctgcgggacctggagggcatcggcaagagcctgaagtactacagagacacctaccaccccctggatgactggatccagcaggtggagaccacccagaggaagatccaggagaaccagcctgagaacagcaagaccctggccacccagctgaaccagcagaagatgctggtgtctgaaattgagatgaagcagagcaagatggatgagtgccagaagtatgcagagcagtacagcgccaccgtgaaggactatgagctgcagaccatgacctaccgggccatggtggacagccagcagaagagccctgtgaagagaagaaggatgcagagcagcgctgacctgatcatccaggagttcatggacctgcggacccgctacacagccctggtgaccctgatgacccagtacatcaagtttgctggggacagcctgaagaggctggaggaggaggagaagagcctggaggaggagaagaaggagcacgtggagaaggccaaggagctgcagaagtgggtgagcaacatcagcaagaccctgaaggatgctgagaaggccggcaagccacccttcagcaagcagaagatcagcagcgaggagatcagcaccaagaaggagcagctgtctgaggccctgcagaccatccagctgttcctggccaagcacggggacaagatgacagatgaggagagaaatgagctggagaagcaggtgaagaccctgcaggagagctacaacctgctcttcagcgagagcctgaagcagctgcaggagagccagaccagcggagatgtgaaggtggaggagaagctggacaaggtgattgctggcaccatcgaccagaccactggagaggtgctgagcgtcttccaggccgtgctgcggggcctgattgattatgacaccggcatccggctgctggagacccagctgatgatcagcggcctcatcagccctgagctgaggaaatgttttgacctgaaggatgccaagagccacggcctgattgatgagcagatcctgtgccagctgaaggagctgagcaaggccaaggagatcatctctgctgccagccccaccaccatccctgtgctggatgccctggcccagagcatgatcacagagagcatggccatcaaggtgctggagatcctgctgagcacaggcagcctggtgatcccagccaccggggagcagctgaccctgcagaaggccttccagcagaacctggtgtcctctgccctcttcagcaaggtgctggagcggcagaacatgtgcaaggacctgattgacccctgcaccagcgagaaggtgtccctgattgacatggtgcagaggagcaccctgcaggagaacacaggcatgtggctgctgcctgtgcggccccaggagggcggccgcatcaccctgaagtgtggcaggaacatcagcatcctgcgggccgcccacgagggcctgattgaccgggagaccatgttccggctgctgagcgcccagctgctgagcggcggcctcatcaacagcaacagcggccagaggatgacagtggaggaggccgtgcgggagggcgtgattgaccgggacacagccagcagcatcctgacctaccaggtgcagacaggaggcatcatccagagcaacccagccaagaggctgactgtggatgaagctgtgcagtgtgacctgatcaccagcagcagcgccctgctggtgctggaggcccagaggggctacgtgggcctcatctggccccacagcggggagatcttccccaccagcagcagcctgcagcaggagctgatcaccaatgagctggcctacaagatcctgaatggccggcagaagattgctgccctgtacatccctgagagcagccaggtgattggcctggatgctgccaagcagctgggcatcatcgacaacaacacagccagcatcctgaagaacatcaccctgcctgacaagatgccagacctgggggacctggaggcctgcaagaatgcccggcgctggctgtccttctgcaagttccagcccagcacagtgcatgactaccggcaggaggaggatgtgtttgatggagaggagcctgtgaccacccagaccagcgaggagaccaagaagctgttcctgagctacctgatgatcaacagctacatggatgccaacacaggccagaggctgctgctgtatgatggagacctggatgaggccgtgggcatgctgctggagggctgccacgccgagtttgatggcaacacagccatcaaggagtgcctggatgtgctgagcagcagcggggtcttcctgaacaatgccagcggccgggagaaggatgagtgcacagccacccccagcagcttcaacaagtgccactgtggggagcctgagcacgaggagaccccagaaaatagaaaatgtgccattgatgaggagttcaatgagatgaggaacacagtcatcaacagcgagttcagccagagcggcaagctggccagcaccatcagcattgaccccaaggtgaacagcagccccagcgtgtgtgtgcccagcctcatctcctacctgacccagacagagctggccgacatctccatgctgcggagtgacagcgagaacatcctgaccaactatgagaaccagagccgggtggagaccaatgaaagagccaatgaatgtagccacagcaagaacatccagaacttccccagcgacctgattgagaaccccatcatgaagagcaagatgagcaagttctgtggggtgaatgaaacagaaaatgaagacaacaccaacagagacagccccatctttgactacagcccccggctgagcgccctgctgagccatgacaagctgatgcacagccagggcagcttcaatgacacccacaccccagagagcaatggaaacaagtgtgaggccccagccctgtccttcagtgacaagaccatgctgagcggccagagaattggagagaagttccaggaccagttcctgggcattgctgccatcaacatcagcctgcccggggagcagtatggccagaagagcctgaacatgatcagcagcaacccccaggtgcagtaccacaatgacaagtacatcagcaacaccagcggggaggatgagaagacccaccctggcttccagcagatgcctgaggacaaggaggatgaaagtgaaattgaggagtacagctgtgctgtgaccccaggaggagacacagacaatgccatcgtgtccctgacctgtgccacccccctgctggatgagaccatcagcgccagtgactatgagaccagcctgctgaatgaccagcagaacaacacaggaacagacacagacagtgatgatgacttctatgacacccccctgtttgaagatgatgaccatgacagcctgctgctggatggagatgaccgggactgcctgcaccctgaggactatgacaccctgcaggaggagaatgatgaaacagccagccctgcagatgtgttctatgatgtgtccaaagaaaatgaaaattccatggtgccccagggcgcccctgtgggcagcctgtctgtgaagaacaaggcccactgcctgcaggacttcctgatggatgtggagaaggatgagctggacagcggggagaagatccacctgaaccctgtgggcagtgacaaggtgaatggccagagcctggagaccggcagcgagagagaatgtaccaacatcctggagggagatgaaagtgacagcctgacagattatgacatcgtgggcggcaaggagagcttcaccgccagcctgaagtttgatgattctggctcctggaggggcaggaaggaggagtatgtgacaggccaggagttccacagcgacacagaccacctggacagcatgcagagcgaggagagctatggagactacatctatgacagcaatgaccaggatgatgatgatgatgatggcattgatgaggagggcggcggcatcagagatgaaaatggcaagccccgctgccagaatgtggccgaggacatggacatccagctgtgtgccagcatcctgaatgaaaattctgatgaaaatgaaaacatcaacaccatgatcctgctggacaagatgcacagctgcagcagcctggagaagcagcagagggtgaatgtggtgcagctggccagccccagcgagaacaacctggtgacagagaagagcaacctgcctgagtacaccacagaaattgctgggaagagcaaagaaaacctgctgaaccacgagatggtgctgaaggatgtgctgccccccatcatcaaggacacagaaagtgagaagacctttggacctgccagcatcagccatgacaacaacaacatcagcagcaccagcgagctgggcacagacctggccaacaccaaggtgaagctgatccagggcagcgagctgcctgagctgacagacagcgtgaagggcaaggatgagtacttcaagaacatgacccccaaggtggacagcagcctggaccacatcatctgcacagagccagacctgattggcaagccagctgaggagagccacctgagcctcatcgcctctgtgacagacaaggacccccagggcaatggaagtgacctgatcaagggcagagatggcaagagtgacatcctgattgaagatgagaccagcatccagaagatgtacctgggggagggggaggtgctggtggagggcctggtggaggaggagaacagacacctgaagctgctgcccgggaagaacacccgggacagcttcaagctgatcaacagccagttccccttcccccagatcaccaacaatgaggagctgaaccagaagggcagcctgaagaaggccaccgtgaccctgaaggatgagcccaacaacctgcagatcatcgtgtccaagagccctgtgcagtttgagaacctggaggagatctttgacacctctgtgtccaaggagatcagtgatgacatcaccagtgacatcacctcctgggagggcaacacccactttgaggagagcttcacagatggccctgagaaggagctggacctcttcacctacctgaagcactgtgccaagaacatcaaggccaaggatgtggccaagcccaatgaagatgtgcccagccacgtgctgatcacagccccacccatgaaggagcacctgcagctgggcgtgaacaacaccaaggagaagagcaccagcacccagaaggacagccccctgaatgacatgatccagagcaatgacctgtgcagcaaggagagcatcagcggcggcggcacagagatcagccagttcaccccagagagcattgaggccaccctgagcatcctgagcaggaagcacgtggaggatgtgggcaagaatgacttcctgcagagcgagcgctgtgccaacggcctgggcaatgacaacagcagcaacaccctgaacacagactacagcttcctggagatcaacaacaagaaggagcgcatcgagcagcagctgcccaaggagcaggccctgagccccaggagccaggagaaggaggtgcagatccctgagctgagccaggtgtttgtggaggatgtgaaggacatcctgaagagccggctgaaggagggccacatgaacccccaggaggtggaggagcccagcgcctgtgccgacaccaagatcctgatccagaacctgatcaagaggatcaccaccagccagctggtgaatgaggccagcacagtgcccagcgacagccagatgtctgacagcagcggcgtgagccccatgaccaacagcagcgagctgaagccagagagcagagatgaccccttctgcatcggcaacctgaagtctgagctgctgctgaacatcctgaagcaggaccagcacagccagaagatcaccggggtgtttgagctgatgagggagctgacccacatggagtatgacctggagaagaggggcatcaccagcaaggtgctgcccctgcagctggagaacatcttctacaagctgctggctgatggctacagcgagaagattgagcacgtgggggacttcaaccagaaggcctgcagcaccagcgagatgatggaggagaagccccacatcctgggggacatcaagagcaaggagggcaactactacagccccaacctggagaccgtgaaggagatcggcctggagagcagcacagtgtgggccagcaccctgcccagagatgagaagctgaaggacctgtgcaatgacttccccagccacctggagtgcaccagcggcagcaaggagatggccagcggggacagcagcacagagcagttcagcagcgagctgcagcagtgcctgcagcacacagagaagatgcatgagtacctgaccctgctgcaggacatgaagccacccctggacaaccaggagagcctggacaacaacctggaggccctgaagaaccagctgcggcagctggagacctttgagctgggcctggcccccatcgccgtcatcctgaggaaggacatgaagctggccgaggagttcctgaagagcctgcccagcgacttcccccggggccacgtggaggagctgagcatcagccaccagagcctgaagacagccttcagcagcctgagcaatgtgagcagcgagaggaccaagcagatcatgctggccatcgacagcgagatgagcaagctggccgtgtcccatgaggagttcctgcacaagctgaagagcttcagtgactgggtgtctgagaagagcaagtctgtgaaggacattgaaattgtgaatgtgcaggacagtgaatatgtgaagaagaggctggagttcctgaagaatgtgctgaaggacctgggccacaccaagatgcagctggagaccacagcctttgatgtgcagttcttcatcagtgaatatgcccaggacctgagccccaaccagagcaagcagctgctgcggctgctgaacaccacccagaagtgcttcctggatgtgcaggagagcgtgaccacccaggtggagcggctggagacccagctgcacctggagcaggacctggatgaccagaagatcgtggccgagcggcagcaggagtacaaggagaagctgcagggcatctgtgacctgctgacccagacagagaacagactcatcggccaccaggaggccttcatgattggagatggcaccgtggagctgaagaagtaccagagcaagcaggaggagctgcagaaggacatgcagggcagcgcccaggccctggccgaggtggtgaagaacacagagaacttcctgaaggaaaatggagagaagctgagccaggaggacaaggccctgattgagcagaagctgaatgaggccaagatcaagtgtgagcagctgaacctgaaggccgagcagagcaagaaggagctggacaaggtggtgaccacagccatcaaggaggagacagagaaggtggccgctgtgaagcagctggaggagagcaagaccaagattgagaacctgctggactggctgagcaatgtggacaaggacagcgagcgggccggcaccaagcacaagcaggtgattgagcagaatggcacccacttccaggagggagatggcaagagcgccatcggggaggaggatgaggtgaatggaaacctgctggagacagatgtggatggccaggtgggcaccacccaggagaacctgaaccagcagtaccagaaggtgaaggcccagcacgagaagatcatcagccagcaccaggccgtcatcatcgccacccagagcgcccaggtgctgctggagaagcagggccagtacctgagccctgaggagaaggagaagctgcagaagaacatgaaggagctgaaggtgcactatgaaacagccctggccgagagcgagaagaagatgaagctgacccacagcctgcaggaggagctggagaagtttgatgctgactacacagaatttgagcactggctgcagcagagcgagcaggagctggagaacctggaggccggggctgatgacatcaatggcctgatgaccaagctgaagaggcagaagagcttctctgaagatgtgatcagccacaagggggacctgcgctacatcaccatcagcggcaacagagtgctggaggccgccaagagctgcagcaagagagatggcggcaaggtggacaccagcgccacccaccgggaggtgcagaggaagctggaccacgccacagaccgcttccgcagcctgtacagcaaatgtaatgtgctgggcaacaacctgaaggacctggtggacaagtaccagcactatgaagatgccagctgtggcctgctggccggcctgcaggcctgtgaggccacagccagcaagcacctgtctgagcccatcgctgtggaccccaagaacctgcagaggcagctggaggagaccaaggccctgcagggccagatcagcagccagcaggtggccgtggagaagctgaagaagacagctgaggtgctgctggatgcccggggcagcctgctgcctgccaagaatgacatccagaagaccctggatgacatcgtgggccgctatgaggacctgagcaagtctgtgaatgaaagaaatgagaagctgcagatcaccctgaccaggagcctgtctgtgcaggacggcctggatgagatgctggactggatgggaaatgtggagagcagcctgaaggagcaggatgtgggcaccggctactgccgcagcagcgagcagtacaagtgccatgaatag

SEQ ID NO: 150713 - DNA, 22386 bp, synthetic construct
  misc_feature 1..22386: note = Description of Artificial Sequence: Synthetic coding sequence
  source 1..22386: mol_type = other DNA
atggccggctacctgagccctgctgcctacctgtatgtggaggagcaggagtacctgcaggcctatgaagatgtgctggagcgctacaaggatgagcgggacaaggtgcagaagaagaccttcaccaagtggatcaaccagcacctgatgaaggtgaggaagcacgtgaatgacctgtatgaggacctgagagatggccacaacctgatcagcctgctggaggtgctgagcggggacaccctgccccgggagaagggccgcatgaggttccaccggctgcagaatgtgcagatcgccctggactacctgaagaggcggcaggtgaagctggtgaacatcagaaatgatgacatcacagatggcaaccccaagctgaccctgggcctcatctggaccatcatcctgcacttccagatcagtgacatccacgtgactggagagagcgaggacatgtctgccaaggagcggctgctgctgtggacccagcaggccacagagggctacgccggcatccgctgtgagaacttcaccacctgctggagagatggcaagctgttcaatgccatcatccacaagtacagaccagacctgattgacatgaacacagtggccgtgcagagcaacctggccaacctggagcacgccttctacgtggccgagaagattggagtcatccggctgctggaccctgaagatgtggatgtgagcagcccagatgagaagagcgtcatcacctacgtgagcagcctgtatgatgccttccccaaggtgcctgagggcggggagggcatcggggccaatgatgtggaggtgaagtggattgagtaccagaacatggtgaactacctgatccagtggatccgccaccacgtgaccaccatgtctgagaggaccttccccaacaaccctgtggagctgaaggccctgtacaaccagtacctgcagttcaaggagacagagatcccccccaaggagacagagaagagcaagatcaagaggctgtacaagctgctggagatctggattgaatttggccgcatcaagctgctgcagggctaccaccccaatgacatcgagaaggagtggggcaagctgatcatcgccatgctggagcgggagaaggccctgcggcctgaggtggagcggctggagatgctgcagcagatcgccaacagagtgcagagggacagcgtcatctgtgaggacaagctgatcctggccggaaatgccctgcagagcgacagcaagaggctggagagcggcgtgcagttccagaatgaggccgagattgctggctacatcctggagtgtgagaacctgctgcggcagcacgtgattgatgtgcagatcctgattgatggcaagtactaccaggccgaccagctggtgcagagggtggccaagctgagagatgagatcatggccctgagaaatgaatgttcttctgtgtacagcaagggccgcatcctgaccacagagcagaccaagctgatgatcagcggcatcacccagagcctgaacagcggctttgcccagaccctgcaccccagcctgaccagcggcctgacccagagcctgacccccagcctgaccagcagctccatgaccagcggcctgagcagcggcatgaccagccggctgacccccagcgtgaccccagcctacaccccaggcttccccagcggcctggtgcccaacttcagcagtggagtggagcccaacagcctgcagaccctgaagctgatgcagatcaggaagcccctgctgaagagcagcctgctggaccagaacctgacagaggaggagatcaacatgaagtttgtgcaggacctgctgaactgggtggatgagatgcaggtgcagctggacagaacagagtggggcagtgacctgcccagcgtggagagccacctggagaaccacaagaatgtgcaccgggccatcgaggagtttgagagcagcctgaaggaggccaagatcagcgagatccagatgacagcccccctgaagctgacctacgccgagaagctgcaccggctggagagccagtatgccaagctgctgaacaccagcaggaaccaggagcggcacctggacaccctgcacaactttgtgtcccgggccaccaatgagctgatctggctgaatgagaaggaggaggaggaggtggcctatgactggagcgagaggaacaccaacatcgccaggaagaaggactaccacgccgagctgatgagggagctggaccagaaggaggagaacatcaagtctgtgcaggagattgctgagcagctgctgctggagaaccacccagcccggctgaccatcgaggcctacagagctgccatgcagacccagtggagctggatcctgcagctgtgccagtgtgtggagcagcacatcaaggaaaatacagcctactttgagttcttcaatgatgccaaggaggccacagactacctgaggaacctgaaggatgccatccagaggaagtacagctgtgacaggagcagcagcatccacaagctggaggacctggtgcaggagagcatggaggagaaggaggagctgctgcagtacaagagcaccatcgccaacctgatgggcaaggccaagaccatcatccagctgaagcccaggaacagcgactgccccctgaagaccagcatccccatcaaggccatctgtgactaccggcagatcgagatcaccatctacaaggatgatgaatgtgtgctggccaacaacagccaccgggccaagtggaaggtgatcagccccactggaaatgaggccatggtgcccagcgtgtgcttcaccgtgcccccacccaacaaggaggccgtggacctggccaacagaattgagcagcagtaccagaatgtgctgaccctgtggcatgagagccacatcaacatgaagtctgtggtgtcctggcactacctgatcaatgaaattgaccgcatccgggccagcaatgtggccagcatcaagaccatgctgcccggggagcaccagcaggtgctgagcaacctgcagagcagatttgaggacttcctggaggacagccaggagagccaggtgttcagcggcagtgacatcacccagctggagaaggaggtgaatgtgtgcaagcagtactaccaggagctgctgaagtctgctgagcgggaggagcaggaggagagcgtgtacaacctgtacatcagcgaggtgaggaacatccggctgcggctggagaactgtgaagatagactcatccggcagatccgcacccccctggagagagatgacctgcacgagagcgtcttccgcatcacagagcaggagaagctgaagaaggagctggagcggctgaaggatgacctgggcaccatcaccaacaagtgtgaggagttcttcagccaggccgccgccagcagctctgtgcccaccctgcggtctgagctgaatgtggtgctgcagaacatgaaccaggtgtacagcatgagcagcacctacatcgacaagctgaagacagtgaacctggtgctgaagaacacccaggccgctgaggccctggtgaagctgtatgagaccaagctgtgtgaggaggaggccgtgattgctgacaagaacaacattgaaaatctcatcagcaccctgaagcagtggaggtctgaggtggatgagaagaggcaggtgttccacgccctggaggatgagctgcagaaggccaaggccatcagtgatgagatgttcaagacctacaaggagcgggacctggactttgactggcacaaggagaaggctgaccagctggtggagcgctggcagaatgtgcacgtgcagattgacaaccggctgcgggacctggagggcatcggcaagagcctgaagtactacagagacacctaccaccccctggatgactggatccagcaggtggagaccacccagaggaagatccaggagaaccagcctgagaacagcaagaccctggccacccagctgaaccagcagaagatgctggtgtctgaaattgagatgaagcagagcaagatggatgagtgccagaagtatgcagagcagtacagcgccaccgtgaaggactatgagctgcagaccatgacctaccgggccatggtggacagccagcagaagagccctgtgaagagaagaaggatgcagagcagcgctgacctgatcatccaggagttcatggacctgcggacccgctacacagccctggtgaccctgatgacccagtacatcaagtttgctggggacagcctgaagaggctggaggaggaggagaagagcctggaggaggagaagaaggagcacgtggagaaggccaaggagctgcagaagtgggtgagcaacatcagcaagaccctgaaggatgctgagaaggccggcaagccacccttcagcaagcagaagatcagcagcgaggagatcagcaccaagaaggagcagctgtctgaggccctgcagaccatccagctgttcctggccaagcacggggacaagatgacagatgaggagagaaatgagctggagaagcaggtgaagaccctgcaggagagctacaacctgctcttcagcgagagcctgaagcagctgcaggagagccagaccagcggagatgtgaaggtggaggagaagctggacaaggtgattgctggcaccatcgaccagaccactggagaggtgctgagcgtcttccaggccgtgctgcggggcctgattgattatgacaccggcatccggctgctggagacccagctgatgatcagcggcctcatcagccctgagctgaggaaatgttttgacctgaaggatgccaagagccacggcctgattgatgagcagatcctgtgccagctgaaggagctgagcaaggccaaggagatcatctctgctgccagccccaccaccatccctgtgctggatgccctggcccagagcatgatcacagagagcatggccatcaaggtgctggagatcctgctgagcacaggcagcctggtgatcccagccaccggggagcagctgaccctgcagaaggccttccagcagaacctggtgtcctctgccctcttcagcaaggtgctggagcggcagaacatgtgcaaggacctgattgacccctgcaccagcgagaaggtgtccctgattgacatggtgcagaggagcaccctgcaggagaacacaggcatgtggctgctgcctgtgcggccccaggagggcggccgcatcaccctgaagtgtggcaggaacatcagcatcctgcgggccgcccacgagggcctgattgaccgggagaccatgttccggctgctgagcgcccagctgctgagcggcggcctcatcaacagcaacagcggccagaggatgacagtggaggaggccgtgcgggagggcgtgattgaccgggacacagccagcagcatcctgacctaccaggtgcagacaggaggcatcatccagagcaacccagccaagaggctgactgtggatgaagctgtgcagtgtgacctgatcaccagcagcagcgccctgctggtgctggaggcccagaggggctacgtgggcctcatctggccccacagcggggagatcttccccaccagcagcagcctgcagcaggagctgatcaccaatgagctggcctacaagatcctgaatggccggcagaagattgctgccctgtacatccctgagagcagccaggtgattggcctggatgctgccaagcagctgggcatcatcgacaacaacacagccagcatcctgaagaacatcaccctgcctgacaagatgccagacctgggggacctggaggcctgcaagaatgcccggcgctggctgtccttctgcaagttccagcccagcacagtgcatgactaccggcaggaggaggatgtgtttgatggagaggagcctgtgaccacccagaccagcgaggagaccaagaagctgttcctgagctacctgatgatcaacagctacatggatgccaacacaggccagaggctgctgctgtatgatggagacctggatgaggccgtgggcatgctgctggagggctgccacgccgagtttgatggcaacacagccatcaaggagtgcctggatgtgctgagcagcagcggggtcttcctgaacaatgccagcggccgggagaaggatgagtgcacagccacccccagcagcttcaacaagtgccactgtggggagcctgagcacgaggagaccccagaaaatagaaaatgtgccattgatgaggagttcaatgagatgaggaacacagtcatcaacagcgagttcagccagagcggcaagctggccagcaccatcagcattgaccccaaggtgaacagcagccccagcgtgtgtgtgcccagcctcatctcctacctgacccagacagagctggccgacatctccatgctgcggagtgacagcgagaacatcctgaccaactatgagaaccagagccgggtggagaccaatgaaagagccaatgaatgtagccacagcaagaacatccagaacttccccagcgacctgattgagaaccccatcatgaagagcaagatgagcaagttctgtggggtgaatgaaacagaaaatgaagacaacaccaacagagacagccccatctttgactacagcccccggctgagcgccctgctgagccatgacaagctgatgcacagccagggcagcttcaatgacacccacaccccagagagcaatggaaacaagtgtgaggccccagccctgtccttcagtgacaagaccatgctgagcggccagagaattggagagaagttccaggaccagttcctgggcattgctgccatcaacatcagcctgcccggggagcagtatggccagaagagcctgaacatgatcagcagcaacccccaggtgcagtaccacaatgacaagtacatcagcaacaccagcggggaggatgagaagacccaccctggcttccagcagatgcctgaggacaaggaggatgaaagtgaaattgaggagtacagctgtgctgtgaccccaggaggagacacagacaatgccatcgtgtccctgacctgtgccacccccctgctggatgagaccatcagcgccagtgactatgagaccagcctgctgaatgaccagcagaacaacacaggaacagacacagacagtgatgatgacttctatgacacccccctgtttgaagatgatgaccatgacagcctgctgctggatggagatgaccgggactgcctgcaccctgaggactatgacaccctgcaggaggagaatgatgaaacagccagccctgcagatgtgttctatgatgtgtccaaagaaaatgaaaattccatggtgccccagggcgcccctgtgggcagcctgtctgtgaagaacaaggcccactgcctgcaggacttcctgatggatgtggagaaggatgagctggacagcggggagaagatccacctgaaccctgtgggcagtgacaaggtgaatggccagagcctggagaccggcagcgagagagaatgtaccaacatcctggagggagatgaaagtgacagcctgacagattatgacatcgtgggcggcaaggagagcttcaccgccagcctgaagtttgatgattctggctcctggaggggcaggaaggaggagtatgtgacaggccaggagttccacagcgacacagaccacctggacagcatgcagagcgaggagagctatggagactacatctatgacagcaatgaccaggatgatgatgatgatgatggcattgatgaggagggcggcggcatcagagatgaaaatggcaagccccgctgccagaatgtggccgaggacatggacatccagctgtgtgccagcatcctgaatgaaaattctgatgaaaatgaaaacatcaacaccatgatcctgctggacaagatgcacagctgcagcagcctggagaagcagcagagggtgaatgtggtgcagctggccagccccagcgagaacaacctggtgacagagaagagcaacctgcctgagtacaccacagaaattgctgggaagagcaaagaaaacctgctgaaccacgagatggtgctgaaggatgtgctgccccccatcatcaaggacacagaaagtgagaagacctttggacctgccagcatcagccatgacaacaacaacatcagcagcaccagcgagctgggcacagacctggccaacaccaaggtgaagctgatccagggcagcgagctgcctgagctgacagacagcgtgaagggcaaggatgagtacttcaagaacatgacccccaaggtggacagcagcctggaccacatcatctgcacagagccagacctgattggcaagccagctgaggagagccacctgagcctcatcgcctctgtgacagacaaggacccccagggcaatggaagtgacctgatcaagggcagagatggcaagagtgacatcctgattgaagatgagaccagcatccagaagatgtacctgggggagggggaggtgctggtggagggcctggtggaggaggagaacagacacctgaagctgctgcccgggaagaacacccgggacagcttcaagctgatcaacagccagttccccttcccccagatcaccaacaatgaggagctgaaccagaagggcagcctgaagaaggccaccgtgaccctgaaggatgagcccaacaacctgcagatcatcgtgtccaagagccctgtgcagtttgagaacctggaggagatctttgacacctctgtgtccaaggagatcagtgatgacatcaccagtgacatcacctcctgggagggcaacacccactttgaggagagcttcacagatggccctgagaaggagctggacctcttcacctacctgaagcactgtgccaagaacatcaaggccaaggatgtggccaagcccaatgaagatgtgcccagccacgtgctgatcacagccccacccatgaaggagcacctgcagctgggcgtgaacaacaccaaggagaagagcaccagcacccagaaggacagccccctgaatgacatgatccagagcaatgacctgtgcagcaaggagagcatcagcggcggcggcacagagatcagccagttcaccccagagagcattgaggccaccctgagcatcctgagcaggaagcacgtggaggatgtgggcaagaatgacttcctgcagagcgagcgctgtgccaacggcctgggcaatgacaacagcagcaacaccctgaacacagactacagcttcctggagatcaacaacaagaaggagcgcatcgagcagcagctgcccaaggagcaggccctgagccccaggagccaggagaaggaggtgcagatccctgagctgagccaggtgtttgtggaggatgtgaaggacatcctgaagagccggctgaaggagggccacatgaacccccaggaggtggaggagcccagcgcctgtgccgacaccaagatcctgatccagaacctgatcaagaggatcaccaccagccagctggtgaatgaggccagcacagtgcccagcgacagccagatgtctgacagcagcggcgtgagccccatgaccaacagcagcgagctgaagccagagagcagagatgaccccttctgcatcggcaacctgaagtctgagctgctgctgaacatcctgaagcaggaccagcacagccagaagatcaccggggtgtttgagctgatgagggagctgacccacatggagtatgacctggagaagaggggcatcaccagcaaggtgctgcccctgcagctggagaacatcttctacaagctgctggctgatggctacagcgagaagattgagcacgtgggggacttcaaccagaaggcctgcagcaccagcgagatgatggaggagaagccccacatcctgggggacatcaagagcaaggagggcaactactacagccccaacctggagaccgtgaaggagatcggcctggagagcagcacagtgtgggccagcaccctgcccagagatgagaagctgaaggacctgtgcaatgacttccccagccacctggagtgcaccagcggcagcaaggagatggccagcggggacagcagcacagagcagttcagcagcgagctgcagcagtgcctgcagcacacagagaagatgcatgagtacctgaccctgctgcaggacatgaagccacccctggacaaccaggagagcctggacaacaacctggaggccctgaagaaccagctgcggcagctggagacctttgagctgggcctggcccccatcgccgtcatcctgaggaaggacatgaagctggccgaggagttcctgaagagcctgcccagcgacttcccccggggccacgtggaggagctgagcatcagccaccagagcctgaagacagccttcagcagcctgagcaatgtgagcagcgagaggaccaagcagatcatgctggccatcgacagcgagatgagcaagctggccgtgtcccatgaggagttcctgcacaagctgaagagcttcagtgactgggtgtctgagaagagcaagtctgtgaaggacattgaaattgtgaatgtgcaggacagtgaatatgtgaagaagaggctggagttcctgaagaatgtgctgaaggacctgggccacaccaagatgcagctggagaccacagcctttgatgtgcagttcttcatcagtgaatatgcccaggacctgagccccaaccagagcaagcagctgctgcggctgctgaacaccacccagaagtgcttcctggatgtgcaggagagcgtgaccacccaggtggagcggctggagacccagctgcacctggagcaggacctggatgaccagaagatcgtggccgagcggcagcaggagtacaaggagaagctgcagggcatctgtgacctgctgacccagacagagaacagactcatcggccaccaggaggccttcatgattggagatggcaccgtggagctgaagaagtaccagagcaagcaggaggagctgcagaaggacatgcagggcagcgcccaggccctggccgaggtggtgaagaacacagagaacttcctgaaggaaaatggagagaagctgagccaggaggacaaggccctgattgagcagaagctgaatgaggccaagatcaagtgtgagcagctgaacctgaaggccgagcagagcaagaaggagctggacaaggtggtgaccacagccatcaaggaggagacagagaaggtggccgctgtgaagcagctggaggagagcaagaccaagattgagaacctgctggactggctgagcaatgtggacaaggacagcgagcgggccggcaccaagcacaagcaggtgattgagcagaatggcacccacttccaggagggagatggcaagagcgccatcggggaggaggatgaggtgaatggaaacctgctggagacagatgtggatggccaggtgggcaccacccaggagaacctgaaccagcagtaccagaaggtgaaggcccagcacgagaagatcatcagccagcaccaggccgtcatcatcgccacccagagcgcccaggtgctgctggagaagcagggccagtacctgagccctgaggagaaggagaagctgcagaagaacatgaaggagctgaaggtgcactatgaaacagccctggccgagagcgagaagaagatgaagctgacccacagcctgcaggaggagctggagaagtttgatgctgactacacagaatttgagcactggctgcagcagagcgagcaggagctggagaacctggaggccggggctgatgacatcaatggcctgatgaccaagctgaagaggcagaagagcttctctgaagatgtgatcagccacaagggggacctgcgctacatcaccatcagcggcaacagagtgctggaggccgccaagagctgcagcaagagagatggcggcaaggtggacaccagcgccacccaccgggaggtgcagaggaagctggaccacgccacagaccgcttccgcagcctgtacagcaaatgtaatgtgctgggcaacaacctgaaggacctggtggacaagtaccagcactatgaagatgccagctgtggcctgctggccggcctgcaggcctgtgaggccacagccagcaagcacctgtctgagcccatcgctgtggaccccaagaacctgcagaggcagctggaggagaccaaggccctgcagggccagatcagcagccagcaggtggccgtggagaagctgaagaagacagctgaggtgctgctggatgcccggggcagcctgctgcctgccaagaatgacatccagaagaccctggatgacatcgtgggccgctatgaggacctgagcaagtctgtgaatgaaagaaatgagaagctgcagatcaccctgaccaggagcctgtctgtgcaggacggcctggatgagatgctggactggatgggaaatgtggagagcagcctgaaggagcagggccaggtgcccctgaacagcacagccctgcaggacatcatcagcaagaacatcatgctggagcaggacattgctggccggcagagcagcatcaatgccatgaatgagaaggtgaagaagttcatggagaccacagaccccagcacagccagcagcctgcaggccaagatgaaggacctgagcgcccgcttcagcgaggccagccacaagcacaaggagaccctggccaagatggaggagctgaagaccaaggtggagctgtttgagaacctgtctgagaagctgcagaccttcctggagaccaagacccaggccctgacagaggtggatgtgcctgggaaggatgtgacagagctgagccagtacatgcaggagagcaccagcgagttcctggagcacaagaagcacctggaggtgctgcacagcctgctgaaggagatcagcagccacggcctgcccagcgacaaggccctggtgctggagaagaccaacaacctgagcaagaagttcaaggagatggaggacaccatcaaggagaagaaggaggccgtgaccagctgccaggagcagctggatgccttccaggtgctggtgaagagcctgaagtcctggatcaaggagaccaccaagaaggtgcccatcgtgcagcccagctttggagctgaggacctgggcaagagcctggaggacaccaagaagctgcaggagaagtggagcctgaagaccccagagatccagaaggtgaacaacagcggcatcagcctgtgcaacctgatctctgctgtgaccaccccagccaaggccatcgctgctgtgaagtctggaggagctgtgctgaatggagagggcacagccaccaacacagaggagttctgggccaacaagggcctgaccagcatcaagaaggacatgacagacatcagccacggctatgaggacctgggcctgctgctgaaggacaagattgctgagctgaacaccaagctgagcaagctgcagaaggcccaggaggagagcagcgccatgatgcagtggctgcagaagatgaacaagacagccaccaagtggcagcagaccccagcccccacagacacagaggccgtgaagacccaggtggagcagaacaagagctttgaagctgagctgaagcagaatgtgaacaaggtgcaggagctgaaggacaagctgacagagctgctggaggagaacccagacaccccagaggccccccgctggaagcagatgctgacagaaattgacagcaagtggcaggagctgaaccagctgaccatcgaccggcagcagaagctggaggagagcagcaacaacctgacccagttccagacagtggaggcccagctgaagcagtggctggtggagaaggagctgatggtgtctgtgctgggccccctgagcattgaccccaacatgctgaacacccagaggcagcaggtgcagatcctgctgcaggagtttgccaccaggaagccccagtatgagcagctgacagctgctggccagggcatcctgagcaggcctggagaggaccccagcctgcggggcatcgtgaaggagcagctggccgctgtgacccagaagtgggacagcctgaccggccagctgagtgacagatgtgactggattgaccaggccatcgtgaagagcacccagtaccagagcctgctgcggagcctgagtgacaagctgagtgacctggacaacaagctgagcagcagcctggccgtgtccacccacccagatgccatgaaccagcagctggagacagcccagaagatgaagcaggagatccagcaggagaagaagcagatcaaggtggcccaggccctgtgtgaggacctgagcgccctggtgaaggaggagtacctgaaggccgagctgagccggcagctggagggcatcctgaagagcttcaaggatgtggagcagaaggcagaaaatcatgtgcagcacctgcagagcgcctgtgccagcagccaccagttccagcagatgagccgggacttccaggcctggctggacaccaagaaggaggagcagaacaagagccaccccatcagcgccaagctggatgtgctggagagcctcatcaaggaccacaaggacttcagcaagaccctgacagcccagagccacatgtatgagaagaccatcgccgagggggagaacctgctgctgaagacccagggcagcgagaaggccgccctgcagctgcagctgaacaccatcaagaccaactgggacaccttcaacaagcaggtgaaggagcgggagaacaagctgaaggagagcctggagaaggccctgaagtacaaggagcaggtggagaccctgtggccctggattgacaagtgccagaacaacctggaggagatcaagttctgcctggaccctgcagaaggagaaaattccatcgccaagctgaagagcctgcagaaggagatggaccagcacttcggcatggtggagctgctgaacaacacagccaacagcctgctgtctgtgtgtgaaattgacaaggaggtggtgacagatgagaacaagagcctcatccagaaggtggacatggtgacagagcagctgcacagcaagaagttctgcctggagaacatgacccagaagttcaaggagttccaggaggtgtccaaggagagcaagaggcagctgcagtgtgccaaggagcagctggacatccatgacagcctgggcagccaggcctacagcaacaagtacctgaccatgctgcagacccagcagaagagcctgcaggccctgaagcaccaggtggacctggccaagaggctggcccaggacctggtggtggaggccagtgacagcaagggcaccagtgatgtgctgctgcaggtggagaccatcgcccaggagcacagcaccctgagccagcaggtggatgagaagtgcagcttcctggagaccaagctgcagggcatcggccacttccagaacaccatccgggagatgttcagccagtttgctgagtttgatgatgagctggacagcatggcccctgtgggcagagatgctgagaccctgcagaagcagaaggagaccatcaaggccttcctgaagaagctggaggccctgatggccagcaatgacaatgccaacaagacctgcaagatgatgctggccacagaggagaccagcccagacctggtgggcatcaagagggacctggaggccctgagcaagcagtgcaacaagctgctggaccgggcccaggcccgggaggagcaggtggagggcaccatcaagaggctggaggagttctacagcaagctgaaggagttcagcatcctgctgcagaaggccgaggagcacgaggagagccagggccctgtgggcatggagacagagaccatcaaccagcagctgaacatgttcaaggtgttccagaaggaggagattgagcccctgcagggcaagcagcaggatgtgaactggctgggccagggcctcatccagagcgctgccaagagcaccagcacccagggcctggagcatgacctggatgatgtgaatgcccgctggaagaccctgaacaagaaggtggcccagagagctgcccagctgcaggaggccctgctgcactgcggccgcttccaggatgccctggagagcctgctgtcctggatggtggacacagaggagctggtggccaaccagaagccacccagcgctgagttcaaggtggtgaaggcccagatccaggagcagaagctgctgcagaggctgctggatgacaggaagagcacagtggaggtgatcaagcgggagggggagaagatcgccaccacagctgagcctgctgacaaggtgaagatcctgaagcagctgagcctgctggacagccgctgggaggccctgctgaacaaggccgagaccaggaaccggcagctggagggcatctctgtggtggcccagcagttccacgagaccctggagcccctgaatgagtggctgaccaccatcgagaagaggctggtgaactgtgagcccatcggcacccaggccagcaagctggaggagcagatcgcccagcacaaggtgctgcaggaggacatcctgctgaggaagcagaatgtggaccaggccctgctgaatggcctggagctgctgaagcagaccactggagatgaggtgctgatcatccaggacaagctggaggccatcaaggcccgctacaaggacatcaccaagctgagcacagatgtggccaagaccctggagcaggccctgcagctggcccggcggctgcacagcacccatgaggagctgtgcacctggctggacaaggtggaggtggagctgctgtcctatgagacccaggtgctgaagggggaggaggccagccaggcccagatgaggcccaaggagctgaagaaggaggccaagaacaacaaggccctgctggacagcctgaatgaggtgtcctctgccctgctggagctggtgccctggagggcccgggagggcctggagaagatggtggctgaagataatgaaagataccgcctggtgtctgacaccatcacccagaaggtggaggagattgatgctgccatcctgcggagccagcagtttgaccaggccgcagatgctgagctgtcctggatcacagaaacagagaagaagctgatgagcctgggggacatccggctggagcaggaccagaccagcgcccagctgcaggtgcagaagaccttcaccatggagatcctgcggcacaaggacatcattgatgacctggtgaagagcggccacaagatcatgacagcctgcagcgaggaggagaagcagagcatgaagaagaagctggacaaggtgctgaagaactatgacaccatctgccagatcaacagcgagcgctacctgcagctggagcgggcccagagcctggtgaaccagttctgggagacctatgaggagctgtggccctggctgacagagacccagagcatcatcagccagctgcctgccccagccctggagtatgagaccctgcggcagcagcaggaggagcaccggcagctgcgggagctgattgctgagcacaagccccacatcgacaagatgaacaagacaggcccccagctgctggagctgagccctggagagggcttcagcatccaggagaagtatgtggccgctgacaccctgtacagccagatcaaggaggatgtgaagaagagagctgtggccctggatgaggccatcagccagagcacccagttccatgacaagattgaccagatcctggagagcctggagagaattgtggagcggctgcggcagccccccagcatctctgctgaggtggagaagatcaaggagcagatcagcgagaacaagaatgtgtctgtggacatggagaagctgcagcccctgtatgagaccctgaagcagagaggagaggagatgattgcccggagcggcggcacagacaaggacatcagcgccaaggctgtgcaggacaagctggaccagatggtgttcatctgggagaacatccacaccctggtggaggagcgggaggccaagctgctggatgtgatggagctggccgagaagttctggtgtgaccacatgagcctcatcgtgaccatcaaggacacccaggacttcatccgggacctggaggaccccggcatcgaccccagcgtggtgaagcagcagcaggaggccgctgagaccatccgggaggagattgatggcctgcaggaggagctggacatcgtcatcaacctgggcagcgagctgattgctgcctgtggggagccagacaagcccatcgtgaagaagagcattgatgagctgaacagcgcctgggacagcctgaacaaggcctggaaggacagaattgacaagctggaggaggccatgcaggccgctgtgcagtaccaggacggcctgcaggccgtgtttgactgggtggacattgctgggggcaagctggcctccatgagccccatcggcacagacctggagaccgtgaagcagcagatcgaggagctgaagcagttcaagtctgaggcctaccagcagcagatcgagatggagcggctgaaccaccaggccgagctgctgctgaagaaggtgacagaggagagtgacaagcacacagtgcaggaccccctgatggagctgaagctgatctgggacagcctggaggagcgcatcatcaaccggcagcacaagctggagggcgccctgctggccctgggccagttccagcacgccctggatgagctgctggcctggctgacccacacagagggcctgctgtctgagcagaagcctgtgggcggggaccccaaggccatcgagattgagctggccaagcaccacgtgctgcagaatgatgtgctggcccaccagagcacagtggaggccgtgaacaaggctggaaatgacctgattgagagcagcgctggggaggaggccagcaacctgcagaacaagctggaggtgctgaaccagcgctggcagaatgtgctggagaagacagagcagaggaagcagcagctggatggagccctgcggcaggccaagggcttccatggagaaattgaggacctgcagcagtggctgacagacacagagcggcacctgctggccagcaagcccctgggcggcctgcctgagacagccaaggagcagctgaatgtgcacatggaggtgtgtgccgcctttgaggccaaggaggagacctacaagagcctgatgcagaagggccagcagatgctggcccgctgccccaagtctgctgagaccaacatcgaccaggacatcaacaacctgaaggagaagtgggagagcgtggagaccaagctgaatgaaaggaagaccaagctggaggaggccctgaacctggccatggagttccacaacagcctgcaggacttcatcaactggctgacccaggccgagcagaccctgaatgtggccagccggcccagcctcatcctggacacagtgctcttccagattgatgagcacaaggtgtttgccaatgaggtgaacagccaccgggagcagatcatcgagctggacaagacaggcacccacctgaagtacttcagccagaagcaggatgtggtgctgatcaagaacctgctgatctctgtgcagagccgctgggagaaggtggtgcagaggctggtggagcggggccgcagcctggatgatgccaggaagagggccaagcagttccacgaggcctggagcaagctgatggagtggctggaggagagcgagaagagcctggacagcgagctggagatcgccaatgaccctgacaagatcaagacccagctggcccagcacaaggagttccagaagagcctgggcgccaagcacagcgtgtatgacaccaccaacagaacaggccgcagcctgaaggagaagaccagcctggctgatgacaacctgaagctggatgacatgctgtctgagctgcgggacaagtgggacaccatctgtgggaagtctgtggagcggcagaacaagctggaggaggccctgctcttcagcggccagttcacagatgccctgcaggccctgattgactggctgtacagagtggagccccagctggccgaggaccagcctgtgcatggagacatcgacctggtgatgaacctgattgacaaccacaaggccttccagaaggagctgggcaagaggaccagctctgtgcaggccctgaagaggtctgcccgggagctgattgagggcagcagagatgacagctcctgggtgaaggtgcagatgcaggagctgagcacccgctgggagaccgtgtgtgccctgagcatcagcaagcagacccggctggaggccgccctgcggcaggccgaggagttccacagcgtggtgcacgccctgctggagtggctggccgaggccgagcagaccctgcgcttccatggagtgctgcctgatgatgaagatgccctgcggaccctgattgaccagcacaaggagttcatgaagaagctggaggagaagagagctgagctgaacaaggccaccaccatgggagacacagtgctggccatctgccacccagacagcatcaccaccatcaagcactggatcaccatcatccgggccaggtttgaggaggtgctggcctgggccaagcagcaccagcagaggctggccagcgccctggccggcctgattgccaagcaggagctgctggaggccctgctggcctggctgcagtgggccgagaccaccctgacagacaaggacaaggaggtgatcccccaggagattgaggaggtgaaggccctgattgctgagcaccagaccttcatggaggagatgaccaggaagcagccagatgtggacaaggtgaccaagacctacaagagaagagctgctgaccccagcagcctgcagagccacatccctgtgctggacaagggccgggccggcaggaagcgcttccctgccagcagcctgtaccccagcggcagccagacccagatcgagaccaagaacccccgggtgaacctgctggtgtccaagtggcagcaggtgtggctgctggccctggagaggaggaggaagctgaatgatgccctggaccggctggaggagctgcgggagtttgccaactttgattttgacatctggaggaagaagtacatgcgctggatgaaccacaagaagagccgggtgatggacttcttcagaagaattgacaaggaccaggacggcaagatcacccggcaggagttcattgatggcatcctgagcagcaagttccccaccagccggctggagatgtctgctgtggccgacatctttgacagagatggagatggctacatcgactactatgaatttgtggccgccctgcaccccaacaaggatgcctacaagcccatcacagatgctgacaagattgaagatgaggtgacccggcaggtggccaagtgcaagtgtgccaagcgcttccaggtggagcagattggagacaacaagtaccgcttcttcctgggcaaccagtttggagacagccagcagctgcggctggtgcgcatcctgcggagcacagtgatggtgcgggtgggcggcggctggatggccctggatgagttcctggtgaagaatgacccctgccgggtgcaccaccacggcagcaagatgctgcggtctgagagcaacagcagcatcaccaccacccagcccaccatcgccaagggccgcaccaacatggagctgcgggagaagttcatcctggctgatggagccagccagggcatggccgccttccggccccggggcagaagaagccggcccagcagcagaggagccagccccaacagaagcacctctgtgagcagccaggccgcccaggccgccagcccccaggtgcctgccaccaccacccccaagggcacccccatccagggcagcaagctgcggctgcccggctacctgagcggcaagggcttccacagcggagaagattctggcctcatcaccacagctgctgcccgggtgaggacccagtttgctgacagcaagaagacccccagcaggcctggcagcagagctggcagcaaggccggcagccgggccagcagccggcggggcagtgatgccagtgactttgacatcagcgagatccagagcgtgtgcagtgatgtggagaccgtgccccagacccaccggcccacccccagggctggcagccggcccagcacagccaagcccagcaagatccccaccccccagaggaagagccctgccagcaagctggacaagagcagcaagaggtag

SEQ ID NO: 150714 - DNA, 23253 bp, synthetic construct
  misc_feature 1..23253: note = Description of Artificial Sequence: Synthetic coding sequence
  source 1..23253: mol_type = other DNA
atgattgctgctgccttcctggtgctgctgcggccctacagcatccagtgtgccctcttcctgctgctgctgctgctgggcaccatcgccaccatcgtgttcttctgctgctggcacaggaagctgcagaagggccgccaccccatgaagtctgtgttcagcggccgcagccgcagcagagatgctgtgctgcggagccaccacttccgctctgagggcttccgggccagccccaggcacctgcggaggagagtggccgctgctgctgctgcccggctggaggaggtgaagcctgtggtggaggtgcaccaccagagcgagcaggagacctctgtgaggaagaggcgcatcaagaagagcagccgggtgcagcctgagttctaccacagcgtgcagggcgccagcatcagaagacccagcagtggaaatgccagctaccgctgcagcatgagcagcagcgctgacttcagtgatgaagatgacttcagccagaagagcggcagcgccagccctgcccctggggacaccctgccctggaacctgcccaagcatgagaggagcaagaggaagatccagggcggctctgtgctggaccctgctgagagagctgtgctgagaattgctgatgagcgggacaaggtgcagaagaagaccttcaccaagtggatcaaccagcacctgatgaaggtgaggaagcacgtgaatgacctgtatgaggacctgagagatggccacaacctgatcagcctgctggaggtgctgagcggggacaccctgccccgggagaagggccgcatgaggttccaccggctgcagaatgtgcagatcgccctggactacctgaagaggcggcaggtgaagctggtgaacatcagaaatgatgacatcacagatggcaaccccaagctgaccctgggcctcatctggaccatcatcctgcacttccagatcagtgacatccacgtgactggagagagcgaggacatgtctgccaaggagcggctgctgctgtggacccagcaggccacagagggctacgccggcatccgctgtgagaacttcaccacctgctggagagatggcaagctgttcaatgccatcatccacaagtacagaccagacctgattgacatgaacacagtggccgtgcagagcaacctggccaacctggagcacgccttctacgtggccgagaagattggagtcatccggctgctggaccctgaagatgtggatgtgagcagcccagatgagaagagcgtcatcacctacgtgagcagcctgtatgatgccttccccaaggtgcctgagggcggggagggcatcggggccaatgatgtggaggtgaagtggattgagtaccagaacatggtgaactacctgatccagtggatccgccaccacgtgaccaccatgtctgagaggaccttccccaacaaccctgtggagctgaaggccctgtacaaccagtacctgcagttcaaggagacagagatcccccccaaggagacagagaagagcaagatcaagaggctgtacaagctgctggagatctggattgaatttggccgcatcaagctgctgcagggctaccaccccaatgacatcgagaaggagtggggcaagctgatcatcgccatgctggagcgggagaaggccctgcggcctgaggtggagcggctggagatgctgcagcagatcgccaacagagtgcagagggacagcgtcatctgtgaggacaagctgatcctggccggaaatgccctgcagagcgacagcaagaggctggagagcggcgtgcagttccagaatgaggccgagattgctggctacatcctggagtgtgagaacctgctgcggcagcacgtgattgatgtgcagatcctgattgatggcaagtactaccaggccgaccagctggtgcagagggtggccaagctgagagatgagatcatggccctgagaaatgaatgttcttctgtgtacagcaagggccgcatcctgaccacagagcagaccaagctgatgatcagcggcatcacccagagcctgaacagcggctttgcccagaccctgcaccccagcctgaccagcggcctgacccagagcctgacccccagcctgaccagcagctccatgaccagcggcctgagcagcggcatgaccagccggctgacccccagcgtgaccccagcctacaccccaggcttccccagcggcctggtgcccaacttcagcagtggagtggagcccaacagcctgcagaccctgaagctgatgcagatcaggaagcccctgctgaagagcagcctgctggaccagaacctgacagaggaggagatcaacatgaagtttgtgcaggacctgctgaactgggtggatgagatgcaggtgcagctggacagaacagagtggggcagtgacctgcccagcgtggagagccacctggagaaccacaagaatgtgcaccgggccatcgaggagtttgagagcagcctgaaggaggccaagatcagcgagatccagatgacagcccccctgaagctgacctacgccgagaagctgcaccggctggagagccagtatgccaagctgctgaacaccagcaggaaccaggagcggcacctggacaccctgcacaactttgtgtcccgggccaccaatgagctgatctggctgaatgagaaggaggaggaggaggtggcctatgactggagcgagaggaacaccaacatcgccaggaagaaggactaccacgccgagctgatgagggagctggaccagaaggaggagaacatcaagtctgtgcaggagattgctgagcagctgctgctggagaaccacccagcccggctgaccatcgaggcctacagagctgccatgcagacccagtggagctggatcctgcagctgtgccagtgtgtggagcagcacatcaaggaaaatacagcctactttgagttcttcaatgatgccaaggaggccacagactacctgaggaacctgaaggatgccatccagaggaagtacagctgtgacaggagcagcagcatccacaagctggaggacctggtgcaggagagcatggaggagaaggaggagctgctgcagtacaagagcaccatcgccaacctgatgggcaaggccaagaccatcatccagctgaagcccaggaacagcgactgccccctgaagaccagcatccccatcaaggccatctgtgactaccggcagatcgagatcaccatctacaaggatgatgaatgtgtgctggccaacaacagccaccgggccaagtggaaggtgatcagccccactggaaatgaggccatggtgcccagcgtgtgcttcaccgtgcccccacccaacaaggaggccgtggacctggccaacagaattgagcagcagtaccagaatgtgctgaccctgtggcatgagagccacatcaacatgaagtctgtggtgtcctggcactacctgatcaatgaaattgaccgcatccgggccagcaatgtggccagcatcaagaccatgctgcccggggagcaccagcaggtgctgagcaacctgcagagcagatttgaggacttcctggaggacagccaggagagccaggtgttcagcggcagtgacatcacccagctggagaaggaggtgaatgtgtgcaagcagtactaccaggagctgctgaagtctgctgagcgggaggagcaggaggagagcgtgtacaacctgtacatcagcgaggtgaggaacatccggctgcggctggagaactgtgaagatagactcatccggcagatccgcacccccctggagagagatgacctgcacgagagcgtcttccgcatcacagagcaggagaagctgaagaaggagctggagcggctgaaggatgacctgggcaccatcaccaacaagtgtgaggagttcttcagccaggccgccgccagcagctctgtgcccaccctgcggtctgagctgaatgtggtgctgcagaacatgaaccaggtgtacagcatgagcagcacctacatcgacaagctgaagacagtgaacctggtgctgaagaacacccaggccgctgaggccctggtgaagctgtatgagaccaagctgtgtgaggaggaggccgtgattgctgacaagaacaacattgaaaatctcatcagcaccctgaagcagtggaggtctgaggtggatgagaagaggcaggtgttccacgccctggaggatgagctgcagaaggccaaggccatcagtgatgagatgttcaagacctacaaggagcgggacctggactttgactggcacaaggagaaggctgaccagctggtggagcgctggcagaatgtgcacgtgcagattgacaaccggctgcgggacctggagggcatcggcaagagcctgaagtactacagagacacctaccaccccctggatgactggatccagcaggtggagaccacccagaggaagatccaggagaaccagcctgagaacagcaagaccctggccacccagctgaaccagcagaagatgctggtgtctgaaattgagatgaagcagagcaagatggatgagtgccagaagtatgcagagcagtacagcgccaccgtgaaggactatgagctgcagaccatgacctaccgggccatggtggacagccagcagaagagccctgtgaagagaagaaggatgcagagcagcgctgacctgatcatccaggagttcatggacctgcggacccgctacacagccctggtgaccctgatgacccagtacatcaagtttgctggggacagcctgaagaggctggaggaggaggagaagagcctggaggaggagaagaaggagcacgtggagaaggccaaggagctgcagaagtgggtgagcaacatcagcaagaccctgaaggatgctgagaaggccggcaagccacccttcagcaagcagaagatcagcagcgaggagatcagcaccaagaaggagcagctgtctgaggccctgcagaccatccagctgttcctggccaagcacggggacaagatgacagatgaggagagaaatgagctggagaagcaggtgaagaccctgcaggagagctacaacctgctcttcagcgagagcctgaagcagctgcaggagagccagaccagcggagatgtgaaggtggaggagaagctggacaaggtgattgctggcaccatcgaccagaccactggagaggtgctgagcgtcttccaggccgtgctgcggggcctgattgattatgacaccggcatccggctgctggagacccagctgatgatcagcggcctcatcagccctgagctgaggaaatgttttgacctgaaggatgccaagagccacggcctgattgatgagcagatcctgtgccagctgaaggagctgagcaaggccaaggagatcatctctgctgccagccccaccaccatccctgtgctggatgccctggcccagagcatgatcacagagagcatggccatcaaggtgctggagatcctgctgagcacaggcagcctggtgatcccagccaccggggagcagctgaccctgcagaaggccttccagcagaacctggtgtcctctgccctcttcagcaaggtgctggagcggcagaacatgtgcaaggacctgattgacccctgcaccagcgagaaggtgtccctgattgacatggtgcagaggagcaccctgcaggagaacacaggcatgtggctgctgcctgtgcggccccaggagggcggccgcatcaccctgaagtgtggcaggaacatcagcatcctgcgggccgcccacgagggcctgattgaccgggagaccatgttccggctgctgagcgcccagctgctgagcggcggcctcatcaacagcaacagcggccagaggatgacagtggaggaggccgtgcgggagggcgtgattgaccgggacacagccagcagcatcctgacctaccaggtgcagacaggaggcatcatccagagcaacccagccaagaggctgactgtggatgaagctgtgcagtgtgacctgatcaccagcagcagcgccctgctggtgctggaggcccagaggggctacgtgggcctcatctggccccacagcggggagatcttccccaccagcagcagcctgcagcaggagctgatcaccaatgagctggcctacaagatcctgaatggccggcagaagattgctgccctgtacatccctgagagcagccaggtgattggcctggatgctgccaagcagctgggcatcatcgacaacaacacagccagcatcctgaagaacatcaccctgcctgacaagatgccagacctgggggacctggaggcctgcaagaatgcccggcgctggctgtccttctgcaagttccagcccagcacagtgcatgactaccggcaggaggaggatgtgtttgatggagaggagcctgtgaccacccagaccagcgaggagaccaagaagctgttcctgagctacctgatgatcaacagctacatggatgccaacacaggccagaggctgctgctgtatgatggagacctggatgaggccgtgggcatgctgctggagggctgccacgccgagtttgatggcaacacagccatcaaggagtgcctggatgtgctgagcagcagcggggtcttcctgaacaatgccagcggccgggagaaggatgagtgcacagccacccccagcagcttcaacaagtgccactgtggggagcctgagcacgaggagaccccagaaaatagaaaatgtgccattgatgaggagttcaatgagatgaggaacacagtcatcaacagcgagttcagccagagcggcaagctggccagcaccatcagcattgaccccaaggtgaacagcagccccagcgtgtgtgtgcccagcctcatctcctacctgacccagacagagctggccgacatctccatgctgcggagtgacagcgagaacatcctgaccaactatgagaaccagagccgggtggagaccaatgaaagagccaatgaatgtagccacagcaagaacatccagaacttccccagcgacctgattgagaaccccatcatgaagagcaagatgagcaagttctgtggggtgaatgaaacagaaaatgaagacaacaccaacagagacagccccatctttgactacagcccccggctgagcgccctgctgagccatgacaagctgatgcacagccagggcagcttcaatgacacccacaccccagagagcaatggaaacaagtgtgaggccccagccctgtccttcagtgacaagaccatgctgagcggccagagaattggagagaagttccaggaccagttcctgggcattgctgccatcaacatcagcctgcccggggagcagtatggccagaagagcctgaacatgatcagcagcaacccccaggtgcagtaccacaatgacaagtacatcagcaacaccagcggggaggatgagaagacccaccctggcttccagcagatgcctgaggacaaggaggatgaaagtgaaattgaggagtacagctgtgctgtgaccccaggaggagacacagacaatgccatcgtgtccctgacctgtgccacccccctgctggatgagaccatcagcgccagtgactatgagaccagcctgctgaatgaccagcagaacaacacaggaacagacacagacagtgatgatgacttctatgacacccccctgtttgaagatgatgaccatgacagcctgctgctggatggagatgaccgggactgcctgcaccctgaggactatgacaccctgcaggaggagaatgatgaaacagccagccctgcagatgtgttctatgatgtgtccaaagaaaatgaaaattccatggtgccccagggcgcccctgtgggcagcctgtctgtgaagaacaaggcccactgcctgcaggacttcctgatggatgtggagaaggatgagctggacagcggggagaagatccacctgaaccctgtgggcagtgacaaggtgaatggccagagcctggagaccggcagcgagagagaatgtaccaacatcctggagggagatgaaagtgacagcctgacagattatgacatcgtgggcggcaaggagagcttcaccgccagcctgaagtttgatgattctggctcctggaggggcaggaaggaggagtatgtgacaggccaggagttccacagcgacacagaccacctggacagcatgcagagcgaggagagctatggagactacatctatgacagcaatgaccaggatgatgatgatgatgatggcattgatgaggagggcggcggcatcagagatgaaaatggcaagccccgctgccagaatgtggccgaggacatggacatccagctgtgtgccagcatcctgaatgaaaattctgatgaaaatgaaaacatcaacaccatgatcctgctggacaagatgcacagctgcagcagcctggagaagcagcagagggtgaatgtggtgcagctggccagccccagcgagaacaacctggtgacagagaagagcaacctgcctgagtacaccacagaaattgctgggaagagcaaagaaaacctgctgaaccacgagatggtgctgaaggatgtgctgccccccatcatcaaggacacagaaagtgagaagacctttggacctgccagcatcagccatgacaacaacaacatcagcagcaccagcgagctgggcacagacctggccaacaccaaggtgaagctgatccagggcagcgagctgcctgagctgacagacagcgtgaagggcaaggatgagtacttcaagaacatgacccccaaggtggacagcagcctggaccacatcatctgcacagagccagacctgattggcaagccagctgaggagagccacctgagcctcatcgcctctgtgacagacaaggacccccagggcaatggaagtgacctgatcaagggcagagatggcaagagtgacatcctgattgaagatgagaccagcatccagaagatgtacctgggggagggggaggtgctggtggagggcctggtggaggaggagaacagacacctgaagctgctgcccgggaagaacacccgggacagcttcaagctgatcaacagccagttccccttcccccagatcaccaacaatgaggagctgaaccagaagggcagcctgaagaaggccaccgtgaccctgaaggatgagcccaacaacctgcagatcatcgtgtccaagagccctgtgcagtttgagaacctggaggagatctttgacacctctgtgtccaaggagatcagtgatgacatcaccagtgacatcacctcctgggagggcaacacccactttgaggagagcttcacagatggccctgagaaggagctggacctcttcacctacctgaagcactgtgccaagaacatcaaggccaaggatgtggccaagcccaatgaagatgtgcccagccacgtgctgatcacagccccacccatgaaggagcacctgcagctgggcgtgaacaacaccaaggagaagagcaccagcacccagaaggacagccccctgaatgacatgatccagagcaatgacctgtgcagcaaggagagcatcagcggcggcggcacagagatcagccagttcaccccagagagcattgaggccaccctgagcatcctgagcaggaagcacgtggaggatgtgggcaagaatgacttcctgcagagcgagcgctgtgccaacggcctgggcaatgacaacagcagcaacaccctgaacacagactacagcttcctggagatcaacaacaagaaggagcgcatcgagcagcagctgcccaaggagcaggccctgagccccaggagccaggagaaggaggtgcagatccctgagctgagccaggtgtttgtggaggatgtgaaggacatcctgaagagccggctgaaggagggccacatgaacccccaggaggtggaggagcccagcgcctgtgccgacaccaagatcctgatccagaacctgatcaagaggatcaccaccagccagctggtgaatgaggccagcacagtgcccagcgacagccagatgtctgacagcagcggcgtgagccccatgaccaacagcagcgagctgaagccagagagcagagatgaccccttctgcatcggcaacctgaagtctgagctgctgctgaacatcctgaagcaggaccagcacagccagaagatcaccggggtgtttgagctgatgagggagctgacccacatggagtatgacctggagaagaggggcatcaccagcaaggtgctgcccctgcagctggagaacatcttctacaagctgctggctgatggctacagcgagaagattgagcacgtgggggacttcaaccagaaggcctgcagcaccagcgagatgatggaggagaagccccacatcctgggggacatcaagagcaaggagggcaactactacagccccaacctggagaccgtgaaggagatcggcctggagagcagcacagtgtgggccagcaccctgcccagagatgagaagctgaaggacctgtgcaatgacttccccagccacctggagtgcaccagcggcagcaaggagatggccagcggggacagcagcacagagcagttcagcagcgagctgcagcagtgcctgcagcacacagagaagatgcatgagtacctgaccctgctgcaggacatgaagccacccctggacaaccaggagagcctggacaacaacctggaggccctgaagaaccagctgcggcagctggagacctttgagctgggcctggcccccatcgccgtcatcctgaggaaggacatgaagctggccgaggagttcctgaagagcctgcccagcgacttcccccggggccacgtggaggagctgagcatcagccaccagagcctgaagacagccttcagcagcctgagcaatgtgagcagcgagaggaccaagcagatcatgctggccatcgacagcgagatgagcaagctggccgtgtcccatgaggagttcctgcacaagctgaagagcttcagtgactgggtgtctgagaagagcaagtctgtgaaggacattgaaattgtgaatgtgcaggacagtgaatatgtgaagaagaggctggagttcctgaaggccaacaacgtgctgaaggacctgggccacaccaagatgcagctggagaccacagcctttgatgtgcagttcttcatcagtgaatatgcccaggacctgagccccaaccagagcaagcagctgctgcggctgctgaacaccacccagaagtgcttcctggatgtgcaggagagcgtgaccacccaggtggagcggctggagacccagctgcacctggagcaggacctggatgaccagaagatcgtggccgagcggcagcaggagtacaaggagaagctgcagggcatctgtgacctgctgacccagacagagaacagactcatcggccaccaggaggccttcatgattggagatggcaccgtggagctgaagaagtaccagagcaagcaggaggagctgcagaaggacatgcagggcagcgcccaggccctggccgaggtggtgaagaacacagagaacttcctgaaggaaaatggagagaagctgagccaggaggacaaggccctgattgagcagaagctgaatgaggccaagatcaagtgtgagcagctgaacctgaaggccgagcagagcaagaaggagctggacaaggtggtgaccacagccatcaaggaggagacagagaaggtggccgctgtgaagcagctggaggagagcaagaccaagattgagaacctgctggactggctgagcaatgtggacaaggacagcgagcgggccggcaccaagcacaagcaggtgattgagcagaatggcacccacttccaggagggagatggcaagagcgccatcggggaggaggatgaggtgaatggaaacctgctggagacagatgtggatggccaggtgggcaccacccaggagaacctgaaccagcagtaccagaaggtgaaggcccagcacgagaagatcatcagccagcaccaggccgtcatcatcgccacccagagcgcccaggtgctgctggagaagcagggccagtacctgagccctgaggagaaggagaagctgcagaagaacatgaaggagctgaaggtgcactatgaaacagccctggccgagagcgagaagaagatgaagctgacccacagcctgcaggaggagctggagaagtttgatgctgactacacagaatttgagcactggctgcagcagagcgagcaggagctggagaacctggaggccggggctgatgacatcaatggcctgatgaccaagctgaagaggcagaagagcttctctgaagatgtgatcagccacaagggggacctgcgctacatcaccatcagcggcaacagagtgctggaggccgccaagagctgcagcaagagagatggcggcaaggtggacaccagcgccacccaccgggaggtgcagaggaagctggaccacgccacagaccgcttccgcagcctgtacagcaaatgtaatgtgctgggcaacaacctgaaggacctggtggacaagtaccagcactatgaagatgccagctgtggcctgctggccggcctgcaggcctgtgaggccacagccagcaagcacctgtctgagcccatcgctgtggaccccaagaacctgcagaggcagctggaggagaccaaggccctgcagggccagatcagcagccagcaggtggccgtggagaagctgaagaagacagctgaggtgctgctggatgcccggggcagcctgctgcctgccaagaatgacatccagaagaccctggatgacatcgtgggccgctatgaggacctgagcaagtctgtgaatgaaagaaatgagaagctgcagatcaccctgaccaggagcctgtctgtgcaggacggcctggatgagatgctggactggatgggaaatgtggagagcagcctgaaggagcagggccaggtgcccctgaacagcacagccctgcaggacatcatcagcaagaacatcatgctggagcaggacattgctggccggcagagcagcatcaatgccatgaatgagaaggtgaagaagttcatggagaccacagaccccagcacagccagcagcctgcaggccaagatgaaggacctgagcgcccgcttcagcgaggccagccacaagcacaaggagaccctggccaagatggaggagctgaagaccaaggtggagctgtttgagaacctgtctgagaagctgcagaccttcctggagaccaagacccaggccctgacagaggtggatgtgcctgggaaggatgtgacagagctgagccagtacatgcaggagagcaccagcgagttcctggagcacaagaagcacctggaggtgctgcacagcctgctgaaggagatcagcagccacggcctgcccagcgacaaggccctggtgctggagaagaccaacaacctgagcaagaagttcaaggagatggaggacaccatcaaggagaagaaggaggccgtgaccagctgccaggagcagctggatgccttccaggtgctggtgaagagcctgaagtcctggatcaaggagaccaccaagaaggtgcccatcgtgcagcccagctttggagctgaggacctgggcaagagcctggaggacaccaagaagctgcaggagaagtggagcctgaagaccccagagatccagaaggtgaacaacagcggcatcagcctgtgcaacctgatctctgctgtgaccaccccagccaaggccatcgctgctgtgaagtctggaggagctgtgctgaatggagagggcacagccaccaacacagaggagttctgggccaacaagggcctgaccagcatcaagaaggacatgacagacatcagccacggctatgaggacctgggcctgctgctgaaggacaagattgctgagctgaacaccaagctgagcaagctgcagaaggcccaggaggagagcagcgccatgatgcagtggctgcagaagatgaacaagacagccaccaagtggcagcagaccccagcccccacagacacagaggccgtgaagacccaggtggagcagaacaagagctttgaagctgagctgaagcagaatgtgaacaaggtgcaggagctgaaggacaagctgacagagctgctggaggagaacccagacaccccagaggccccccgctggaagcagatgctgacagaaattgacagcaagtggcaggagctgaaccagctgaccatcgaccggcagcagaagctggaggagagcagcaacaacctgacccagttccagacagtggaggcccagctgaagcagtggctggtggagaaggagctgatggtgtctgtgctgggccccctgagcattgaccccaacatgctgaacacccagaggcagcaggtgcagatcctgctgcaggagtttgccaccaggaagccccagtatgagcagctgacagctgctggccagggcatcctgagcaggcctggagaggaccccagcctgcggggcatcgtgaaggagcagctggccgctgtgacccagaagtgggacagcctgaccggccagctgagtgacagatgtgactggattgaccaggccatcgtgaagagcacccagtaccagagcctgctgcggagcctgagtgacaagctgagtgacctggacaacaagctgagcagcagcctggccgtgtccacccacccagatgccatgaaccagcagctggagacagcccagaagatgaagcaggagatccagcaggagaagaagcagatcaaggtggcccaggccctgtgtgaggacctgagcgccctggtgaaggaggagtacctgaaggccgagctgagccggcagctggagggcatcctgaagagcttcaaggatgtggagcagaaggcagaaaatcatgtgcagcacctgcagagcgcctgtgccagcagccaccagttccagcagatgagccgggacttccaggcctggctggacaccaagaaggaggagcagaacaagagccaccccatcagcgccaagctggatgtgctggagagcctcatcaaggaccacaaggacttcagcaagaccctgacagcccagagccacatgtatgagaagaccatcgccgagggggagaacctgctgctgaagacccagggcagcgagaaggccgccctgcagctgcagctgaacaccatcaagaccaactgggacaccttcaacaagcaggtgaaggagcgggagaacaagctgaaggagagcctggagaaggccctgaagtacaaggagcaggtggagaccctgtggccctggattgacaagtgccagaacaacctggaggagatcaagttctgcctggaccctgcagaaggagaaaattccatcgccaagctgaagagcctgcagaaggagatggaccagcacttcggcatggtggagctgctgaacaacacagccaacagcctgctgtctgtgtgtgaaattgacaaggaggtggtgacagatgagaacaagagcctcatccagaaggtggacatggtgacagagcagctgcacagcaagaagttctgcctggagaacatgacccagaagttcaaggagttccaggaggtgtccaaggagagcaagaggcagctgcagtgtgccaaggagcagctggacatccatgacagcctgggcagccaggcctacagcaacaagtacctgaccatgctgcagacccagcagaagagcctgcaggccctgaagcaccaggtggacctggccaagaggctggcccaggacctggtggtggaggccagtgacagcaagggcaccagtgatgtgctgctgcaggtggagaccatcgcccaggagcacagcaccctgagccagcaggtggatgagaagtgcagcttcctggagaccaagctgcagggcatcggccacttccagaacaccatccgggagatgttcagccagtttgctgagtttgatgatgagctggacagcatggcccctgtgggcagagatgctgagaccctgcagaagcagaaggagaccatcaaggccttcctgaagaagctggaggccctgatggccagcaatgacaatgccaacaagacctgcaagatgatgctggccacagaggagaccagcccagacctggtgggcatcaagagggacctggaggccctgagcaagcagtgcaacaagctgctggaccgggcccaggcccgggaggagcaggtggagggcaccatcaagaggctggaggagttctacagcaagctgaaggagttcagcatcctgctgcagaaggccgaggagcacgaggagagccagggccctgtgggcatggagacagagaccatcaaccagcagctgaacatgttcaaggtgttccagaaggaggagattgagcccctgcagggcaagcagcaggatgtgaactggctgggccagggcctcatccagagcgctgccaagagcaccagcacccagggcctggagcatgacctggatgatgtgaatgcccgctggaagaccctgaacaagaaggtggcccagagagctgcccagctgcaggaggccctgctgcactgcggccgcttccaggatgccctggagagcctgctgtcctggatggtggacacagaggagctggtggccaaccagaagccacccagcgctgagttcaaggtggtgaaggcccagatccaggagcagaagctgctgcagaggctgctggatgacaggaagagcacagtggaggtgatcaagcgggagggggagaagatcgccaccacagctgagcctgctgacaaggtgaagatcctgaagcagctgagcctgctggacagccgctgggaggccctgctgaacaaggccgagaccaggaaccggcagctggagggcatctctgtggtggcccagcagttccacgagaccctggagcccctgaatgagtggctgaccaccatcgagaagaggctggtgaactgtgagcccatcggcacccaggccagcaagctggaggagcagatcgcccagcacaaggccctggaggatgacatcatcaaccacaacaagcacctgcaccaggccgtgtccatcggccagagcctgaaggtgctgagcagccgggaggacaaggacatggtgcagagcaagctggacttcagccaggtgtggtacatcgagatccaggagaagagccacagccgctctgagctgctgcagcaggccctgtgcaatgccaagatctttggagaagatgaggtggagctgatgaactggctgaatgaggtgcatgacaagctgagcaagctgtctgtgcaggactacagcacagagggcctgtggaagcagcagagcgagctgcgggtgctgcaggaggacatcctgctgaggaagcagaatgtggaccaggccctgctgaatggcctggagctgctgaagcagaccactggagatgaggtgctgatcatccaggacaagctggaggccatcaaggcccgctacaaggacatcaccaagctgagcacagatgtggccaagaccctggagcaggccctgcagctggcccggcggctgcacagcacccatgaggagctgtgcacctggctggacaaggtggaggtggagctgctgtcctatgagacccaggtgctgaagggggaggaggccagccaggcccagatgaggcccaaggagctgaagaaggaggccaagaacaacaaggccctgctggacagcctgaatgaggtgagcagcgccctgctggagctggtgccctggagggcccgggagggcctggagaagatggtggccgaggacaatgaaagataccgcctggtgtctgacaccatcacccagaaggtggaggagattgatgctgccatcctgcggagccagcagtttgaccaggccgcagatgctgagctgtcctggatcacagaaacagagaagaagctgatgagcctgggggacatccggctggagcaggaccagaccagcgcccagctgcaggtgcagaagaccttcaccatggagatcctgcggcacaaggacatcattgatgacctggtgaagagcggccacaagatcatgacagcctgcagcgaggaggagaagcagagcatgaagaagaagctggacaaggtgctgaagaactatgacaccatctgccagatcaacagcgagcgctacctgcagctggagcgggcccagagcctggtgaaccagttctgggagacctatgaggagctgtggccctggctgacagagacccagagcatcatcagccagctgcctgccccagccctggagtatgagaccctgcggcagcagcaggaggagcaccggcagctgcgggagctgattgctgagcacaagccccacatcgacaagatgaacaagacaggcccccagctgctggagctgagccctggagagggcttcagcatccaggagaagtatgtggccgctgacaccctgtacagccagatcaaggaggatgtgaagaagagagctgtggccctggatgaggccatcagccagagcacccagttccatgacaagattgaccagatcctggagagcctggagcgcatcgtggagcggctgcggcagcccccatccatctctgctgaggtggagaagatcaaggagcagatcagcgagaacaagaatgtgtctgtggacatggagaagctgcagcccctgtatgagaccctgaagcagagaggagaggagatgattgcccggagcggcggcacagacaaggacatcagcgccaaggctgtgcaggacaagctggaccagatggtgttcatctgggagaacatccacaccctggtggaggagcgggaggccaagctgctggatgtgatggagctggccgagaagttctggtgtgaccacatgagcctgattgtgaccatcaaggacacccaggacttcatccgggacctggaggaccccggcatcgaccccagcgtggtgaagcagcagcaggaggccgctgagaccatccgggaggagattgatggcctgcaggaggagctggacatcgtcatcaacctgggcagcgagctgattgctgcctgtggggagccagacaagcccatcgtgaagaagagcattgatgagctgaacagcgcctgggacagcctgaacaaggcctggaaggacagaattgacaagctggaggaggccatgcaggccgctgtgcagtaccaggacggcctgcaggccgtgtttgactgggtggacattgctgggggcaagctggcctccatgagccccatcggcacagacctggagaccgtgaagcagcagatcgaggagctgaagcagttcaagtctgaggcctaccagcagcagatcgagatggagcggctgaaccaccaggccgagctgctgctgaagaaggtgacagaggagagtgacaagcacacagtgcaggaccccctgatggagctgaagctgatctgggacagcctggaggagcgcatcatcaaccggcagcacaagctggagggcgccctgctggccctgggccagttccagcacgccctggatgagctgctggcctggctgacccacacagagggcctgctgtctgagcagaagcctgtgggcggggaccccaaggccattgaaattgagctggccaagcaccacgtgctgcagaatgatgtgctggcccaccagagcacagtggaggccgtgaacaaggctggaaatgacctgattgagagcagcgctggggaggaggccagcaacctgcagaacaagctggaggtgctgaaccagcgctggcagaatgtgctggagaagacagagcagaggaagcagcagctggatggagccctgcggcaggccaagggcttccacggggagattgaggacctgcagcagtggctgacagacacagagcggcacctgctggccagcaagcccctgggcggcctgcctgagacagccaaggagcagctgaatgtgcacatggaggtgtgtgccgcctttgaggccaaggaggagacctacaagagcctgatgcagaagggccagcagatgctggcccgctgccccaagtctgctgagaccaacatcgaccaggacatcaacaacctgaaggagaagtgggagagcgtggagaccaagctgaatgaaaggaagaccaagctggaggaggccctgaacctggccatggagttccacaacagcctgcaggacttcatcaactggctgacccaggccgagcagaccctgaatgtggccagccggcccagcctcatcctggacacagtgctcttccagattgatgagcacaaggtgtttgccaatgaggtgaacagccaccgggagcagatcatcgagctggacaagacaggcacccacctgaagtacttcagccagaagcaggatgtggtgctgatcaagaacctgctgatctctgtgcagagccgctgggagaaggtggtgcagaggctggtggagcggggccgcagcctggatgatgccaggaagagggccaagcagttccacgaggcctggagcaagctgatggagtggctggaggagagcgagaagagcctggacagcgagctggagatcgccaatgaccctgacaagatcaagacccagctggcccagcacaaggagttccagaagagcctgggcgccaagcacagcgtgtatgacaccaccaacagaacaggccgcagcctgaaggagaagaccagcctggctgatgacaacctgaagctggatgacatgctgtctgagctgcgggacaagtgggacaccatctgtgggaagtctgtggagcggcagaacaagctggaggaggccctgctcttcagcggccagttcacagatgccctgcaggccctgattgactggctgtacagagtggagccccagctggccgaggaccagcctgtgcacggggacatcgacctggtgatgaacctgattgacaaccacaaggccttccagaaggagctgggcaagaggaccagctctgtgcaggccctgaagaggtctgcccgggagctgattgagggcagcagagatgacagctcctgggtgaaggtgcagatgcaggagctgagcacccgctgggagaccgtgtgtgccctgagcatcagcaagcagacccggctggaggccgccctgcggcaggccgaggagttccacagcgtggtgcacgccctgctggagtggctggccgaggccgagcagaccctgcgcttccacggcgtgctgcctgatgatgaagatgccctgcggaccctgattgaccagcacaaggagttcatgaagaagctggaggagaagagagctgagctgaacaaggccaccaccatgggagacacagtgctggccatctgccacccagacagcatcaccaccatcaagcactggatcaccatcatccgggccaggtttgaggaggtgctggcctgggccaagcagcaccagcagaggctggccagcgccctggccggcctcatcgccaagcaggagctgctggaggccctgctggcctggctgcagtgggccgagaccaccctgacagacaaggacaaggaggtgatcccccaggagattgaggaggtgaaggccctgattgctgagcaccagaccttcatggaggagatgaccaggaagcagccagatgtggacaaggtgaccaagacctacaagagaagagctgctgaccccagcagcctgcagagccacatccctgtgctggacaagggccgggccggcaggaagcgcttccctgccagcagcctgtaccccagcggcagccagacccagatcgagaccaagaacccccgggtgaacctgctggtgtccaagtggcagcaggtgtggctgctggccctggagaggaggaggaagctgaatgatgccctggaccggctggaggagctgcgggagtttgccaactttgattttgacatctggaggaagaagtacatgcgctggatgaaccacaagaagagccgggtgatggacttcttcagaagaattgacaaggaccaggacggcaagatcacccggcaggagttcattgatggcatcctgagcagcaagttccccaccagccggctggagatgtctgctgtggccgacatctttgacagagatggagatggctacatcgactactatgaatttgtggccgccctgcaccccaacaaggatgcctacaagcccatcacagatgctgacaagattgaagatgaggtgacccggcaggtggccaagtgcaagtgtgccaagcgcttccaggtggagcagatcggggacaacaagtacagagtgtccttccagagcaactttggagacagccagcagctgcggctggtgcgcatcctgcggagcacagtgatggtgcgggtgggcggcggctggatggccctggatgagttcctggtgaagaatgacccctgccgggtgcaccaccacggcagcaagatgctgcggtctgagagcaacagcagcatcaccaccacccagcccaccatcgccaagggccgcaccaacatggagctgcgggagaagttcatcctggctgatggagccagccagggcatggccgccttccggccccggggccgccgcagccggcccagcagcagaggagccagccccaacagaagcacctctgtgagcagccaggccgcccaggccgccagcccccaggtgcctgccaccaccacccccaagggcacccccatccagggcagcaagctgcggctgcccggctacctgagcggcaagggcttccacagcggggaggacagcggcctcatcaccacagctgctgcccgggtgaggacccagtttgctgacagcaagaagacccccagccggcccggcagccgggccggcagcaaggccggcagccgggccagcagcagaagaggaagtgatgccagtgactttgacatcagcgagatccagagcgtgtgcagtgatgtggagaccgtgccccagacccaccggcccaccccccgggccggcagccggcccagcacagccaagcccagcaagatccccaccccccagaggaagagccctgccagcaagctggacaagagcagcaagaggtag

SEQ ID NO: 150715 - DNA, 7950 bp, synthetic construct
  misc_feature 1..7950: note = Description of Artificial Sequence: Synthetic coding sequence
  source 1..7950: mol_type = other DNA
atgcacagcagcagctacagctaccgcagcagtgacagcgtcttcagcaacaccaccagcaccaggaccagcctggacagcaatgaaaacctgctgctggtgcactgcggccccaccctcatcaacagctgcatcagctttggaagtgagagctttgatggccaccggctggagatgctgcagcagatcgccaacagagtgcagagggacagcgtcatctgtgaggacaagctgatcctggccggaaatgccctgcagagcgacagcaagaggctggagagcggcgtgcagttccagaatgaggccgagattgctggctacatcctggagtgtgagaacctgctgcggcagcacgtgattgatgtgcagatcctgattgatggcaagtactaccaggccgaccagctggtgcagagggtggccaagctgagagatgagatcatggccctgagaaatgaatgttcttctgtgtacagcaagggccgcatcctgaccacagagcagaccaagctgatgatcagcggcatcacccagagcctgaacagcggctttgcccagaccctgcaccccagcctgaccagcggcctgacccagagcctgacccccagcctgaccagcagctccatgaccagcggcctgagcagcggcatgaccagccggctgacccccagcgtgaccccagcctacaccccaggcttccccagcggcctggtgcccaacttcagcagtggagtggagcccaacagcctgcagaccctgaagctgatgcagatcaggaagcccctgctgaagagcagcctgctggaccagaacctgacagaggaggagatcaacatgaagtttgtgcaggacctgctgaactgggtggatgagatgcaggtgcagctggacagaacagagtggggcagtgacctgcccagcgtggagagccacctggagaaccacaagaatgtgcaccgggccatcgaggagtttgagagcagcctgaaggaggccaagatcagcgagatccagatgacagcccccctgaagctgacctacgccgagaagctgcaccggctggagagccagtatgccaagctgctgaacaccagcaggaaccaggagcggcacctggacaccctgcacaactttgtgtcccgggccaccaatgagctgatctggctgaatgagaaggaggaggaggaggtggcctatgactggagcgagaggaacaccaacatcgccaggaagaaggactaccacgccgagctgatgagggagctggaccagaaggaggagaacatcaagtctgtgcaggagattgctgagcagctgctgctggagaaccacccagcccggctgaccatcgaggcctacagagctgccatgcagacccagtggagctggatcctgcagctgtgccagtgtgtggagcagcacatcaaggaaaatacagcctactttgagttcttcaatgatgccaaggaggccacagactacctgaggaacctgaaggatgccatccagaggaagtacagctgtgacaggagcagcagcatccacaagctggaggacctggtgcaggagagcatggaggagaaggaggagctgctgcagtacaagagcaccatcgccaacctgatgggcaaggccaagaccatcatccagctgaagcccaggaacagcgactgccccctgaagaccagcatccccatcaaggccatctgtgactaccggcagatcgagatcaccatctacaaggatgatgaatgtgtgctggccaacaacagccaccgggccaagtggaaggtgatcagccccactggaaatgaggccatggtgcccagcgtgtgcttcaccgtgcccccacccaacaaggaggccgtggacctggccaacagaattgagcagcagtaccagaatgtgctgaccctgtggcatgagagccacatcaacatgaagtctgtggtgtcctggcactacctgatcaatgaaattgaccgcatccgggccagcaatgtggccagcatcaagaccatgctgcccggggagcaccagcaggtgctgagcaacctgcagagcagatttgaggacttcctggaggacagccaggagagccaggtgttcagcggcagtgacatcacccagctggagaaggaggtgaatgtgtgcaagcagtactaccaggagctgctgaagtctgctgagcgggaggagcaggaggagagcgtgtacaacctgtacatcagcgaggtgaggaacatccggctgcggctggagaactgtgaagatagactcatccggcagatccgcacccccctggagagagatgacctgcacgagagcgtcttccgcatcacagagcaggagaagctgaagaaggagctggagcggctgaaggatgacctgggcaccatcaccaacaagtgtgaggagttcttcagccaggccgccgccagcagctctgtgcccaccctgcggtctgagctgaatgtggtgctgcagaacatgaaccaggtgtacagcatgagcagcacctacatcgacaagctgaagacagtgaacctggtgctgaagaacacccaggccgctgaggccctggtgaagctgtatgagaccaagctgtgtgaggaggaggccgtgattgctgacaagaacaacattgaaaatctcatcagcaccctgaagcagtggaggtctgaggtggatgagaagaggcaggtgttccacgccctggaggatgagctgcagaaggccaaggccatcagtgatgagatgttcaagacctacaaggagcgggacctggactttgactggcacaaggagaaggctgaccagctggtggagcgctggcagaatgtgcacgtgcagattgacaaccggctgcgggacctggagggcatcggcaagagcctgaagtactacagagacacctaccaccccctggatgactggatccagcaggtggagaccacccagaggaagatccaggagaaccagcctgagaacagcaagaccctggccacccagctgaaccagcagaagatgctggtgtctgaaattgagatgaagcagagcaagatggatgagtgccagaagtatgcagagcagtacagcgccaccgtgaaggactatgagctgcagaccatgacctaccgggccatggtggacagccagcagaagagccctgtgaagagaagaaggatgcagagcagcgctgacctgatcatccaggagttcatggacctgcggacccgctacacagccctggtgaccctgatgacccagtacatcaagtttgctggggacagcctgaagaggctggaggaggaggagatcaagcgctgcaaggagaccagcgagcacggggcctacagcgacctgctgcagaggcagaaggccaccgtgctggagaacagcaagctgaccgggaagatcagcgagctggagaggatggtggccgagctgaagaagcagaagagccgggtggaggaggagctgcccaaggtgcgggaggccgcagaaaatgagctgaggaagcagcagagaaatgtggaggacatcagcctgcagaagatccgggcagagagcgaggccaagcagtacagaagagagctggagaccatcgtgcgggagaaggaggccgctgagcgggagctggagcgggtgcggcagctgaccatcgaggccgaggccaagagagctgctgtggaggagaacctgctgaacttcaggaaccagctggaggagaacaccttcaccaggaggaccctggaggaccacctgaagaggaaggacctgagcctgaatgacctggagcagcagaagaacaagctgatggaggagctgcggaggaagagggacaatgaggaggagctgctgaagctgatcaagcagatggagaaggacctggccttccagaagcaggtggccgagaagcagctgaaggagaagcagaagattgagctggaggcccggaggaagatcacagagatccagtacacctgccgggagaatgccctgcctgtgtgccccatcacccaggccaccagctgcagagctgtgacaggcctgcagcaggagcatgacaagcagaaggccgaggagctgaagcagcaggtggatgagctgacagctgccaacaggaaggccgagcaggacatgagggagctgacctatgagctgaatgccctgcagctggagaagaccagcagcgaggagaaggcccggctgctgaaggacaagctggatgagaccaacaacaccctgcgctgcctgaagctggagctggagaggaaggaccaggccgagaagggctacagccagcagctgcgggagctgggccggcagctgaaccagaccaccgggaaggccgaggaggccatgcaggaggccagtgacctgaagaagatcaagaggaactaccagctggagctggagagcctgaaccacgagaagggcaagctgcagcgggaggtggaccgcatcacccgggcccatgctgtggccgagaagaacatccagcacctgaacagccagatccacagcttcagagatgagaaggagctggagcggctgcagatctgccagaggaagagtgaccacctgaaggagcagtttgagaagagccatgagcagctgctgcagaacatcaaggccgagaaggagaacaatgacaagatccagaggctgaatgaggagctggagaagagcaatgaatgtgccgagatgctgaagcagaaggtggaggagctgacccggcagaacaatgagaccaagctgatgatgcagaggatccaggccgagagcgagaacatcgtgctggagaagcagaccatccagcagagatgtgaggccctgaagatccaggctgatggcttcaaggaccagctgcggagcaccaatgagcacctgcacaagcagaccaagacagagcaggacttccagaggaagatcaagtgcctggaggaggacctggccaagagccagaacctggtgtctgagttcaagcagaagtgtgaccagcagaacatcatcatccagaacaccaagaaggaggtgaggaacctgaatgctgagctgaatgccagcaaggaggagaagagaagaggagagcagaaggtgcagctgcagcaggcccaggtgcaggagctgaacaaccggctgaagaaggtgcaggatgagctgcacctgaagaccatcgaggagcagatgacccacaggaagatggtgctcttccaggaggagagcggcaagttcaagcagagcgctgaggagttcaggaagaagatggagaagctgatggagagcaaggtgatcacagaaaatgacatcagcggcatccggctggactttgtgtccctgcagcaggagaacagccgggcccaggagaatgccaagctgtgtgagaccaacatcaaggagctggagcggcagctgcagcagtaccgggagcagatgcagcagggccagcacatggaggccaaccactaccagaagtgccagaagctggaggatgagctgattgcccagaagcgggaggtggagaacctgaagcagaagatggaccagcagatcaaggagcacgagcaccagctggtgctgctgcagtgtgagatccagaagaagagcacagccaaggactgcaccttcaagccagactttgagatgacagtgaaggagtgccagcacagcggggagctgagcagcaggaacacaggccacctgcaccccacccccaggagccccctgctgcgctggacccaggagccccagcccctggaggagaagtggcagcaccgggtggtggagcagatccccaaggaggtgcagttccagcccccaggggcccccctggagaaggagaagagccagcagtgctacagcgagtacttcagccagaccagcacagagctgcagatcacctttgatgagaccaaccccatcacccggctgtctgaaattgagaagatccgggaccaggccctgaacaacagcaggcctcctgtgcgctaccaggacaatgcctgtgagatggagctggtgaaggtgctgacccccctggagatcgccaagaacaagcagtatgacatgcacacagaggtgaccaccctgaagcaggagaagaaccctgtgcccagcgctgaggagtggatgctggagggctgccgggccagcggcggcctgaagaagggggacttcctgaagaagggcctggagcctgagaccttccagaactttgatggagaccacgcctgcagcgtgagagatgatgagttcaagttccagggcctgcggcacacagtgacagcccggcagctggtggaggccaagctgctggacatgaggaccatcgagcagctgcggctgggcctgaagacagtggaggaggtgcagaagaccctgaacaagttcctgaccaaggccaccagcattgctggcctgtacctggagagcaccaaggagaagatcagctttgccagcgctgctgagcgcatcatcatcgacaagatggtggccctggccttcctggaggcccaggccgccaccggcttcatcatcgaccccatcagcggccagacctacagcgtggaggatgctgtgctgaagggcgtggtggaccctgagttccgcatccggctgctggaggccgagaaggctgctgtgggctacagctacagcagcaagaccctgagcgtcttccaggccatggagaacaggatgctggaccggcagaagggcaagcacatcctggaggcccagatcgccagcggaggagtgattgatcctgtgcggggcatccgggtgcccccagaaattgccctgcagcagggcctgctgaacaatgccatcctgcagttcctgcacgagcccagcagcaacaccagggtcttccccaaccccaacaacaagcaggccctgtactacagcgagctgctgaggatgtgtgtgtttgatgtggagagccagtgcttcctgttcccctttggagagaggaacatcagcaacctgaatgtgaagaagacccaccgcatctctgtggtggacaccaagacaggcagcgagctgactgtgtatgaggccttccagaggaacctgattgagaagagcatctacctggagctgagcggccagcagtaccagtggaaggaggccatgttctttgagagctatggccacagcagccacatgctgacagacaccaagacaggcctgcacttcaacatcaatgaggccatcgagcagggcaccatcgacaaggccctggtgaagaagtaccaggagggcctcatcaccctgacagagctggccgacagcctgctgagccggctggtgcccaagaaggacctgcacagccctgtggccggctactggctgacagccagcggggagcgcatctctgtgctgaaggccagcagaagaaacctggtggaccgcatcacagccctgcgctgcctggaggcccaggtgtccactggaggcatcatcgaccccctgaccgggaagaagtacagagtggccgaggccctgcaccggggcctggtggatgagggctttgcccagcagctgcggcagtgtgagctggtgatcactggaattggccaccccatcaccaacaagatgatgtctgtggtggaggccgtgaatgccaacatcatcaacaaggagatgggcatccgctgcctggagttccagtacctgaccggcggcctcatcgagccccaggtgcacagccggctgagcattgaggaggccctgcaggtgggcatcattgatgtgctgattgccaccaagctgaaggaccagaagagctatgtgaggaacatcatctgcccccagaccaagaggaagctgacctacaaggaggccctggagaaggctgactttgacttccacacaggcctgaagctgctggaggtgtctgagcccctgatgacaggcatcagcagcctgtactacagcagctag

SEQ ID NO: 150716 - DNA, 22719 bp, synthetic construct
  misc_feature 1..22719: note = Description of Artificial Sequence: Synthetic coding sequence
  source 1..22719: mol_type = other DNA
atggccggctacctgagccctgctgcctacctgtatgtggaggagcaggagtacctgcaggcctatgaagatgtgctggagcgctacaaggatgagcgggacaaggtgcagaagaagaccttcaccaagtggatcaaccagcacctgatgaaggtgaggaagcacgtgaatgacctgtatgaggacctgagagatggccacaacctgatcagcctgctggaggtgctgagcggggacaccctgccccgggagaagggccgcatgaggttccaccggctgcagaatgtgcagatcgccctggactacctgaagaggcggcaggtgaagctggtgaacatcagaaatgatgacatcacagatggcaaccccaagctgaccctgggcctcatctggaccatcatcctgcacttccagatcagtgacatccacgtgactggagagagcgaggacatgtctgccaaggagcggctgctgctgtggacccagcaggccacagagggctacgccggcatccgctgtgagaacttcaccacctgctggagagatggcaagctgttcaatgccatcatccacaagtacagaccagacctgattgacatgaacacagtggccgtgcagagcaacctggccaacctggagcacgccttctacgtggccgagaagattggagtcatccggctgctggaccctgaagatgtggatgtgagcagcccagatgagaagagcgtcatcacctacgtgagcagcctgtatgatgccttccccaaggtgcctgagggcggggagggcatcggggccaatgatgtggaggtgaagtggattgagtaccagaacatggtgaactacctgatccagtggatccgccaccacgtgaccaccatgtctgagaggaccttccccaacaaccctgtggagctgaaggccctgtacaaccagtacctgcagttcaaggagacagagatcccccccaaggagacagagaagagcaagatcaagaggctgtacaagctgctggagatctggattgaatttggccgcatcaagctgctgcagggctaccaccccaatgacatcgagaaggagtggggcaagctgatcatcgccatgctggagcgggagaaggccctgcggcctgaggtggagcggctggagatgctgcagcagatcgccaacagagtgcagagggacagcgtcatctgtgaggacaagctgatcctggccggaaatgccctgcagagcgacagcaagaggctggagagcggcgtgcagttccagaatgaggccgagattgctggctacatcctggagtgtgagaacctgctgcggcagcacgtgattgatgtgcagatcctgattgatggcaagtactaccaggccgaccagctggtgcagagggtggccaagctgagagatgagatcatggccctgagaaatgaatgttcttctgtgtacagcaagggccgcatcctgaccacagagcagaccaagctgatgatcagcggcatcacccagagcctgaacagcggctttgcccagaccctgcaccccagcctgaccagcggcctgacccagagcctgacccccagcctgaccagcagctccatgaccagcggcctgagcagcggcatgaccagccggctgacccccagcgtgaccccagcctacaccccaggcttccccagcggcctggtgcccaacttcagcagtggagtggagcccaacagcctgcagaccctgaagctgatgcagatcaggaagcccctgctgaagagcagcctgctggaccagaacctgacagaggaggagatcaacatgaagtttgtgcaggacctgctgaactgggtggatgagatgcaggtgcagctggacagaacagagtggggcagtgacctgcccagcgtggagagccacctggagaaccacaagaatgtgcaccgggccatcgaggagtttgagagcagcctgaaggaggccaagatcagcgagatccagatgacagcccccctgaagctgacctacgccgagaagctgcaccggctggagagccagtatgccaagctgctgaacaccagcaggaaccaggagcggcacctggacaccctgcacaactttgtgtcccgggccaccaatgagctgatctggctgaatgagaaggaggaggaggaggtggcctatgactggagcgagaggaacaccaacatcgccaggaagaaggactaccacgccgagctgatgagggagctggaccagaaggaggagaacatcaagtctgtgcaggagattgctgagcagctgctgctggagaaccacccagcccggctgaccatcgaggcctacagagctgccatgcagacccagtggagctggatcctgcagctgtgccagtgtgtggagcagcacatcaaggaaaatacagcctactttgagttcttcaatgatgccaaggaggccacagactacctgaggaacctgaaggatgccatccagaggaagtacagctgtgacaggagcagcagcatccacaagctggaggacctggtgcaggagagcatggaggagaaggaggagctgctgcagtacaagagcaccatcgccaacctgatgggcaaggccaagaccatcatccagctgaagcccaggaacagcgactgccccctgaagaccagcatccccatcaaggccatctgtgactaccggcagatcgagatcaccatctacaaggatgatgaatgtgtgctggccaacaacagccaccgggccaagtggaaggtgatcagccccactggaaatgaggccatggtgcccagcgtgtgcttcaccgtgcccccacccaacaaggaggccgtggacctggccaacagaattgagcagcagtaccagaatgtgctgaccctgtggcatgagagccacatcaacatgaagtctgtggtgtcctggcactacctgatcaatgaaattgaccgcatccgggccagcaatgtggccagcatcaagaccatgctgcccggggagcaccagcaggtgctgagcaacctgcagagcagatttgaggacttcctggaggacagccaggagagccaggtgttcagcggcagtgacatcacccagctggagaaggaggtgaatgtgtgcaagcagtactaccaggagctgctgaagtctgctgagcgggaggagcaggaggagagcgtgtacaacctgtacatcagcgaggtgaggaacatccggctgcggctggagaactgtgaagatagactcatccggcagatccgcacccccctggagagagatgacctgcacgagagcgtcttccgcatcacagagcaggagaagctgaagaaggagctggagcggctgaaggatgacctgggcaccatcaccaacaagtgtgaggagttcttcagccaggccgccgccagcagctctgtgcccaccctgcggtctgagctgaatgtggtgctgcagaacatgaaccaggtgtacagcatgagcagcacctacatcgacaagctgaagacagtgaacctggtgctgaagaacacccaggccgctgaggccctggtgaagctgtatgagaccaagctgtgtgaggaggaggccgtgattgctgacaagaacaacattgaaaatctcatcagcaccctgaagcagtggaggtctgaggtggatgagaagaggcaggtgttccacgccctggaggatgagctgcagaaggccaaggccatcagtgatgagatgttcaagacctacaaggagcgggacctggactttgactggcacaaggagaaggctgaccagctggtggagcgctggcagaatgtgcacgtgcagattgacaaccggctgcgggacctggagggcatcggcaagagcctgaagtactacagagacacctaccaccccctggatgactggatccagcaggtggagaccacccagaggaagatccaggagaaccagcctgagaacagcaagaccctggccacccagctgaaccagcagaagatgctggtgtctgaaattgagatgaagcagagcaagatggatgagtgccagaagtatgcagagcagtacagcgccaccgtgaaggactatgagctgcagaccatgacctaccgggccatggtggacagccagcagaagagccctgtgaagagaagaaggatgcagagcagcgctgacctgatcatccaggagttcatggacctgcggacccgctacacagccctggtgaccctgatgacccagtacatcaagtttgctggggacagcctgaagaggctggaggaggaggagaagagcctggaggaggagaagaaggagcacgtggagaaggccaaggagctgcagaagtgggtgagcaacatcagcaagaccctgaaggatgctgagaaggccggcaagccacccttcagcaagcagaagatcagcagcgaggagatcagcaccaagaaggagcagctgtctgaggccctgcagaccatccagctgttcctggccaagcacggggacaagatgacagatgaggagagaaatgagctggagaagcaggtgaagaccctgcaggagagctacaacctgctcttcagcgagagcctgaagcagctgcaggagagccagaccagcggagatgtgaaggtggaggagaagctggacaaggtgattgctggcaccatcgaccagaccactggagaggtgctgagcgtcttccaggccgtgctgcggggcctgattgattatgacaccggcatccggctgctggagacccagctgatgatcagcggcctcatcagccctgagctgaggaaatgttttgacctgaaggatgccaagagccacggcctgattgatgagcagatcctgtgccagctgaaggagctgagcaaggccaaggagatcatctctgctgccagccccaccaccatccctgtgctggatgccctggcccagagcatgatcacagagagcatggccatcaaggtgctggagatcctgctgagcacaggcagcctggtgatcccagccaccggggagcagctgaccctgcagaaggccttccagcagaacctggtgtcctctgccctcttcagcaaggtgctggagcggcagaacatgtgcaaggacctgattgacccctgcaccagcgagaaggtgtccctgattgacatggtgcagaggagcaccctgcaggagaacacaggcatgtggctgctgcctgtgcggccccaggagggcggccgcatcaccctgaagtgtggcaggaacatcagcatcctgcgggccgcccacgagggcctgattgaccgggagaccatgttccggctgctgagcgcccagctgctgagcggcggcctcatcaacagcaacagcggccagaggatgacagtggaggaggccgtgcgggagggcgtgattgaccgggacacagccagcagcatcctgacctaccaggtgcagacaggaggcatcatccagagcaacccagccaagaggctgactgtggatgaagctgtgcagtgtgacctgatcaccagcagcagcgccctgctggtgctggaggcccagaggggctacgtgggcctcatctggccccacagcggggagatcttccccaccagcagcagcctgcagcaggagctgatcaccaatgagctggcctacaagatcctgaatggccggcagaagattgctgccctgtacatccctgagagcagccaggtgattggcctggatgctgccaagcagctgggcatcatcgacaacaacacagccagcatcctgaagaacatcaccctgcctgacaagatgccagacctgggggacctggaggcctgcaagaatgcccggcgctggctgtccttctgcaagttccagcccagcacagtgcatgactaccggcaggaggaggatgtgtttgatggagaggagcctgtgaccacccagaccagcgaggagaccaagaagctgttcctgagctacctgatgatcaacagctacatggatgccaacacaggccagaggctgctgctgtatgatggagacctggatgaggccgtgggcatgctgctggagggctgccacgccgagtttgatggcaacacagccatcaaggagtgcctggatgtgctgagcagcagcggggtcttcctgaacaatgccagcggccgggagaaggatgagtgcacagccacccccagcagcttcaacaagtgccactgtggggagcctgagcacgaggagaccccagaaaatagaaaatgtgccattgatgaggagttcaatgagatgaggaacacagtcatcaacagcgagttcagccagagcggcaagctggccagcaccatcagcattgaccccaaggtgaacagcagccccagcgtgtgtgtgcccagcctcatctcctacctgacccagacagagctggccgacatctccatgctgcggagtgacagcgagaacatcctgaccaactatgagaaccagagccgggtggagaccaatgaaagagccaatgaatgtagccacagcaagaacatccagaacttccccagcgacctgattgagaaccccatcatgaagagcaagatgagcaagttctgtggggtgaatgaaacagaaaatgaagacaacaccaacagagacagccccatctttgactacagcccccggctgagcgccctgctgagccatgacaagctgatgcacagccagggcagcttcaatgacacccacaccccagagagcaatggaaacaagtgtgaggccccagccctgtccttcagtgacaagaccatgctgagcggccagagaattggagagaagttccaggaccagttcctgggcattgctgccatcaacatcagcctgcccggggagcagtatggccagaagagcctgaacatgatcagcagcaacccccaggtgcagtaccacaatgacaagtacatcagcaacaccagcggggaggatgagaagacccaccctggcttccagcagatgcctgaggacaaggaggatgaaagtgaaattgaggagtacagctgtgctgtgaccccaggaggagacacagacaatgccatcgtgtccctgacctgtgccacccccctgctggatgagaccatcagcgccagtgactatgagaccagcctgctgaatgaccagcagaacaacacaggaacagacacagacagtgatgatgacttctatgacacccccctgtttgaagatgatgaccatgacagcctgctgctggatggagatgaccgggactgcctgcaccctgaggactatgacaccctgcaggaggagaatgatgaaacagccagccctgcagatgtgttctatgatgtgtccaaagaaaatgaaaattccatggtgccccagggcgcccctgtgggcagcctgtctgtgaagaacaaggcccactgcctgcaggacttcctgatggatgtggagaaggatgagctggacagcggggagaagatccacctgaaccctgtgggcagtgacaaggtgaatggccagagcctggagaccggcagcgagagagaatgtaccaacatcctggagggagatgaaagtgacagcctgacagattatgacatcgtgggcggcaaggagagcttcaccgccagcctgaagtttgatgattctggctcctggaggggcaggaaggaggagtatgtgacaggccaggagttccacagcgacacagaccacctggacagcatgcagagcgaggagagctatggagactacatctatgacagcaatgaccaggatgatgatgatgatgatggcattgatgaggagggcggcggcatcagagatgaaaatggcaagccccgctgccagaatgtggccgaggacatggacatccagctgtgtgccagcatcctgaatgaaaattctgatgaaaatgaaaacatcaacaccatgatcctgctggacaagatgcacagctgcagcagcctggagaagcagcagagggtgaatgtggtgcagctggccagccccagcgagaacaacctggtgacagagaagagcaacctgcctgagtacaccacagaaattgctgggaagagcaaagaaaacctgctgaaccacgagatggtgctgaaggatgtgctgccccccatcatcaaggacacagaaagtgagaagacctttggacctgccagcatcagccatgacaacaacaacatcagcagcaccagcgagctgggcacagacctggccaacaccaaggtgaagctgatccagggcagcgagctgcctgagctgacagacagcgtgaagggcaaggatgagtacttcaagaacatgacccccaaggtggacagcagcctggaccacatcatctgcacagagccagacctgattggcaagccagctgaggagagccacctgagcctcatcgcctctgtgacagacaaggacccccagggcaatggaagtgacctgatcaagggcagagatggcaagagtgacatcctgattgaagatgagaccagcatccagaagatgtacctgggggagggggaggtgctggtggagggcctggtggaggaggagaacagacacctgaagctgctgcccgggaagaacacccgggacagcttcaagctgatcaacagccagttccccttcccccagatcaccaacaatgaggagctgaaccagaagggcagcctgaagaaggccaccgtgaccctgaaggatgagcccaacaacctgcagatcatcgtgtccaagagccctgtgcagtttgagaacctggaggagatctttgacacctctgtgtccaaggagatcagtgatgacatcaccagtgacatcacctcctgggagggcaacacccactttgaggagagcttcacagatggccctgagaaggagctggacctcttcacctacctgaagcactgtgccaagaacatcaaggccaaggatgtggccaagcccaatgaagatgtgcccagccacgtgctgatcacagccccacccatgaaggagcacctgcagctgggcgtgaacaacaccaaggagaagagcaccagcacccagaaggacagccccctgaatgacatgatccagagcaatgacctgtgcagcaaggagagcatcagcggcggcggcacagagatcagccagttcaccccagagagcattgaggccaccctgagcatcctgagcaggaagcacgtggaggatgtgggcaagaatgacttcctgcagagcgagcgctgtgccaacggcctgggcaatgacaacagcagcaacaccctgaacacagactacagcttcctggagatcaacaacaagaaggagcgcatcgagcagcagctgcccaaggagcaggccctgagccccaggagccaggagaaggaggtgcagatccctgagctgagccaggtgtttgtggaggatgtgaaggacatcctgaagagccggctgaaggagggccacatgaacccccaggaggtggaggagcccagcgcctgtgccgacaccaagatcctgatccagaacctgatcaagaggatcaccaccagccagctggtgaatgaggccagcacagtgcccagcgacagccagatgtctgacagcagcggcgtgagccccatgaccaacagcagcgagctgaagccagagagcagagatgaccccttctgcatcggcaacctgaagtctgagctgctgctgaacatcctgaagcaggaccagcacagccagaagatcaccggggtgtttgagctgatgagggagctgacccacatggagtatgacctggagaagaggggcatcaccagcaaggtgctgcccctgcagctggagaacatcttctacaagctgctggctgatggctacagcgagaagattgagcacgtgggggacttcaaccagaaggcctgcagcaccagcgagatgatggaggagaagccccacatcctgggggacatcaagagcaaggagggcaactactacagccccaacctggagaccgtgaaggagatcggcctggagagcagcacagtgtgggccagcaccctgcccagagatgagaagctgaaggacctgtgcaatgacttccccagccacctggagtgcaccagcggcagcaaggagatggccagcggggacagcagcacagagcagttcagcagcgagctgcagcagtgcctgcagcacacagagaagatgcatgagtacctgaccctgctgcaggacatgaagccacccctggacaaccaggagagcctggacaacaacctggaggccctgaagaaccagctgcggcagctggagacctttgagctgggcctggcccccatcgccgtcatcctgaggaaggacatgaagctggccgaggagttcctgaagagcctgcccagcgacttcccccggggccacgtggaggagctgagcatcagccaccagagcctgaagacagccttcagcagcctgagcaatgtgagcagcgagaggaccaagcagatcatgctggccatcgacagcgagatgagcaagctggccgtgtcccatgaggagttcctgcacaagctgaagagcttcagtgactgggtgtctgagaagagcaagtctgtgaaggacattgaaattgtgaatgtgcaggacagtgaatatgtgaagaagaggctggagttcctgaaggccaacaacgtgctgaaggacctgggccacaccaagatgcagctggagaccacagcctttgatgtgcagttcttcatcagtgaatatgcccaggacctgagccccaaccagagcaagcagctgctgcggctgctgaacaccacccagaagtgcttcctggatgtgcaggagagcgtgaccacccaggtggagcggctggagacccagctgcacctggagcaggacctggatgaccagaagatcgtggccgagcggcagcaggagtacaaggagaagctgcagggcatctgtgacctgctgacccagacagagaacagactcatcggccaccaggaggccttcatgattggagatggcaccgtggagctgaagaagtaccagagcaagcaggaggagctgcagaaggacatgcagggcagcgcccaggccctggccgaggtggtgaagaacacagagaacttcctgaaggaaaatggagagaagctgagccaggaggacaaggccctgattgagcagaagctgaatgaggccaagatcaagtgtgagcagctgaacctgaaggccgagcagagcaagaaggagctggacaaggtggtgaccacagccatcaaggaggagacagagaaggtggccgctgtgaagcagctggaggagagcaagaccaagattgagaacctgctggactggctgagcaatgtggacaaggacagcgagcgggccggcaccaagcacaagcaggtgattgagcagaatggcacccacttccaggagggagatggcaagagcgccatcggggaggaggatgaggtgaatggaaacctgctggagacagatgtggatggccaggtgggcaccacccaggagaacctgaaccagcagtaccagaaggtgaaggcccagcacgagaagatcatcagccagcaccaggccgtcatcatcgccacccagagcgcccaggtgctgctggagaagcagggccagtacctgagccctgaggagaaggagaagctgcagaagaacatgaaggagctgaaggtgcactatgaaacagccctggccgagagcgagaagaagatgaagctgacccacagcctgcaggaggagctggagaagtttgatgctgactacacagaatttgagcactggctgcagcagagcgagcaggagctggagaacctggaggccggggctgatgacatcaatggcctgatgaccaagctgaagaggcagaagagcttctctgaagatgtgatcagccacaagggggacctgcgctacatcaccatcagcggcaacagagtgctggaggccgccaagagctgcagcaagagagatggcggcaaggtggacaccagcgccacccaccgggaggtgcagaggaagctggaccacgccacagaccgcttccgcagcctgtacagcaaatgtaatgtgctgggcaacaacctgaaggacctggtggacaagtaccagcactatgaagatgccagctgtggcctgctggccggcctgcaggcctgtgaggccacagccagcaagcacctgtctgagcccatcgctgtggaccccaagaacctgcagaggcagctggaggagaccaaggccctgcagggccagatcagcagccagcaggtggccgtggagaagctgaagaagacagctgaggtgctgctggatgcccggggcagcctgctgcctgccaagaatgacatccagaagaccctggatgacatcgtgggccgctatgaggacctgagcaagtctgtgaatgaaagaaatgagaagctgcagatcaccctgaccaggagcctgtctgtgcaggacggcctggatgagatgctggactggatgggaaatgtggagagcagcctgaaggagcagggccaggtgcccctgaacagcacagccctgcaggacatcatcagcaagaacatcatgctggagcaggacattgctggccggcagagcagcatcaatgccatgaatgagaaggtgaagaagttcatggagaccacagaccccagcacagccagcagcctgcaggccaagatgaaggacctgagcgcccgcttcagcgaggccagccacaagcacaaggagaccctggccaagatggaggagctgaagaccaaggtggagctgtttgagaacctgtctgagaagctgcagaccttcctggagaccaagacccaggccctgacagaggtggatgtgcctgggaaggatgtgacagagctgagccagtacatgcaggagagcaccagcgagttcctggagcacaagaagcacctggaggtgctgcacagcctgctgaaggagatcagcagccacggcctgcccagcgacaaggccctggtgctggagaagaccaacaacctgagcaagaagttcaaggagatggaggacaccatcaaggagaagaaggaggccgtgaccagctgccaggagcagctggatgccttccaggtgctggtgaagagcctgaagtcctggatcaaggagaccaccaagaaggtgcccatcgtgcagcccagctttggagctgaggacctgggcaagagcctggaggacaccaagaagctgcaggagaagtggagcctgaagaccccagagatccagaaggtgaacaacagcggcatcagcctgtgcaacctgatctctgctgtgaccaccccagccaaggccatcgctgctgtgaagtctggaggagctgtgctgaatggagagggcacagccaccaacacagaggagttctgggccaacaagggcctgaccagcatcaagaaggacatgacagacatcagccacggctatgaggacctgggcctgctgctgaaggacaagattgctgagctgaacaccaagctgagcaagctgcagaaggcccaggaggagagcagcgccatgatgcagtggctgcagaagatgaacaagacagccaccaagtggcagcagaccccagcccccacagacacagaggccgtgaagacccaggtggagcagaacaagagctttgaagctgagctgaagcagaatgtgaacaaggtgcaggagctgaaggacaagctgacagagctgctggaggagaacccagacaccccagaggccccccgctggaagcagatgctgacagaaattgacagcaagtggcaggagctgaaccagctgaccatcgaccggcagcagaagctggaggagagcagcaacaacctgacccagttccagacagtggaggcccagctgaagcagtggctggtggagaaggagctgatggtgtctgtgctgggccccctgagcattgaccccaacatgctgaacacccagaggcagcaggtgcagatcctgctgcaggagtttgccaccaggaagccccagtatgagcagctgacagctgctggccagggcatcctgagcaggcctggagaggaccccagcctgcggggcatcgtgaaggagcagctggccgctgtgacccagaagtgggacagcctgaccggccagctgagtgacagatgtgactggattgaccaggccatcgtgaagagcacccagtaccagagcctgctgcggagcctgagtgacaagctgagtgacctggacaacaagctgagcagcagcctggccgtgtccacccacccagatgccatgaaccagcagctggagacagcccagaagatgaagcaggagatccagcaggagaagaagcagatcaaggtggcccaggccctgtgtgaggacctgagcgccctggtgaaggaggagtacctgaaggccgagctgagccggcagctggagggcatcctgaagagcttcaaggatgtggagcagaaggcagaaaatcatgtgcagcacctgcagagcgcctgtgccagcagccaccagttccagcagatgagccgggacttccaggcctggctggacaccaagaaggaggagcagaacaagagccaccccatcagcgccaagctggatgtgctggagagcctcatcaaggaccacaaggacttcagcaagaccctgacagcccagagccacatgtatgagaagaccatcgccgagggggagaacctgctgctgaagacccagggcagcgagaaggccgccctgcagctgcagctgaacaccatcaagaccaactgggacaccttcaacaagcaggtgaaggagcgggagaacaagctgaaggagagcctggagaaggccctgaagtacaaggagcaggtggagaccctgtggccctggattgacaagtgccagaacaacctggaggagatcaagttctgcctggaccctgcagaaggagaaaattccatcgccaagctgaagagcctgcagaaggagatggaccagcacttcggcatggtggagctgctgaacaacacagccaacagcctgctgtctgtgtgtgaaattgacaaggaggtggtgacagatgagaacaagagcctcatccagaaggtggacatggtgacagagcagctgcacagcaagaagttctgcctggagaacatgacccagaagttcaaggagttccaggaggtgtccaaggagagcaagaggcagctgcagtgtgccaaggagcagctggacatccatgacagcctgggcagccaggcctacagcaacaagtacctgaccatgctgcagacccagcagaagagcctgcaggccctgaagcaccaggtggacctggccaagaggctggcccaggacctggtggtggaggccagtgacagcaagggcaccagtgatgtgctgctgcaggtggagaccatcgcccaggagcacagcaccctgagccagcaggtggatgagaagtgcagcttcctggagaccaagctgcagggcatcggccacttccagaacaccatccgggagatgttcagccagtttgctgagtttgatgatgagctggacagcatggcccctgtgggcagagatgctgagaccctgcagaagcagaaggagaccatcaaggccttcctgaagaagctggaggccctgatggccagcaatgacaatgccaacaagacctgcaagatgatgctggccacagaggagaccagcccagacctggtgggcatcaagagggacctggaggccctgagcaagcagtgcaacaagctgctggaccgggcccaggcccgggaggagcaggtggagggcaccatcaagaggctggaggagttctacagcaagctgaaggagttcagcatcctgctgcagaaggccgaggagcacgaggagagccagggccctgtgggcatggagacagagaccatcaaccagcagctgaacatgttcaaggtgttccagaaggaggagattgagcccctgcagggcaagcagcaggatgtgaactggctgggccagggcctcatccagagcgctgccaagagcaccagcacccagggcctggagcatgacctggatgatgtgaatgcccgctggaagaccctgaacaagaaggtggcccagagagctgcccagctgcaggaggccctgctgcactgcggccgcttccaggatgccctggagagcctgctgtcctggatggtggacacagaggagctggtggccaaccagaagccacccagcgctgagttcaaggtggtgaaggcccagatccaggagcagaagctgctgcagaggctgctggatgacaggaagagcacagtggaggtgatcaagcgggagggggagaagatcgccaccacagctgagcctgctgacaaggtgaagatcctgaagcagctgagcctgctggacagccgctgggaggccctgctgaacaaggccgagaccaggaaccggcagctggagggcatctctgtggtggcccagcagttccacgagaccctggagcccctgaatgagtggctgaccaccatcgagaagaggctggtgaactgtgagcccatcggcacccaggccagcaagctggaggagcagatcgcccagcacaaggccctggaggatgacatcatcaaccacaacaagcacctgcaccaggccgtgtccatcggccagagcctgaaggtgctgagcagccgggaggacaaggacatggtgcagagcaagctggacttcagccaggtgtggtacatcgagatccaggagaagagccacagccgctctgagctgctgcagcaggccctgtgcaatgccaagatctttggagaagatgaggtggagctgatgaactggctgaatgaggtgcatgacaagctgagcaagctgtctgtgcaggactacagcacagagggcctgtggaagcagcagagcgagctgcgggtgctgcaggaggacatcctgctgaggaagcagaatgtggaccaggccctgctgaatggcctggagctgctgaagcagaccactggagatgaggtgctgatcatccaggacaagctggaggccatcaaggcccgctacaaggacatcaccaagctgagcacagatgtggccaagaccctggagcaggccctgcagctggcccggcggctgcacagcacccatgaggagctgtgcacctggctggacaaggtggaggtggagctgctgtcctatgagacccaggtgctgaagggggaggaggccagccaggcccagatgaggcccaaggagctgaagaaggaggccaagaacaacaaggccctgctggacagcctgaatgaggtgagcagcgccctgctggagctggtgccctggagggcccgggagggcctggagaagatggtggccgaggacaatgaaagataccgcctggtgtctgacaccatcacccagaaggtggaggagattgatgctgccatcctgcggagccagcagtttgaccaggccgcagatgctgagctgtcctggatcacagaaacagagaagaagctgatgagcctgggggacatccggctggagcaggaccagaccagcgcccagctgcaggtgcagaagaccttcaccatggagatcctgcggcacaaggacatcattgatgacctggtgaagagcggccacaagatcatgacagcctgcagcgaggaggagaagcagagcatgaagaagaagctggacaaggtgctgaagaactatgacaccatctgccagatcaacagcgagcgctacctgcagctggagcgggcccagagcctggtgaaccagttctgggagacctatgaggagctgtggccctggctgacagagacccagagcatcatcagccagctgcctgccccagccctggagtatgagaccctgcggcagcagcaggaggagcaccggcagctgcgggagctgattgctgagcacaagccccacatcgacaagatgaacaagacaggcccccagctgctggagctgagccctggagagggcttcagcatccaggagaagtatgtggccgctgacaccctgtacagccagatcaaggaggatgtgaagaagagagctgtggccctggatgaggccatcagccagagcacccagttccatgacaagattgaccagatcctggagagcctggagcgcatcgtggagcggctgcggcagcccccatccatctctgctgaggtggagaagatcaaggagcagatcagcgagaacaagaatgtgtctgtggacatggagaagctgcagcccctgtatgagaccctgaagcagagaggagaggagatgattgcccggagcggcggcacagacaaggacatcagcgccaaggctgtgcaggacaagctggaccagatggtgttcatctgggagaacatccacaccctggtggaggagcgggaggccaagctgctggatgtgatggagctggccgagaagttctggtgtgaccacatgagcctgattgtgaccatcaaggacacccaggacttcatccgggacctggaggaccccggcatcgaccccagcgtggtgaagcagcagcaggaggccgctgagaccatccgggaggagattgatggcctgcaggaggagctggacatcgtcatcaacctgggcagcgagctgattgctgcctgtggggagccagacaagcccatcgtgaagaagagcattgatgagctgaacagcgcctgggacagcctgaacaaggcctggaaggacagaattgacaagctggaggaggccatgcaggccgctgtgcagtaccaggacggcctgcaggccgtgtttgactgggtggacattgctgggggcaagctggcctccatgagccccatcggcacagacctggagaccgtgaagcagcagatcgaggagctgaagcagttcaagtctgaggcctaccagcagcagatcgagatggagcggctgaaccaccaggccgagctgctgctgaagaaggtgacagaggagagtgacaagcacacagtgcaggaccccctgatggagctgaagctgatctgggacagcctggaggagcgcatcatcaaccggcagcacaagctggagggcgccctgctggccctgggccagttccagcacgccctggatgagctgctggcctggctgacccacacagagggcctgctgtctgagcagaagcctgtgggcggggaccccaaggccattgaaattgagctggccaagcaccacgtgctgcagaatgatgtgctggcccaccagagcacagtggaggccgtgaacaaggctggaaatgacctgattgagagcagcgctggggaggaggccagcaacctgcagaacaagctggaggtgctgaaccagcgctggcagaatgtgctggagaagacagagcagaggaagcagcagctggatggagccctgcggcaggccaagggcttccacggggagattgaggacctgcagcagtggctgacagacacagagcggcacctgctggccagcaagcccctgggcggcctgcctgagacagccaaggagcagctgaatgtgcacatggaggtgtgtgccgcctttgaggccaaggaggagacctacaagagcctgatgcagaagggccagcagatgctggcccgctgccccaagtctgctgagaccaacatcgaccaggacatcaacaacctgaaggagaagtgggagagcgtggagaccaagctgaatgaaaggaagaccaagctggaggaggccctgaacctggccatggagttccacaacagcctgcaggacttcatcaactggctgacccaggccgagcagaccctgaatgtggccagccggcccagcctcatcctggacacagtgctcttccagattgatgagcacaaggtgtttgccaatgaggtgaacagccaccgggagcagatcatcgagctggacaagacaggcacccacctgaagtacttcagccagaagcaggatgtggtgctgatcaagaacctgctgatctctgtgcagagccgctgggagaaggtggtgcagaggctggtggagcggggccgcagcctggatgatgccaggaagagggccaagcagttccacgaggcctggagcaagctgatggagtggctggaggagagcgagaagagcctggacagcgagctggagatcgccaatgaccctgacaagatcaagacccagctggcccagcacaaggagttccagaagagcctgggcgccaagcacagcgtgtatgacaccaccaacagaacaggccgcagcctgaaggagaagaccagcctggctgatgacaacctgaagctggatgacatgctgtctgagctgcgggacaagtgggacaccatctgtgggaagtctgtggagcggcagaacaagctggaggaggccctgctcttcagcggccagttcacagatgccctgcaggccctgattgactggctgtacagagtggagccccagctggccgaggaccagcctgtgcacggggacatcgacctggtgatgaacctgattgacaaccacaaggccttccagaaggagctgggcaagaggaccagctctgtgcaggccctgaagaggtctgcccgggagctgattgagggcagcagagatgacagctcctgggtgaaggtgcagatgcaggagctgagcacccgctgggagaccgtgtgtgccctgagcatcagcaagcagacccggctggaggccgccctgcggcaggccgaggagttccacagcgtggtgcacgccctgctggagtggctggccgaggccgagcagaccctgcgcttccacggcgtgctgcctgatgatgaagatgccctgcggaccctgattgaccagcacaaggagttcatgaagaagctggaggagaagagagctgagctgaacaaggccaccaccatgggagacacagtgctggccatctgccacccagacagcatcaccaccatcaagcactggatcaccatcatccgggccaggtttgaggaggtgctggcctgggccaagcagcaccagcagaggctggccagcgccctggccggcctcatcgccaagcaggagctgctggaggccctgctggcctggctgcagtgggccgagaccaccctgacagacaaggacaaggaggtgatcccccaggagattgaggaggtgaaggccctgattgctgagcaccagaccttcatggaggagatgaccaggaagcagccagatgtggacaaggtgaccaagacctacaagagaagagctgctgaccccagcagcctgcagagccacatccctgtgctggacaagggccgggccggcaggaagcgcttccctgccagcagcctgtaccccagcggcagccagacccagatcgagaccaagaacccccgggtgaacctgctggtgtccaagtggcagcaggtgtggctgctggccctggagaggaggaggaagctgaatgatgccctggaccggctggaggagctgcgggagtttgccaactttgattttgacatctggaggaagaagtacatgcgctggatgaaccacaagaagagccgggtgatggacttcttcagaagaattgacaaggaccaggacggcaagatcacccggcaggagttcattgatggcatcctgagcagcaagttccccaccagccggctggagatgtctgctgtggccgacatctttgacagagatggagatggctacatcgactactatgaatttgtggccgccctgcaccccaacaaggatgcctacaagcccatcacagatgctgacaagattgaagatgaggtgacccggcaggtggccaagtgcaagtgtgccaagcgcttccaggtggagcagatcggggacaacaagtacagagtgtccttccagagcaactttggagacagccagcagctgcggctggtgcgcatcctgcggagcacagtgatggtgcgggtgggcggcggctggatggccctggatgagttcctggtgaagaatgacccctgccgggtgcaccaccacggcagcaagatgctgcggtctgagagcaacagcagcatcaccaccacccagcccaccatcgccaagggccgcaccaacatggagctgcgggagaagttcatcctggctgatggagccagccagggcatggccgccttccggccccggggccgccgcagccggcccagcagcagaggagccagccccaacagaagcacctctgtgagcagccaggccgcccaggccgccagcccccaggtgcctgccaccaccacccccaagggcacccccatccagggcagcaagctgcggctgcccggctacctgagcggcaagggcttccacagcggggaggacagcggcctcatcaccacagctgctgcccgggtgaggacccagtttgctgacagcaagaagacccccagccggcccggcagccgggccggcagcaaggccggcagccgggccagcagcagaagaggaagtgatgccagtgactttgacatcagcgagatccagagcgtgtgcagtgatgtggagaccgtgccccagacccaccggcccaccccccgggccggcagccggcccagcacagccaagcccagcaagatccccaccccccagaggaagagccctgccagcaagctggacaagagcagcaagaggtag

SEQ ID NO: 150717 - DNA, 16374 bp, synthetic construct
  misc_feature 1..16374: note = Description of Artificial Sequence: Synthetic coding sequence
  source 1..16374: mol_type = other DNA
atggccggctacctgagccctgctgcctacctgtatgtggaggagcaggagtacctgcaggcctatgaagatgtgctggagcgctacaaggatgagcgggacaaggtgcagaagaagaccttcaccaagtggatcaaccagcacctgatgaaggtgaggaagcacgtgaatgacctgtatgaggacctgagagatggccacaacctgatcagcctgctggaggtgctgagcggggacaccctgccccgggagaagggccgcatgaggttccaccggctgcagaatgtgcagatcgccctggactacctgaagaggcggcaggtgaagctggtgaacatcagaaatgatgacatcacagatggcaaccccaagctgaccctgggcctcatctggaccatcatcctgcacttccagatcagtgacatccacgtgactggagagagcgaggacatgtctgccaaggagcggctgctgctgtggacccagcaggccacagagggctacgccggcatccgctgtgagaacttcaccacctgctggagagatggcaagctgttcaatgccatcatccacaagtacagaccagacctgattgacatgaacacagtggccgtgcagagcaacctggccaacctggagcacgccttctacgtggccgagaagattggagtcatccggctgctggaccctgaagatgtggatgtgagcagcccagatgagaagagcgtcatcacctacgtgagcagcctgtatgatgccttccccaaggtgcctgagggcggggagggcatcggggccaatgatgtggaggtgaagtggattgagtaccagaacatggtgaactacctgatccagtggatccgccaccacgtgaccaccatgtctgagaggaccttccccaacaaccctgtggagctgaaggccctgtacaaccagtacctgcagttcaaggagacagagatcccccccaaggagacagagaagagcaagatcaagaggctgtacaagctgctggagatctggattgaatttggccgcatcaagctgctgcagggctaccaccccaatgacatcgagaaggagtggggcaagctgatcatcgccatgctggagcgggagaaggccctgcggcctgaggtggagcggctggagatgctgcagcagatcgccaacagagtgcagagggacagcgtcatctgtgaggacaagctgatcctggccggaaatgccctgcagagcgacagcaagaggctggagagcggcgtgcagttccagaatgaggccgagattgctggctacatcctggagtgtgagaacctgctgcggcagcacgtgattgatgtgcagatcctgattgatggcaagtactaccaggccgaccagctggtgcagagggtggccaagctgagagatgagatcatggccctgagaaatgaatgttcttctgtgtacagcaagggccgcatcctgaccacagagcagaccaagctgatgatcagcggcatcacccagagcctgaacagcggctttgcccagaccctgcaccccagcctgaccagcggcctgacccagagcctgacccccagcctgaccagcagctccatgaccagcggcctgagcagcggcatgaccagccggctgacccccagcgtgaccccagcctacaccccaggcttccccagcggcctggtgcccaacttcagcagtggagtggagcccaacagcctgcagaccctgaagctgatgcagatcaggaagcccctgctgaagagcagcctgctggaccagaacctgacagaggaggagatcaacatgaagtttgtgcaggacctgctgaactgggtggatgagatgcaggtgcagctggacagaacagagtggggcagtgacctgcccagcgtggagagccacctggagaaccacaagaatgtgcaccgggccatcgaggagtttgagagcagcctgaaggaggccaagatcagcgagatccagatgacagcccccctgaagctgacctacgccgagaagctgcaccggctggagagccagtatgccaagctgctgaacaccagcaggaaccaggagcggcacctggacaccctgcacaactttgtgtcccgggccaccaatgagctgatctggctgaatgagaaggaggaggaggaggtggcctatgactggagcgagaggaacaccaacatcgccaggaagaaggactaccacgccgagctgatgagggagctggaccagaaggaggagaacatcaagtctgtgcaggagattgctgagcagctgctgctggagaaccacccagcccggctgaccatcgaggcctacagagctgccatgcagacccagtggagctggatcctgcagctgtgccagtgtgtggagcagcacatcaaggaaaatacagcctactttgagttcttcaatgatgccaaggaggccacagactacctgaggaacctgaaggatgccatccagaggaagtacagctgtgacaggagcagcagcatccacaagctggaggacctggtgcaggagagcatggaggagaaggaggagctgctgcagtacaagagcaccatcgccaacctgatgggcaaggccaagaccatcatccagctgaagcccaggaacagcgactgccccctgaagaccagcatccccatcaaggccatctgtgactaccggcagatcgagatcaccatctacaaggatgatgaatgtgtgctggccaacaacagccaccgggccaagtggaaggtgatcagccccactggaaatgaggccatggtgcccagcgtgtgcttcaccgtgcccccacccaacaaggaggccgtggacctggccaacagaattgagcagcagtaccagaatgtgctgaccctgtggcatgagagccacatcaacatgaagtctgtggtgtcctggcactacctgatcaatgaaattgaccgcatccgggccagcaatgtggccagcatcaagaccatgctgcccggggagcaccagcaggtgctgagcaacctgcagagcagatttgaggacttcctggaggacagccaggagagccaggtgttcagcggcagtgacatcacccagctggagaaggaggtgaatgtgtgcaagcagtactaccaggagctgctgaagtctgctgagcgggaggagcaggaggagagcgtgtacaacctgtacatcagcgaggtgaggaacatccggctgcggctggagaactgtgaagatagactcatccggcagatccgcacccccctggagagagatgacctgcacgagagcgtcttccgcatcacagagcaggagaagctgaagaaggagctggagcggctgaaggatgacctgggcaccatcaccaacaagtgtgaggagttcttcagccaggccgccgccagcagctctgtgcccaccctgcggtctgagctgaatgtggtgctgcagaacatgaaccaggtgtacagcatgagcagcacctacatcgacaagctgaagacagtgaacctggtgctgaagaacacccaggccgctgaggccctggtgaagctgtatgagaccaagctgtgtgaggaggaggccgtgattgctgacaagaacaacattgaaaatctcatcagcaccctgaagcagtggaggtctgaggtggatgagaagaggcaggtgttccacgccctggaggatgagctgcagaaggccaaggccatcagtgatgagatgttcaagacctacaaggagcgggacctggactttgactggcacaaggagaaggctgaccagctggtggagcgctggcagaatgtgcacgtgcagattgacaaccggctgcgggacctggagggcatcggcaagagcctgaagtactacagagacacctaccaccccctggatgactggatccagcaggtggagaccacccagaggaagatccaggagaaccagcctgagaacagcaagaccctggccacccagctgaaccagcagaagatgctggtgtctgaaattgagatgaagcagagcaagatggatgagtgccagaagtatgcagagcagtacagcgccaccgtgaaggactatgagctgcagaccatgacctaccgggccatggtggacagccagcagaagagccctgtgaagagaagaaggatgcagagcagcgctgacctgatcatccaggagttcatggacctgcggacccgctacacagccctggtgaccctgatgacccagtacatcaagtttgctggggacagcctgaagaggctggaggaggaggagaagagcctggaggaggagaagaaggagcacgtggagaaggccaaggagctgcagaagtgggtgagcaacatcagcaagaccctgaaggatgctgagaaggccggcaagccacccttcagcaagcagaagatcagcagcgaggagatcagcaccaagaaggagcagctgtctgaggccctgcagaccatccagctgttcctggccaagcacggggacaagatgacagatgaggagagaaatgagctggagaagcaggtgaagaccctgcaggagagctacaacctgctcttcagcgagagcctgaagcagctgcaggagagccagaccagcggagatgtgaaggtggaggagaagatcgtggccgagcggcagcaggagtacaaggagaagctgcagggcatctgtgacctgctgacccagacagagaacagactcatcggccaccaggaggccttcatgattggagatggcaccgtggagctgaagaagtaccagagcaagcaggaggagctgcagaaggacatgcagggcagcgcccaggccctggccgaggtggtgaagaacacagagaacttcctgaaggaaaatggagagaagctgagccaggaggacaaggccctgattgagcagaagctgaatgaggccaagatcaagtgtgagcagctgaacctgaaggccgagcagagcaagaaggagctggacaaggtggtgaccacagccatcaaggaggagacagagaaggtggccgctgtgaagcagctggaggagagcaagaccaagattgagaacctgctggactggctgagcaatgtggacaaggacagcgagcgggccggcaccaagcacaagcaggtgattgagcagaatggcacccacttccaggagggagatggcaagagcgccatcggggaggaggatgaggtgaatggaaacctgctggagacagatgtggatggccaggtgggcaccacccaggagaacctgaaccagcagtaccagaaggtgaaggcccagcacgagaagatcatcagccagcaccaggccgtcatcatcgccacccagagcgcccaggtgctgctggagaagcagggccagtacctgagccctgaggagaaggagaagctgcagaagaacatgaaggagctgaaggtgcactatgaaacagccctggccgagagcgagaagaagatgaagctgacccacagcctgcaggaggagctggagaagtttgatgctgactacacagaatttgagcactggctgcagcagagcgagcaggagctggagaacctggaggccggggctgatgacatcaatggcctgatgaccaagctgaagaggcagaagagcttctctgaagatgtgatcagccacaagggggacctgcgctacatcaccatcagcggcaacagagtgctggaggccgccaagagctgcagcaagagagatggcggcaaggtggacaccagcgccacccaccgggaggtgcagaggaagctggaccacgccacagaccgcttccgcagcctgtacagcaaatgtaatgtgctgggcaacaacctgaaggacctggtggacaagtaccagcactatgaagatgccagctgtggcctgctggccggcctgcaggcctgtgaggccacagccagcaagcacctgtctgagcccatcgctgtggaccccaagaacctgcagaggcagctggaggagaccaaggccctgcagggccagatcagcagccagcaggtggccgtggagaagctgaagaagacagctgaggtgctgctggatgcccggggcagcctgctgcctgccaagaatgacatccagaagaccctggatgacatcgtgggccgctatgaggacctgagcaagtctgtgaatgaaagaaatgagaagctgcagatcaccctgaccaggagcctgtctgtgcaggacggcctggatgagatgctggactggatgggaaatgtggagagcagcctgaaggagcagggccaggtgcccctgaacagcacagccctgcaggacatcatcagcaagaacatcatgctggagcaggacattgctggccggcagagcagcatcaatgccatgaatgagaaggtgaagaagttcatggagaccacagaccccagcacagccagcagcctgcaggccaagatgaaggacctgagcgcccgcttcagcgaggccagccacaagcacaaggagaccctggccaagatggaggagctgaagaccaaggtggagctgtttgagaacctgtctgagaagctgcagaccttcctggagaccaagacccaggccctgacagaggtggatgtgcctgggaaggatgtgacagagctgagccagtacatgcaggagagcaccagcgagttcctggagcacaagaagcacctggaggtgctgcacagcctgctgaaggagatcagcagccacggcctgcccagcgacaaggccctggtgctggagaagaccaacaacctgagcaagaagttcaaggagatggaggacaccatcaaggagaagaaggaggccgtgaccagctgccaggagcagctggatgccttccaggtgctggtgaagagcctgaagtcctggatcaaggagaccaccaagaaggtgcccatcgtgcagcccagctttggagctgaggacctgggcaagagcctggaggacaccaagaagctgcaggagaagtggagcctgaagaccccagagatccagaaggtgaacaacagcggcatcagcctgtgcaacctgatctctgctgtgaccaccccagccaaggccatcgctgctgtgaagtctggaggagctgtgctgaatggagagggcacagccaccaacacagaggagttctgggccaacaagggcctgaccagcatcaagaaggacatgacagacatcagccacggctatgaggacctgggcctgctgctgaaggacaagattgctgagctgaacaccaagctgagcaagctgcagaaggcccaggaggagagcagcgccatgatgcagtggctgcagaagatgaacaagacagccaccaagtggcagcagaccccagcccccacagacacagaggccgtgaagacccaggtggagcagaacaagagctttgaagctgagctgaagcagaatgtgaacaaggtgcaggagctgaaggacaagctgacagagctgctggaggagaacccagacaccccagaggccccccgctggaagcagatgctgacagaaattgacagcaagtggcaggagctgaaccagctgaccatcgaccggcagcagaagctggaggagagcagcaacaacctgacccagttccagacagtggaggcccagctgaagcagtggctggtggagaaggagctgatggtgtctgtgctgggccccctgagcattgaccccaacatgctgaacacccagaggcagcaggtgcagatcctgctgcaggagtttgccaccaggaagccccagtatgagcagctgacagctgctggccagggcatcctgagcaggcctggagaggaccccagcctgcggggcatcgtgaaggagcagctggccgctgtgacccagaagtgggacagcctgaccggccagctgagtgacagatgtgactggattgaccaggccatcgtgaagagcacccagtaccagagcctgctgcggagcctgagtgacaagctgagtgacctggacaacaagctgagcagcagcctggccgtgtccacccacccagatgccatgaaccagcagctggagacagcccagaagatgaagcaggagatccagcaggagaagaagcagatcaaggtggcccaggccctgtgtgaggacctgagcgccctggtgaaggaggagtacctgaaggccgagctgagccggcagctggagggcatcctgaagagcttcaaggatgtggagcagaaggcagaaaatcatgtgcagcacctgcagagcgcctgtgccagcagccaccagttccagcagatgagccgggacttccaggcctggctggacaccaagaaggaggagcagaacaagagccaccccatcagcgccaagctggatgtgctggagagcctcatcaaggaccacaaggacttcagcaagaccctgacagcccagagccacatgtatgagaagaccatcgccgagggggagaacctgctgctgaagacccagggcagcgagaaggccgccctgcagctgcagctgaacaccatcaagaccaactgggacaccttcaacaagcaggtgaaggagcgggagaacaagctgaaggagagcctggagaaggccctgaagtacaaggagcaggtggagaccctgtggccctggattgacaagtgccagaacaacctggaggagatcaagttctgcctggaccctgcagaaggagaaaattccatcgccaagctgaagagcctgcagaaggagatggaccagcacttcggcatggtggagctgctgaacaacacagccaacagcctgctgtctgtgtgtgaaattgacaaggaggtggtgacagatgagaacaagagcctcatccagaaggtggacatggtgacagagcagctgcacagcaagaagttctgcctggagaacatgacccagaagttcaaggagttccaggaggtgtccaaggagagcaagaggcagctgcagtgtgccaaggagcagctggacatccatgacagcctgggcagccaggcctacagcaacaagtacctgaccatgctgcagacccagcagaagagcctgcaggccctgaagcaccaggtggacctggccaagaggctggcccaggacctggtggtggaggccagtgacagcaagggcaccagtgatgtgctgctgcaggtggagaccatcgcccaggagcacagcaccctgagccagcaggtggatgagaagtgcagcttcctggagaccaagctgcagggcatcggccacttccagaacaccatccgggagatgttcagccagtttgctgagtttgatgatgagctggacagcatggcccctgtgggcagagatgctgagaccctgcagaagcagaaggagaccatcaaggccttcctgaagaagctggaggccctgatggccagcaatgacaatgccaacaagacctgcaagatgatgctggccacagaggagaccagcccagacctggtgggcatcaagagggacctggaggccctgagcaagcagtgcaacaagctgctggaccgggcccaggcccgggaggagcaggtggagggcaccatcaagaggctggaggagttctacagcaagctgaaggagttcagcatcctgctgcagaaggccgaggagcacgaggagagccagggccctgtgggcatggagacagagaccatcaaccagcagctgaacatgttcaaggtgttccagaaggaggagattgagcccctgcagggcaagcagcaggatgtgaactggctgggccagggcctcatccagagcgctgccaagagcaccagcacccagggcctggagcatgacctggatgatgtgaatgcccgctggaagaccctgaacaagaaggtggcccagagagctgcccagctgcaggaggccctgctgcactgcggccgcttccaggatgccctggagagcctgctgtcctggatggtggacacagaggagctggtggccaaccagaagccacccagcgctgagttcaaggtggtgaaggcccagatccaggagcagaagctgctgcagaggctgctggatgacaggaagagcacagtggaggtgatcaagcgggagggggagaagatcgccaccacagctgagcctgctgacaaggtgaagatcctgaagcagctgagcctgctggacagccgctgggaggccctgctgaacaaggccgagaccaggaaccggcagctggagggcatctctgtggtggcccagcagttccacgagaccctggagcccctgaatgagtggctgaccaccatcgagaagaggctggtgaactgtgagcccatcggcacccaggccagcaagctggaggagcagatcgcccagcacaaggccctggaggatgacatcatcaaccacaacaagcacctgcaccaggccgtgtccatcggccagagcctgaaggtgctgagcagccgggaggacaaggacatggtgcagagcaagctggacttcagccaggtgtggtacatcgagatccaggagaagagccacagccgctctgagctgctgcagcaggccctgtgcaatgccaagatctttggagaagatgaggtggagctgatgaactggctgaatgaggtgcatgacaagctgagcaagctgtctgtgcaggactacagcacagagggcctgtggaagcagcagagcgagctgcgggtgctgcaggaggacatcctgctgaggaagcagaatgtggaccaggccctgctgaatggcctggagctgctgaagcagaccactggagatgaggtgctgatcatccaggacaagctggaggccatcaaggcccgctacaaggacatcaccaagctgagcacagatgtggccaagaccctggagcaggccctgcagctggcccggcggctgcacagcacccatgaggagctgtgcacctggctggacaaggtggaggtggagctgctgtcctatgagacccaggtgctgaagggggaggaggccagccaggcccagatgaggcccaaggagctgaagaaggaggccaagaacaacaaggccctgctggacagcctgaatgaggtgagcagcgccctgctggagctggtgccctggagggcccgggagggcctggagaagatggtggccgaggacaatgaaagataccgcctggtgtctgacaccatcacccagaaggtggaggagattgatgctgccatcctgcggagccagcagtttgaccaggccgcagatgctgagctgtcctggatcacagaaacagagaagaagctgatgagcctgggggacatccggctggagcaggaccagaccagcgcccagctgcaggtgcagaagaccttcaccatggagatcctgcggcacaaggacatcattgatgacctggtgaagagcggccacaagatcatgacagcctgcagcgaggaggagaagcagagcatgaagaagaagctggacaaggtgctgaagaactatgacaccatctgccagatcaacagcgagcgctacctgcagctggagcgggcccagagcctggtgaaccagttctgggagacctatgaggagctgtggccctggctgacagagacccagagcatcatcagccagctgcctgccccagccctggagtatgagaccctgcggcagcagcaggaggagcaccggcagctgcgggagctgattgctgagcacaagccccacatcgacaagatgaacaagacaggcccccagctgctggagctgagccctggagagggcttcagcatccaggagaagtatgtggccgctgacaccctgtacagccagatcaaggaggatgtgaagaagagagctgtggccctggatgaggccatcagccagagcacccagttccatgacaagattgaccagatcctggagagcctggagcgcatcgtggagcggctgcggcagcccccatccatctctgctgaggtggagaagatcaaggagcagatcagcgagaacaagaatgtgtctgtggacatggagaagctgcagcccctgtatgagaccctgaagcagagaggagaggagatgattgcccggagcggcggcacagacaaggacatcagcgccaaggctgtgcaggacaagctggaccagatggtgttcatctgggagaacatccacaccctggtggaggagcgggaggccaagctgctggatgtgatggagctggccgagaagttctggtgtgaccacatgagcctgattgtgaccatcaaggacacccaggacttcatccgggacctggaggaccccggcatcgaccccagcgtggtgaagcagcagcaggaggccgctgagaccatccgggaggagattgatggcctgcaggaggagctggacatcgtcatcaacctgggcagcgagctgattgctgcctgtggggagccagacaagcccatcgtgaagaagagcattgatgagctgaacagcgcctgggacagcctgaacaaggcctggaaggacagaattgacaagctggaggaggccatgcaggccgctgtgcagtaccaggacggcctgcaggccgtgtttgactgggtggacattgctgggggcaagctggcctccatgagccccatcggcacagacctggagaccgtgaagcagcagatcgaggagctgaagcagttcaagtctgaggcctaccagcagcagatcgagatggagcggctgaaccaccaggccgagctgctgctgaagaaggtgacagaggagagtgacaagcacacagtgcaggaccccctgatggagctgaagctgatctgggacagcctggaggagcgcatcatcaaccggcagcacaagctggagggcgccctgctggccctgggccagttccagcacgccctggatgagctgctggcctggctgacccacacagagggcctgctgtctgagcagaagcctgtgggcggggaccccaaggccattgaaattgagctggccaagcaccacgtgctgcagaatgatgtgctggcccaccagagcacagtggaggccgtgaacaaggctggaaatgacctgattgagagcagcgctggggaggaggccagcaacctgcagaacaagctggaggtgctgaaccagcgctggcagaatgtgctggagaagacagagcagaggaagcagcagctggatggagccctgcggcaggccaagggcttccacggggagattgaggacctgcagcagtggctgacagacacagagcggcacctgctggccagcaagcccctgggcggcctgcctgagacagccaaggagcagctgaatgtgcacatggaggtgtgtgccgcctttgaggccaaggaggagacctacaagagcctgatgcagaagggccagcagatgctggcccgctgccccaagtctgctgagaccaacatcgaccaggacatcaacaacctgaaggagaagtgggagagcgtggagaccaagctgaatgaaaggaagaccaagctggaggaggccctgaacctggccatggagttccacaacagcctgcaggacttcatcaactggctgacccaggccgagcagaccctgaatgtggccagccggcccagcctcatcctggacacagtgctcttccagattgatgagcacaaggtgtttgccaatgaggtgaacagccaccgggagcagatcatcgagctggacaagacaggcacccacctgaagtacttcagccagaagcaggatgtggtgctgatcaagaacctgctgatctctgtgcagagccgctgggagaaggtggtgcagaggctggtggagcggggccgcagcctggatgatgccaggaagagggccaagcagttccacgaggcctggagcaagctgatggagtggctggaggagagcgagaagagcctggacagcgagctggagatcgccaatgaccctgacaagatcaagacccagctggcccagcacaaggagttccagaagagcctgggcgccaagcacagcgtgtatgacaccaccaacagaacaggccgcagcctgaaggagaagaccagcctggctgatgacaacctgaagctggatgacatgctgtctgagctgcgggacaagtgggacaccatctgtgggaagtctgtggagcggcagaacaagctggaggaggccctgctcttcagcggccagttcacagatgccctgcaggccctgattgactggctgtacagagtggagccccagctggccgaggaccagcctgtgcacggggacatcgacctggtgatgaacctgattgacaaccacaaggccttccagaaggagctgggcaagaggaccagctctgtgcaggccctgaagaggtctgcccgggagctgattgagggcagcagagatgacagctcctgggtgaaggtgcagatgcaggagctgagcacccgctgggagaccgtgtgtgccctgagcatcagcaagcagacccggctggaggccgccctgcggcaggccgaggagttccacagcgtggtgcacgccctgctggagtggctggccgaggccgagcagaccctgcgcttccacggcgtgctgcctgatgatgaagatgccctgcggaccctgattgaccagcacaaggagttcatgaagaagctggaggagaagagagctgagctgaacaaggccaccaccatgggagacacagtgctggccatctgccacccagacagcatcaccaccatcaagcactggatcaccatcatccgggccaggtttgaggaggtgctggcctgggccaagcagcaccagcagaggctggccagcgccctggccggcctcatcgccaagcaggagctgctggaggccctgctggcctggctgcagtgggccgagaccaccctgacagacaaggacaaggaggtgatcccccaggagattgaggaggtgaaggccctgattgctgagcaccagaccttcatggaggagatgaccaggaagcagccagatgtggacaaggtgaccaagacctacaagagaagagctgctgaccccagcagcctgcagagccacatccctgtgctggacaagggccgggccggcaggaagcgcttccctgccagcagcctgtaccccagcggcagccagacccagatcgagaccaagaacccccgggtgaacctgctgctgcgggagtttgccaactttgattttgacatctggaggaagaagtacatgcgctggatgaaccacaagaagagccgggtgatggacttcttcagaagaattgacaaggaccaggacggcaagatcacccggcaggagttcattgatggcatcctgagcagcaagttccccaccagccggctggagatgtctgctgtggccgacatctttgacagagatggagatggctacatcgactactatgaatttgtggccgccctgcaccccaacaaggatgcctacaagcccatcacagatgctgacaagattgaagatgaggtgacccggcaggtggccaagtgcaagtgtgccaagcgcttccaggtggagcagattggagacaacaagtacagagtgtccttccagagcaactttggagacagccagcagctgcggctggtgcgcatcctgcggagcacagtgatggtgcgggtgggcggcggctggatggccctggatgagttcctggtgaagaatgacccctgccgggtgcaccaccacggcagcaagatgctgcggtctgagagcaacagcagcatcaccaccacccagcccaccatcgccaagggccgcaccaacatggagctgcgggagaagttcatcctggctgatggagccagccagggcatggccgccttccggccccggggcagaagaagccggcccagcagcagaggagccagccccaacagaagcacctctgtgagcagccaggccgcccaggccgccagcccccaggtgcctgccaccaccacccccaagggcacccccatccagggcagcaagctgcggctgcccggctacctgagcggcaagggcttccacagcggagaagattctggcctcatcaccacagctgctgcccgggtgaggacccagtttgctgacagcaagaagacccccagcaggcctggcagcagagctggcagcaaggccggcagccgggccagcagccggcggggcagtgatgccagtgactttgacatcagcgagatccagagcgtgtgcagtgatgtggagaccgtgccccagacccaccggcccacccccagggctggcagccggcccagcacagccaagcccagcaagatccccaccccccagaggaagagccctgccagcaagctggacaagagcagcaagaggtag

SEQ ID NO: 150718 - DNA, 9183 bp, synthetic construct
  misc_feature 1..9183: note = Description of Artificial Sequence: Synthetic coding sequence
  source 1..9183: mol_type = other DNA
atgcacagcagcagctacagctaccgcagcagtgacagcgtcttcagcaacaccaccagcaccaggaccagcctggacagcaatgaaaacctgctgctggtgcactgcggccccaccctcatcaacagctgcatcagctttggaagtgagagctttgatggccaccggctggagatgctgcagcagatcgccaacagagtgcagagggacagcgtcatctgtgaggacaagctgatcctggccggaaatgccctgcagagcgacagcaagaggctggagagcggcgtgcagttccagaatgaggccgagattgctggctacatcctggagtgtgagaacctgctgcggcagcacgtgattgatgtgcagatcctgattgatggcaagtactaccaggccgaccagctggtgcagagggtggccaagctgagagatgagatcatggccctgagaaatgaatgttcttctgtgtacagcaagggccgcatcctgaccacagagcagaccaagctgatgatcagcggcatcacccagagcctgaacagcggctttgcccagaccctgcaccccagcctgaccagcggcctgacccagagcctgacccccagcctgaccagcagctccatgaccagcggcctgagcagcggcatgaccagccggctgacccccagcgtgaccccagcctacaccccaggcttccccagcggcctggtgcccaacttcagcagtggagtggagcccaacagcctgcagaccctgaagctgatgcagatcaggaagcccctgctgaagagcagcctgctggaccagaacctgacagaggaggagatcaacatgaagtttgtgcaggacctgctgaactgggtggatgagatgcaggtgcagctggacagaacagagtggggcagtgacctgcccagcgtggagagccacctggagaaccacaagaatgtgcaccgggccatcgaggagtttgagagcagcctgaaggaggccaagatcagcgagatccagatgacagcccccctgaagctgacctacgccgagaagctgcaccggctggagagccagtatgccaagctgctgaacaccagcaggaaccaggagcggcacctggacaccctgcacaactttgtgtcccgggccaccaatgagctgatctggctgaatgagaaggaggaggaggaggtggcctatgactggagcgagaggaacaccaacatcgccaggaagaaggactaccacgccgagctgatgagggagctggaccagaaggaggagaacatcaagtctgtgcaggagattgctgagcagctgctgctggagaaccacccagcccggctgaccatcgaggcctacagagctgccatgcagacccagtggagctggatcctgcagctgtgccagtgtgtggagcagcacatcaaggaaaatacagcctactttgagttcttcaatgatgccaaggaggccacagactacctgaggaacctgaaggatgccatccagaggaagtacagctgtgacaggagcagcagcatccacaagctggaggacctggtgcaggagagcatggaggagaaggaggagctgctgcagtacaagagcaccatcgccaacctgatgggcaaggccaagaccatcatccagctgaagcccaggaacagcgactgccccctgaagaccagcatccccatcaaggccatctgtgactaccggcagatcgagatcaccatctacaaggatgatgaatgtgtgctggccaacaacagccaccgggccaagtggaaggtgatcagccccactggaaatgaggccatggtgcccagcgtgtgcttcaccgtgcccccacccaacaaggaggccgtggacctggccaacagaattgagcagcagtaccagaatgtgctgaccctgtggcatgagagccacatcaacatgaagtctgtggtgtcctggcactacctgatcaatgaaattgaccgcatccgggccagcaatgtggccagcatcaagaccatgctgcccggggagcaccagcaggtgctgagcaacctgcagagcagatttgaggacttcctggaggacagccaggagagccaggtgttcagcggcagtgacatcacccagctggagaaggaggtgaatgtgtgcaagcagtactaccaggagctgctgaagtctgctgagcgggaggagcaggaggagagcgtgtacaacctgtacatcagcgaggtgaggaacatccggctgcggctggagaactgtgaagatagactcatccggcagatccgcacccccctggagagagatgacctgcacgagagcgtcttccgcatcacagagcaggagaagctgaagaaggagctggagcggctgaaggatgacctgggcaccatcaccaacaagtgtgaggagttcttcagccaggccgccgccagcagctctgtgcccaccctgcggtctgagctgaatgtggtgctgcagaacatgaaccaggtgtacagcatgagcagcacctacatcgacaagctgaagacagtgaacctggtgctgaagaacacccaggccgctgaggccctggtgaagctgtatgagaccaagctgtgtgaggaggaggccgtgattgctgacaagaacaacattgaaaatctcatcagcaccctgaagcagtggaggtctgaggtggatgagaagaggcaggtgttccacgccctggaggatgagctgcagaaggccaaggccatcagtgatgagatgttcaagacctacaaggagcgggacctggactttgactggcacaaggagaaggctgaccagctggtggagcgctggcagaatgtgcacgtgcagattgacaaccggctgcgggacctggagggcatcggcaagagcctgaagtactacagagacacctaccaccccctggatgactggatccagcaggtggagaccacccagaggaagatccaggagaaccagcctgagaacagcaagaccctggccacccagctgaaccagcagaagatgctggtgtctgaaattgagatgaagcagagcaagatggatgagtgccagaagtatgcagagcagtacagcgccaccgtgaaggactatgagctgcagaccatgacctaccgggccatggtggacagccagcagaagagccctgtgaagagaagaaggatgcagagcagcgctgacctgatcatccaggagttcatggacctgcggacccgctacacagccctggtgaccctgatgacccagtacatcaagtttgctggggacagcctgaagaggctggaggaggaggagaagagcctggaggaggagaagaaggagcacgtggagaaggccaaggagctgcagaagtgggtgagcaacatcagcaagaccctgaaggatgctgagaaggccggcaagccacccttcagcaagcagaagatcagcagcgaggagatcagcaccaagaaggagcagctgtctgaggccctgcagaccatccagctgttcctggccaagcacggggacaagatgacagatgaggagagaaatgagctggagaagcaggtgaagaccctgcaggagagctacaacctgctcttcagcgagagcctgaagcagctgcaggagagccagaccagcggagatgtgaaggtggaggagaagctggacaaggtgattgctggcaccatcgaccagaccactggagaggtgctgagcgtcttccaggccgtgctgcggggcctgattgattatgacaccggcatccggctgctggagacccagctgatgatcagcggcctcatcagccctgagctgaggaaatgttttgacctgaaggatgccaagagccacggcctgattgatgagcagatcctgtgccagctgaaggagctgagcaaggccaaggagatcatctctgctgccagccccaccaccatccctgtgctggatgccctggcccagagcatgatcacagagagcatggccatcaaggtgctggagatcctgctgagcacaggcagcctggtgatcccagccaccggggagcagctgaccctgcagaaggccttccagcagaacctggtgtcctctgccctcttcagcaaggtgctggagcggcagaacatgtgcaaggacctgattgacccctgcaccagcgagaaggtgtccctgattgacatggtgcagaggagcaccctgcaggagaacacaggcatgtggctgctgcctgtgcggccccaggagggcggccgcatcaccctgaagtgtggcaggaacatcagcatcctgcgggccgcccacgagggcctgattgaccgggagaccatgttccggctgctgagcgcccagctgctgagcggcggcctcatcaacagcaacagcggccagaggatgacagtggaggaggccgtgcgggagggcgtgattgaccgggacacagccagcagcatcctgacctaccaggtgcagacaggaggcatcatccagagcaacccagccaagaggctgactgtggatgaagctgtgcagtgtgacctgatcaccagcagcagcgccctgctggtgctggaggcccagaggggctacgtgggcctcatctggccccacagcggggagatcttccccaccagcagcagcctgcagcaggagctgatcaccaatgagctggcctacaagatcctgaatggccggcagaagattgctgccctgtacatccctgagagcagccaggtgattggcctggatgctgccaagcagctgggcatcatcgacaacaacacagccagcatcctgaagaacatcaccctgcctgacaagatgccagacctgggggacctggaggcctgcaagaatgcccggcgctggctgtccttctgcaagttccagcccagcacagtgcatgactaccggcaggaggaggatgtgtttgatggagaggagcctgtgaccacccagaccagcgaggagaccaagaagctgttcctgagctacctgatgatcaacagctacatggatgccaacacaggccagaggctgctgctgtatgatggagacctggatgaggccgtgggcatgctgctggagggctgccacgccgagtttgatggcaacacagccatcaaggagtgcctggatgtgctgagcagcagcggggtcttcctgaacaatgccagcggccgggagaaggatgagtgcacagccacccccagcagcttcaacaagtgccactgtggggagcctgagcacgaggagaccccagaaaatagaaaatgtgccattgatgaggagttcaatgagatgaggaacacagtcatcaacagcgagttcagccagagcggcaagctggccagcaccatcagcattgaccccaaggtgaacagcagccccagcgtgtgtgtgcccagcctcatctcctacctgacccagacagagctggccgacatctccatgctgcggagtgacagcgagaacatcctgaccaactatgagaaccagagccgggtggagaccaatgaaagagccaatgaatgtagccacagcaagaacatccagaacttccccagcgacctgattgagaaccccatcatgaagagcaagatgagcaagttctgtggggtgaatgaaacagaaaatgaagacaacaccaacagagacagccccatctttgactacagcccccggctgagcgccctgctgagccatgacaagctgatgcacagccagggcagcttcaatgacacccacaccccagagagcaatggaaacaagtgtgaggccccagccctgtccttcagtgacaagaccatgctgagcggccagagaattggagagaagttccaggaccagttcctgggcattgctgccatcaacatcagcctgcccggggagcagtatggccagaagagcctgaacatgatcagcagcaacccccaggtgcagtaccacaatgacaagtacatcagcaacaccagcggggaggatgagaagacccaccctggcttccagcagatgcctgaggacaaggaggatgaaagtgaaattgaggagtacagctgtgctgtgaccccaggaggagacacagacaatgccatcgtgtccctgacctgtgccacccccctgctggatgagaccatcagcgccagtgactatgagaccagcctgctgaatgaccagcagaacaacacaggaacagacacagacagtgatgatgacttctatgacacccccctgtttgaagatgatgaccatgacagcctgctgctggatggagatgaccgggactgcctgcaccctgaggactatgacaccctgcaggaggagaatgatgaaacagccagccctgcagatgtgttctatgatgtgtccaaagaaaatgaaaattccatggtgccccagggcgcccctgtgggcagcctgtctgtgaagaacaaggcccactgcctgcaggacttcctgatggatgtggagaaggatgagctggacagcggggagaagatccacctgaaccctgtgggcagtgacaaggtgaatggccagagcctggagaccggcagcgagagagaatgtaccaacatcctggagggagatgaaagtgacagcctgacagattatgacatcgtgggcggcaaggagagcttcaccgccagcctgaagtttgatgattctggctcctggaggggcaggaaggaggagtatgtgacaggccaggagttccacagcgacacagaccacctggacagcatgcagagcgaggagagctatggagactacatctatgacagcaatgaccaggatgatgatgatgatgatggcattgatgaggagggcggcggcatcagagatgaaaatggcaagccccgctgccagaatgtggccgaggacatggacatccagctgtgtgccagcatcctgaatgaaaattctgatgaaaatgaaaacatcaacaccatgatcctgctggacaagatgcacagctgcagcagcctggagaagcagcagagggtgaatgtggtgcagctggccagccccagcgagaacaacctggtgacagagaagagcaacctgcctgagtacaccacagaaattgctgggaagagcaaagaaaacctgctgaaccacgagatggtgctgaaggatgtgctgccccccatcatcaaggacacagaaagtgagaagacctttggacctgccagcatcagccatgacaacaacaacatcagcagcaccagcgagctgggcacagacctggccaacaccaaggtgaagctgatccagggcagcgagctgcctgagctgacagacagcgtgaagggcaaggatgagtacttcaagaacatgacccccaaggtggacagcagcctggaccacatcatctgcacagagccagacctgattggcaagccagctgaggagagccacctgagcctcatcgcctctgtgacagacaaggacccccagggcaatggaagtgacctgatcaagggcagagatggcaagagtgacatcctgattgaagatgagaccagcatccagaagatgtacctgggggagggggaggtgctggtggagggcctggtggaggaggagaacagacacctgaagctgctgcccgggaagaacacccgggacagcttcaagctgatcaacagccagttccccttcccccagatcaccaacaatgaggagctgaaccagaagggcagcctgaagaaggccaccgtgaccctgaaggatgagcccaacaacctgcagatcatcgtgtccaagagccctgtgcagtttgagaacctggaggagatctttgacacctctgtgtccaaggagatcagtgatgacatcaccagtgacatcacctcctgggagggcaacacccactttgaggagagcttcacagatggccctgagaaggagctggacctcttcacctacctgaagcactgtgccaagaacatcaaggccaaggatgtggccaagcccaatgaagatgtgcccagccacgtgctgatcacagccccacccatgaaggagcacctgcagctgggcgtgaacaacaccaaggagaagagcaccagcacccagaaggacagccccctgaatgacatgatccagagcaatgacctgtgcagcaaggagagcatcagcggcggcggcacagagatcagccagttcaccccagagagcattgaggccaccctgagcatcctgagcaggaagcacgtggaggatgtgggcaagaatgacttcctgcagagcgagcgctgtgccaacggcctgggcaatgacaacagcagcaacaccctgaacacagactacagcttcctggagatcaacaacaagaaggagcgcatcgagcagcagctgcccaaggagcaggccctgagccccaggagccaggagaaggaggtgcagatccctgagctgagccaggtgtttgtggaggatgtgaaggacatcctgaagagccggctgaaggagggccacatgaacccccaggaggtggaggagcccagcgcctgtgccgacaccaagatcctgatccagaacctgatcaagaggatcaccaccagccagctggtgaatgaggccagcacagtgcccagcgacagccagatgtctgacagcagcggcgtgagccccatgaccaacagcagcgagctgaagccagagagcagagatgaccccttctgcatcggcaacctgaagtctgagctgctgctgaacatcctgaagcaggaccagcacagccagaagatcaccggggtgtttgagctgatgagggagctgacccacatggagtatgacctggagaagaggggcatcaccagcaaggtgctgcccctgcagctggagaacatcttctacaagctgctggctgatggctacagcgagaagattgagcacgtgggggacttcaaccagaaggcctgcagcaccagcgagatgatggaggagaagccccacatcctgggggacatcaagagcaaggagggcaactactacagccccaacctggagaccgtgaaggagatcggcctggagagcagcacagtgtgggccagcaccctgcccagagatgagaagctgaaggacctgtgcaatgacttccccagccacctggagtgcaccagcggcagcaaggagatggccagcggggacagcagcacagagcagtag

SEQ ID NO: 150719 - DNA, 21741 bp, synthetic construct
  misc_feature 1..21741: note = Description of Artificial Sequence: Synthetic coding sequence
  source 1..21741: mol_type = other DNA
atgcacagcagcagctacagctaccgcagcagtgacagcgtcttcagcaacaccaccagcaccaggaccagcctggacagcaatgaaaacctgctgctggtgcactgcggccccaccctcatcaacagctgcatcagctttggaagtgagagctttgatggccaccggctggagatgctgcagcagatcgccaacagagtgcagagggacagcgtcatctgtgaggacaagctgatcctggccggaaatgccctgcagagcgacagcaagaggctggagagcggcgtgcagttccagaatgaggccgagattgctggctacatcctggagtgtgagaacctgctgcggcagcacgtgattgatgtgcagatcctgattgatggcaagtactaccaggccgaccagctggtgcagagggtggccaagctgagagatgagatcatggccctgagaaatgaatgttcttctgtgtacagcaagggccgcatcctgaccacagagcagaccaagctgatgatcagcggcatcacccagagcctgaacagcggctttgcccagaccctgcaccccagcctgaccagcggcctgacccagagcctgacccccagcctgaccagcagctccatgaccagcggcctgagcagcggcatgaccagccggctgacccccagcgtgaccccagcctacaccccaggcttccccagcggcctggtgcccaacttcagcagtggagtggagcccaacagcctgcagaccctgaagctgatgcagatcaggaagcccctgctgaagagcagcctgctggaccagaacctgacagaggaggagatcaacatgaagtttgtgcaggacctgctgaactgggtggatgagatgcaggtgcagctggacagaacagagtggggcagtgacctgcccagcgtggagagccacctggagaaccacaagaatgtgcaccgggccatcgaggagtttgagagcagcctgaaggaggccaagatcagcgagatccagatgacagcccccctgaagctgacctacgccgagaagctgcaccggctggagagccagtatgccaagctgctgaacaccagcaggaaccaggagcggcacctggacaccctgcacaactttgtgtcccgggccaccaatgagctgatctggctgaatgagaaggaggaggaggaggtggcctatgactggagcgagaggaacaccaacatcgccaggaagaaggactaccacgccgagctgatgagggagctggaccagaaggaggagaacatcaagtctgtgcaggagattgctgagcagctgctgctggagaaccacccagcccggctgaccatcgaggcctacagagctgccatgcagacccagtggagctggatcctgcagctgtgccagtgtgtggagcagcacatcaaggaaaatacagcctactttgagttcttcaatgatgccaaggaggccacagactacctgaggaacctgaaggatgccatccagaggaagtacagctgtgacaggagcagcagcatccacaagctggaggacctggtgcaggagagcatggaggagaaggaggagctgctgcagtacaagagcaccatcgccaacctgatgggcaaggccaagaccatcatccagctgaagcccaggaacagcgactgccccctgaagaccagcatccccatcaaggccatctgtgactaccggcagatcgagatcaccatctacaaggatgatgaatgtgtgctggccaacaacagccaccgggccaagtggaaggtgatcagccccactggaaatgaggccatggtgcccagcgtgtgcttcaccgtgcccccacccaacaaggaggccgtggacctggccaacagaattgagcagcagtaccagaatgtgctgaccctgtggcatgagagccacatcaacatgaagtctgtggtgtcctggcactacctgatcaatgaaattgaccgcatccgggccagcaatgtggccagcatcaagaccatgctgcccggggagcaccagcaggtgctgagcaacctgcagagcagatttgaggacttcctggaggacagccaggagagccaggtgttcagcggcagtgacatcacccagctggagaaggaggtgaatgtgtgcaagcagtactaccaggagctgctgaagtctgctgagcgggaggagcaggaggagagcgtgtacaacctgtacatcagcgaggtgaggaacatccggctgcggctggagaactgtgaagatagactcatccggcagatccgcacccccctggagagagatgacctgcacgagagcgtcttccgcatcacagagcaggagaagctgaagaaggagctggagcggctgaaggatgacctgggcaccatcaccaacaagtgtgaggagttcttcagccaggccgccgccagcagctctgtgcccaccctgcggtctgagctgaatgtggtgctgcagaacatgaaccaggtgtacagcatgagcagcacctacatcgacaagctgaagacagtgaacctggtgctgaagaacacccaggccgctgaggccctggtgaagctgtatgagaccaagctgtgtgaggaggaggccgtgattgctgacaagaacaacattgaaaatctcatcagcaccctgaagcagtggaggtctgaggtggatgagaagaggcaggtgttccacgccctggaggatgagctgcagaaggccaaggccatcagtgatgagatgttcaagacctacaaggagcgggacctggactttgactggcacaaggagaaggctgaccagctggtggagcgctggcagaatgtgcacgtgcagattgacaaccggctgcgggacctggagggcatcggcaagagcctgaagtactacagagacacctaccaccccctggatgactggatccagcaggtggagaccacccagaggaagatccaggagaaccagcctgagaacagcaagaccctggccacccagctgaaccagcagaagatgctggtgtctgaaattgagatgaagcagagcaagatggatgagtgccagaagtatgcagagcagtacagcgccaccgtgaaggactatgagctgcagaccatgacctaccgggccatggtggacagccagcagaagagccctgtgaagagaagaaggatgcagagcagcgctgacctgatcatccaggagttcatggacctgcggacccgctacacagccctggtgaccctgatgacccagtacatcaagtttgctggggacagcctgaagaggctggaggaggaggagaagagcctggaggaggagaagaaggagcacgtggagaaggccaaggagctgcagaagtgggtgagcaacatcagcaagaccctgaaggatgctgagaaggccggcaagccacccttcagcaagcagaagatcagcagcgaggagatcagcaccaagaaggagcagctgtctgaggccctgcagaccatccagctgttcctggccaagcacggggacaagatgacagatgaggagagaaatgagctggagaagcaggtgaagaccctgcaggagagctacaacctgctcttcagcgagagcctgaagcagctgcaggagagccagaccagcggagatgtgaaggtggaggagaagctggacaaggtgattgctggcaccatcgaccagaccactggagaggtgctgagcgtcttccaggccgtgctgcggggcctgattgattatgacaccggcatccggctgctggagacccagctgatgatcagcggcctcatcagccctgagctgaggaaatgttttgacctgaaggatgccaagagccacggcctgattgatgagcagatcctgtgccagctgaaggagctgagcaaggccaaggagatcatctctgctgccagccccaccaccatccctgtgctggatgccctggcccagagcatgatcacagagagcatggccatcaaggtgctggagatcctgctgagcacaggcagcctggtgatcccagccaccggggagcagctgaccctgcagaaggccttccagcagaacctggtgtcctctgccctcttcagcaaggtgctggagcggcagaacatgtgcaaggacctgattgacccctgcaccagcgagaaggtgtccctgattgacatggtgcagaggagcaccctgcaggagaacacaggcatgtggctgctgcctgtgcggccccaggagggcggccgcatcaccctgaagtgtggcaggaacatcagcatcctgcgggccgcccacgagggcctgattgaccgggagaccatgttccggctgctgagcgcccagctgctgagcggcggcctcatcaacagcaacagcggccagaggatgacagtggaggaggccgtgcgggagggcgtgattgaccgggacacagccagcagcatcctgacctaccaggtgcagacaggaggcatcatccagagcaacccagccaagaggctgactgtggatgaagctgtgcagtgtgacctgatcaccagcagcagcgccctgctggtgctggaggcccagaggggctacgtgggcctcatctggccccacagcggggagatcttccccaccagcagcagcctgcagcaggagctgatcaccaatgagctggcctacaagatcctgaatggccggcagaagattgctgccctgtacatccctgagagcagccaggtgattggcctggatgctgccaagcagctgggcatcatcgacaacaacacagccagcatcctgaagaacatcaccctgcctgacaagatgccagacctgggggacctggaggcctgcaagaatgcccggcgctggctgtccttctgcaagttccagcccagcacagtgcatgactaccggcaggaggaggatgtgtttgatggagaggagcctgtgaccacccagaccagcgaggagaccaagaagctgttcctgagctacctgatgatcaacagctacatggatgccaacacaggccagaggctgctgctgtatgatggagacctggatgaggccgtgggcatgctgctggagggctgccacgccgagtttgatggcaacacagccatcaaggagtgcctggatgtgctgagcagcagcggggtcttcctgaacaatgccagcggccgggagaaggatgagtgcacagccacccccagcagcttcaacaagtgccactgtggggagcctgagcacgaggagaccccagaaaatagaaaatgtgccattgatgaggagttcaatgagatgaggaacacagtcatcaacagcgagttcagccagagcggcaagctggccagcaccatcagcattgaccccaaggtgaacagcagccccagcgtgtgtgtgcccagcctcatctcctacctgacccagacagagctggccgacatctccatgctgcggagtgacagcgagaacatcctgaccaactatgagaaccagagccgggtggagaccaatgaaagagccaatgaatgtagccacagcaagaacatccagaacttccccagcgacctgattgagaaccccatcatgaagagcaagatgagcaagttctgtggggtgaatgaaacagaaaatgaagacaacaccaacagagacagccccatctttgactacagcccccggctgagcgccctgctgagccatgacaagctgatgcacagccagggcagcttcaatgacacccacaccccagagagcaatggaaacaagtgtgaggccccagccctgtccttcagtgacaagaccatgctgagcggccagagaattggagagaagttccaggaccagttcctgggcattgctgccatcaacatcagcctgcccggggagcagtatggccagaagagcctgaacatgatcagcagcaacccccaggtgcagtaccacaatgacaagtacatcagcaacaccagcggggaggatgagaagacccaccctggcttccagcagatgcctgaggacaaggaggatgaaagtgaaattgaggagtacagctgtgctgtgaccccaggaggagacacagacaatgccatcgtgtccctgacctgtgccacccccctgctggatgagaccatcagcgccagtgactatgagaccagcctgctgaatgaccagcagaacaacacaggaacagacacagacagtgatgatgacttctatgacacccccctgtttgaagatgatgaccatgacagcctgctgctggatggagatgaccgggactgcctgcaccctgaggactatgacaccctgcaggaggagaatgatgaaacagccagccctgcagatgtgttctatgatgtgtccaaagaaaatgaaaattccatggtgccccagggcgcccctgtgggcagcctgtctgtgaagaacaaggcccactgcctgcaggacttcctgatggatgtggagaaggatgagctggacagcggggagaagatccacctgaaccctgtgggcagtgacaaggtgaatggccagagcctggagaccggcagcgagagagaatgtaccaacatcctggagggagatgaaagtgacagcctgacagattatgacatcgtgggcggcaaggagagcttcaccgccagcctgaagtttgatgattctggctcctggaggggcaggaaggaggagtatgtgacaggccaggagttccacagcgacacagaccacctggacagcatgcagagcgaggagagctatggagactacatctatgacagcaatgaccaggatgatgatgatgatgatggcattgatgaggagggcggcggcatcagagatgaaaatggcaagccccgctgccagaatgtggccgaggacatggacatccagctgtgtgccagcatcctgaatgaaaattctgatgaaaatgaaaacatcaacaccatgatcctgctggacaagatgcacagctgcagcagcctggagaagcagcagagggtgaatgtggtgcagctggccagccccagcgagaacaacctggtgacagagaagagcaacctgcctgagtacaccacagaaattgctgggaagagcaaagaaaacctgctgaaccacgagatggtgctgaaggatgtgctgccccccatcatcaaggacacagaaagtgagaagacctttggacctgccagcatcagccatgacaacaacaacatcagcagcaccagcgagctgggcacagacctggccaacaccaaggtgaagctgatccagggcagcgagctgcctgagctgacagacagcgtgaagggcaaggatgagtacttcaagaacatgacccccaaggtggacagcagcctggaccacatcatctgcacagagccagacctgattggcaagccagctgaggagagccacctgagcctcatcgcctctgtgacagacaaggacccccagggcaatggaagtgacctgatcaagggcagagatggcaagagtgacatcctgattgaagatgagaccagcatccagaagatgtacctgggggagggggaggtgctggtggagggcctggtggaggaggagaacagacacctgaagctgctgcccgggaagaacacccgggacagcttcaagctgatcaacagccagttccccttcccccagatcaccaacaatgaggagctgaaccagaagggcagcctgaagaaggccaccgtgaccctgaaggatgagcccaacaacctgcagatcatcgtgtccaagagccctgtgcagtttgagaacctggaggagatctttgacacctctgtgtccaaggagatcagtgatgacatcaccagtgacatcacctcctgggagggcaacacccactttgaggagagcttcacagatggccctgagaaggagctggacctcttcacctacctgaagcactgtgccaagaacatcaaggccaaggatgtggccaagcccaatgaagatgtgcccagccacgtgctgatcacagccccacccatgaaggagcacctgcagctgggcgtgaacaacaccaaggagaagagcaccagcacccagaaggacagccccctgaatgacatgatccagagcaatgacctgtgcagcaaggagagcatcagcggcggcggcacagagatcagccagttcaccccagagagcattgaggccaccctgagcatcctgagcaggaagcacgtggaggatgtgggcaagaatgacttcctgcagagcgagcgctgtgccaacggcctgggcaatgacaacagcagcaacaccctgaacacagactacagcttcctggagatcaacaacaagaaggagcgcatcgagcagcagctgcccaaggagcaggccctgagccccaggagccaggagaaggaggtgcagatccctgagctgagccaggtgtttgtggaggatgtgaaggacatcctgaagagccggctgaaggagggccacatgaacccccaggaggtggaggagcccagcgcctgtgccgacaccaagatcctgatccagaacctgatcaagaggatcaccaccagccagctggtgaatgaggccagcacagtgcccagcgacagccagatgtctgacagcagcggcgtgagccccatgaccaacagcagcgagctgaagccagagagcagagatgaccccttctgcatcggcaacctgaagtctgagctgctgctgaacatcctgaagcaggaccagcacagccagaagatcaccggggtgtttgagctgatgagggagctgacccacatggagtatgacctggagaagaggggcatcaccagcaaggtgctgcccctgcagctggagaacatcttctacaagctgctggctgatggctacagcgagaagattgagcacgtgggggacttcaaccagaaggcctgcagcaccagcgagatgatggaggagaagccccacatcctgggggacatcaagagcaaggagggcaactactacagccccaacctggagaccgtgaaggagatcggcctggagagcagcacagtgtgggccagcaccctgcccagagatgagaagctgaaggacctgtgcaatgacttccccagccacctggagtgcaccagcggcagcaaggagatggccagcggggacagcagcacagagcagttcagcagcgagctgcagcagtgcctgcagcacacagagaagatgcatgagtacctgaccctgctgcaggacatgaagccacccctggacaaccaggagagcctggacaacaacctggaggccctgaagaaccagctgcggcagctggagacctttgagctgggcctggcccccatcgccgtcatcctgaggaaggacatgaagctggccgaggagttcctgaagagcctgcccagcgacttcccccggggccacgtggaggagctgagcatcagccaccagagcctgaagacagccttcagcagcctgagcaatgtgagcagcgagaggaccaagcagatcatgctggccatcgacagcgagatgagcaagctggccgtgtcccatgaggagttcctgcacaagctgaagagcttcagtgactgggtgtctgagaagagcaagtctgtgaaggacattgaaattgtgaatgtgcaggacagtgaatatgtgaagaagaggctggagttcctgaaggccaacaacgtgctgaaggacctgggccacaccaagatgcagctggagaccacagcctttgatgtgcagttcttcatcagtgaatatgcccaggacctgagccccaaccagagcaagcagctgctgcggctgctgaacaccacccagaagtgcttcctggatgtgcaggagagcgtgaccacccaggtggagcggctggagacccagctgcacctggagcaggacctggatgaccagaagatcgtggccgagcggcagcaggagtacaaggagaagctgcagggcatctgtgacctgctgacccagacagagaacagactcatcggccaccaggaggccttcatgattggagatggcaccgtggagctgaagaagtaccagagcaagcaggaggagctgcagaaggacatgcagggcagcgcccaggccctggccgaggtggtgaagaacacagagaacttcctgaaggaaaatggagagaagctgagccaggaggacaaggccctgattgagcagaagctgaatgaggccaagatcaagtgtgagcagctgaacctgaaggccgagcagagcaagaaggagctggacaaggtggtgaccacagccatcaaggaggagacagagaaggtggccgctgtgaagcagctggaggagagcaagaccaagattgagaacctgctggactggctgagcaatgtggacaaggacagcgagcgggccggcaccaagcacaagcaggtgattgagcagaatggcacccacttccaggagggagatggcaagagcgccatcggggaggaggatgaggtgaatggaaacctgctggagacagatgtggatggccaggtgggcaccacccaggagaacctgaaccagcagtaccagaaggtgaaggcccagcacgagaagatcatcagccagcaccaggccgtcatcatcgccacccagagcgcccaggtgctgctggagaagcagggccagtacctgagccctgaggagaaggagaagctgcagaagaacatgaaggagctgaaggtgcactatgaaacagccctggccgagagcgagaagaagatgaagctgacccacagcctgcaggaggagctggagaagtttgatgctgactacacagaatttgagcactggctgcagcagagcgagcaggagctggagaacctggaggccggggctgatgacatcaatggcctgatgaccaagctgaagaggcagaagagcttctctgaagatgtgatcagccacaagggggacctgcgctacatcaccatcagcggcaacagagtgctggaggccgccaagagctgcagcaagagagatggcggcaaggtggacaccagcgccacccaccgggaggtgcagaggaagctggaccacgccacagaccgcttccgcagcctgtacagcaaatgtaatgtgctgggcaacaacctgaaggacctggtggacaagtaccagcactatgaagatgccagctgtggcctgctggccggcctgcaggcctgtgaggccacagccagcaagcacctgtctgagcccatcgctgtggaccccaagaacctgcagaggcagctggaggagaccaaggccctgcagggccagatcagcagccagcaggtggccgtggagaagctgaagaagacagctgaggtgctgctggatgcccggggcagcctgctgcctgccaagaatgacatccagaagaccctggatgacatcgtgggccgctatgaggacctgagcaagtctgtgaatgaaagaaatgagaagctgcagatcaccctgaccaggagcctgtctgtgcaggacggcctggatgagatgctggactggatgggaaatgtggagagcagcctgaaggagcagggccaggtgcccctgaacagcacagccctgcaggacatcatcagcaagaacatcatgctggagcaggacattgctggccggcagagcagcatcaatgccatgaatgagaaggtgaagaagttcatggagaccacagaccccagcacagccagcagcctgcaggccaagatgaaggacctgagcgcccgcttcagcgaggccagccacaagcacaaggagaccctggccaagatggaggagctgaagaccaaggtggagctgtttgagaacctgtctgagaagctgcagaccttcctggagaccaagacccaggccctgacagaggtggatgtgcctgggaaggatgtgacagagctgagccagtacatgcaggagagcaccagcgagttcctggagcacaagaagcacctggaggtgctgcacagcctgctgaaggagatcagcagccacggcctgcccagcgacaaggccctggtgctggagaagaccaacaacctgagcaagaagttcaaggagatggaggacaccatcaaggagaagaaggaggccgtgaccagctgccaggagcagctggatgccttccaggtgctggtgaagagcctgaagtcctggatcaaggagaccaccaagaaggtgcccatcgtgcagcccagctttggagctgaggacctgggcaagagcctggaggacaccaagaagctgcaggagaagtggagcctgaagaccccagagatccagaaggtgaacaacagcggcatcagcctgtgcaacctgatctctgctgtgaccaccccagccaaggccatcgctgctgtgaagtctggaggagctgtgctgaatggagagggcacagccaccaacacagaggagttctgggccaacaagggcctgaccagcatcaagaaggacatgacagacatcagccacggctatgaggacctgggcctgctgctgaaggacaagattgctgagctgaacaccaagctgagcaagctgcagaaggcccaggaggagagcagcgccatgatgcagtggctgcagaagatgaacaagacagccaccaagtggcagcagaccccagcccccacagacacagaggccgtgaagacccaggtggagcagaacaagagctttgaagctgagctgaagcagaatgtgaacaaggtgcaggagctgaaggacaagctgacagagctgctggaggagaacccagacaccccagaggccccccgctggaagcagatgctgacagaaattgacagcaagtggcaggagctgaaccagctgaccatcgaccggcagcagaagctggaggagagcagcaacaacctgacccagttccagacagtggaggcccagctgaagcagtggctggtggagaaggagctgatggtgtctgtgctgggccccctgagcattgaccccaacatgctgaacacccagaggcagcaggtgcagatcctgctgcaggagtttgccaccaggaagccccagtatgagcagctgacagctgctggccagggcatcctgagcaggcctggagaggaccccagcctgcggggcatcgtgaaggagcagctggccgctgtgacccagaagtgggacagcctgaccggccagctgagtgacagatgtgactggattgaccaggccatcgtgaagagcacccagtaccagagcctgctgcggagcctgagtgacaagctgagtgacctggacaacaagctgagcagcagcctggccgtgtccacccacccagatgccatgaaccagcagctggagacagcccagaagatgaagcaggagatccagcaggagaagaagcagatcaaggtggcccaggccctgtgtgaggacctgagcgccctggtgaaggaggagtacctgaaggccgagctgagccggcagctggagggcatcctgaagagcttcaaggatgtggagcagaaggcagaaaatcatgtgcagcacctgcagagcgcctgtgccagcagccaccagttccagcagatgagccgggacttccaggcctggctggacaccaagaaggaggagcagaacaagagccaccccatcagcgccaagctggatgtgctggagagcctcatcaaggaccacaaggacttcagcaagaccctgacagcccagagccacatgtatgagaagaccatcgccgagggggagaacctgctgctgaagacccagggcagcgagaaggccgccctgcagctgcagctgaacaccatcaagaccaactgggacaccttcaacaagcaggtgaaggagcgggagaacaagctgaaggagagcctggagaaggccctgaagtacaaggagcaggtggagaccctgtggccctggattgacaagtgccagaacaacctggaggagatcaagttctgcctggaccctgcagaaggagaaaattccatcgccaagctgaagagcctgcagaaggagatggaccagcacttcggcatggtggagctgctgaacaacacagccaacagcctgctgtctgtgtgtgaaattgacaaggaggtggtgacagatgagaacaagagcctcatccagaaggtggacatggtgacagagcagctgcacagcaagaagttctgcctggagaacatgacccagaagttcaaggagttccaggaggtgtccaaggagagcaagaggcagctgcagtgtgccaaggagcagctggacatccatgacagcctgggcagccaggcctacagcaacaagtacctgaccatgctgcagacccagcagaagagcctgcaggccctgaagcaccaggtggacctggccaagaggctggcccaggacctggtggtggaggccagtgacagcaagggcaccagtgatgtgctgctgcaggtggagaccatcgcccaggagcacagcaccctgagccagcaggtggatgagaagtgcagcttcctggagaccaagctgcagggcatcggccacttccagaacaccatccgggagatgttcagccagtttgctgagtttgatgatgagctggacagcatggcccctgtgggcagagatgctgagaccctgcagaagcagaaggagaccatcaaggccttcctgaagaagctggaggccctgatggccagcaatgacaatgccaacaagacctgcaagatgatgctggccacagaggagaccagcccagacctggtgggcatcaagagggacctggaggccctgagcaagcagtgcaacaagctgctggaccgggcccaggcccgggaggagcaggtggagggcaccatcaagaggctggaggagttctacagcaagctgaaggagttcagcatcctgctgcagaaggccgaggagcacgaggagagccagggccctgtgggcatggagacagagaccatcaaccagcagctgaacatgttcaaggtgttccagaaggaggagattgagcccctgcagggcaagcagcaggatgtgaactggctgggccagggcctcatccagagcgctgccaagagcaccagcacccagggcctggagcatgacctggatgatgtgaatgcccgctggaagaccctgaacaagaaggtggcccagagagctgcccagctgcaggaggccctgctgcactgcggccgcttccaggatgccctggagagcctgctgtcctggatggtggacacagaggagctggtggccaaccagaagccacccagcgctgagttcaaggtggtgaaggcccagatccaggagcagaagctgctgcagaggctgctggatgacaggaagagcacagtggaggtgatcaagcgggagggggagaagatcgccaccacagctgagcctgctgacaaggtgaagatcctgaagcagctgagcctgctggacagccgctgggaggccctgctgaacaaggccgagaccaggaaccggcagctggagggcatctctgtggtggcccagcagttccacgagaccctggagcccctgaatgagtggctgaccaccatcgagaagaggctggtgaactgtgagcccatcggcacccaggccagcaagctggaggagcagatcgcccagcacaaggccctggaggatgacatcatcaaccacaacaagcacctgcaccaggccgtgtccatcggccagagcctgaaggtgctgagcagccgggaggacaaggacatggtgcagagcaagctggacttcagccaggtgtggtacatcgagatccaggagaagagccacagccgctctgagctgctgcagcaggccctgtgcaatgccaagatctttggagaagatgaggtggagctgatgaactggctgaatgaggtgcatgacaagctgagcaagctgtctgtgcaggactacagcacagagggcctgtggaagcagcagagcgagctgcgggtgctgcaggaggacatcctgctgaggaagcagaatgtggaccaggccctgctgaatggcctggagctgctgaagcagaccactggagatgaggtgctgatcatccaggacaagctggaggccatcaaggcccgctacaaggacatcaccaagctgagcacagatgtggccaagaccctggagcaggccctgcagctggcccggcggctgcacagcacccatgaggagctgtgcacctggctggacaaggtggaggtggagctgctgtcctatgagacccaggtgctgaagggggaggaggccagccaggcccagatgaggcccaaggagctgaagaaggaggccaagaacaacaaggccctgctggacagcctgaatgaggtgagcagcgccctgctggagctggtgccctggagggcccgggagggcctggagaagatggtggccgaggacaatgaaagataccgcctggtgtctgacaccatcacccagaaggtggaggagattgatgctgccatcctgcggagccagcagtttgaccaggccgcagatgctgagctgtcctggatcacagaaacagagaagaagctgatgagcctgggggacatccggctggagcaggaccagaccagcgcccagctgcaggtgcagaagaccttcaccatggagatcctgcggcacaaggacatcattgatgacctggtgaagagcggccacaagatcatgacagcctgcagcgaggaggagaagcagagcatgaagaagaagctggacaaggtgctgaagaactatgacaccatctgccagatcaacagcgagcgctacctgcagctggagcgggcccagagcctggtgaaccagttctgggagacctatgaggagctgtggccctggctgacagagacccagagcatcatcagccagctgcctgccccagccctggagtatgagaccctgcggcagcagcaggaggagcaccggcagctgcgggagctgattgctgagcacaagccccacatcgacaagatgaacaagacaggcccccagctgctggagctgagccctggagagggcttcagcatccaggagaagtatgtggccgctgacaccctgtacagccagatcaaggaggatgtgaagaagagagctgtggccctggatgaggccatcagccagagcacccagttccatgacaagattgaccagatcctggagagcctggagcgcatcgtggagcggctgcggcagcccccatccatctctgctgaggtggagaagatcaaggagcagatcagcgagaacaagaatgtgtctgtggacatggagaagctgcagcccctgtatgagaccctgaagcagagaggagaggagatgattgcccggagcggcggcacagacaaggacatcagcgccaaggctgtgcaggacaagctggaccagatggtgttcatctgggagaacatccacaccctggtggaggagcgggaggccaagctgctggatgtgatggagctggccgagaagttctggtgtgaccacatgagcctgattgtgaccatcaaggacacccaggacttcatccgggacctggaggaccccggcatcgaccccagcgtggtgaagcagcagcaggaggccgctgagaccatccgggaggagattgatggcctgcaggaggagctggacatcgtcatcaacctgggcagcgagctgattgctgcctgtggggagccagacaagcccatcgtgaagaagagcattgatgagctgaacagcgcctgggacagcctgaacaaggcctggaaggacagaattgacaagctggaggaggccatgcaggccgctgtgcagtaccaggacggcctgcaggccgtgtttgactgggtggacattgctgggggcaagctggcctccatgagccccatcggcacagacctggagaccgtgaagcagcagatcgaggagctgaagcagttcaagtctgaggcctaccagcagcagatcgagatggagcggctgaaccaccaggccgagctgctgctgaagaaggtgacagaggagagtgacaagcacacagtgcaggaccccctgatggagctgaagctgatctgggacagcctggaggagcgcatcatcaaccggcagcacaagctggagggcgccctgctggccctgggccagttccagcacgccctggatgagctgctggcctggctgacccacacagagggcctgctgtctgagcagaagcctgtgggcggggaccccaaggccattgaaattgagctggccaagcaccacgtgctgcagaatgatgtgctggcccaccagagcacagtggaggccgtgaacaaggctggaaatgacctgattgagagcagcgctggggaggaggccagcaacctgcagaacaagctggaggtgctgaaccagcgctggcagaatgtgctggagaagacagagcagaggaagcagcagctggatggagccctgcggcaggccaagggcttccacggggagattgaggacctgcagcagtggctgacagacacagagcggcacctgctggccagcaagcccctgggcggcctgcctgagacagccaaggagcagctgaatgtgcacatggaggtgtgtgccgcctttgaggccaaggaggagacctacaagagcctgatgcagaagggccagcagatgctggcccgctgccccaagtctgctgagaccaacatcgaccaggacatcaacaacctgaaggagaagtgggagagcgtggagaccaagctgaatgaaaggaagaccaagctggaggaggccctgaacctggccatggagttccacaacagcctgcaggacttcatcaactggctgacccaggccgagcagaccctgaatgtggccagccggcccagcctcatcctggacacagtgctcttccagattgatgagcacaaggtgtttgccaatgaggtgaacagccaccgggagcagatcatcgagctggacaagacaggcacccacctgaagtacttcagccagaagcaggatgtggtgctgatcaagaacctgctgatctctgtgcagagccgctgggagaaggtggtgcagaggctggtggagcggggccgcagcctggatgatgccaggaagagggccaagcagttccacgaggcctggagcaagctgatggagtggctggaggagagcgagaagagcctggacagcgagctggagatcgccaatgaccctgacaagatcaagacccagctggcccagcacaaggagttccagaagagcctgggcgccaagcacagcgtgtatgacaccaccaacagaacaggccgcagcctgaaggagaagaccagcctggctgatgacaacctgaagctggatgacatgctgtctgagctgcgggacaagtgggacaccatctgtgggaagtctgtggagcggcagaacaagctggaggaggccctgctcttcagcggccagttcacagatgccctgcaggccctgattgactggctgtacagagtggagccccagctggccgaggaccagcctgtgcacggggacatcgacctggtgatgaacctgattgacaaccacaaggccttccagaaggagctgggcaagaggaccagctctgtgcaggccctgaagaggtctgcccgggagctgattgagggcagcagagatgacagctcctgggtgaaggtgcagatgcaggagctgagcacccgctgggagaccgtgtgtgccctgagcatcagcaagcagacccggctggaggccgccctgcggcaggccgaggagttccacagcgtggtgcacgccctgctggagtggctggccgaggccgagcagaccctgcgcttccacggcgtgctgcctgatgatgaagatgccctgcggaccctgattgaccagcacaaggagttcatgaagaagctggaggagaagagagctgagctgaacaaggccaccaccatgggagacacagtgctggccatctgccacccagacagcatcaccaccatcaagcactggatcaccatcatccgggccaggtttgaggaggtgctggcctgggccaagcagcaccagcagaggctggccagcgccctggccggcctcatcgccaagcaggagctgctggaggccctgctggcctggctgcagtgggccgagaccaccctgacagacaaggacaaggaggtgatcccccaggagattgaggaggtgaaggccctgattgctgagcaccagaccttcatggaggagatgaccaggaagcagccagatgtggacaaggtgaccaagacctacaagagaagagctgctgaccccagcagcctgcagagccacatccctgtgctggacaagggccgggccggcaggaagcgcttccctgccagcagcctgtaccccagcggcagccagacccagatcgagaccaagaacccccgggtgaacctgctggtgtccaagtggcagcaggtgtggctgctggccctggagaggaggaggaagctgaatgatgccctggaccggctggaggagctgcgggagtttgccaactttgattttgacatctggaggaagaagtacatgcgctggatgaaccacaagaagagccgggtgatggacttcttcagaagaattgacaaggaccaggacggcaagatcacccggcaggagttcattgatggcatcctgagcagcaagttccccaccagccggctggagatgtctgctgtggccgacatctttgacagagatggagatggctacatcgactactatgaatttgtggccgccctgcaccccaacaaggatgcctacaagcccatcacagatgctgacaagattgaagatgaggtgacccggcaggtggccaagtgcaagtgtgccaagcgcttccaggtggagcagatcggggacaacaagtacagagtgtccttccagagcaactttggagacagccagcagctgcggctggtgcgcatcctgcggagcacagtgatggtgcgggtgggcggcggctggatggccctggatgagttcctggtgaagaatgacccctgccgggtgcaccaccacggcagcaagatgctgcggtctgagagcaacagcagcatcaccaccacccagcccaccatcgccaagggccgcaccaacatggagctgcgggagaagttcatcctggctgatggagccagccagggcatggccgccttccggccccggggccgccgcagccggcccagcagcagaggagccagccccaacagaagcacctctgtgagcagccaggccgcccaggccgccagcccccaggtgcctgccaccaccacccccaagggcacccccatccagggcagcaagctgcggctgcccggctacctgagcggcaagggcttccacagcggggaggacagcggcctcatcaccacagctgctgcccgggtgaggacccagtttgctgacagcaagaagacccccagccggcccggcagccgggccggcagcaaggccggcagccgggccagcagcagaagaggaagtgatgccagtgactttgacatcagcgagatccagagcgtgtgcagtgatgtggagaccgtgccccagacccaccggcccaccccccgggccggcagccggcccagcacagccaagcccagcaagatccccaccccccagaggaagagccctgccagcaagctggacaagagcagcaagaggtag

SEQ ID NO: 150720 - DNA, 768 bp, synthetic construct
  misc_feature 1..768: note = Description of Artificial Sequence: Synthetic coding sequence
  source 1..768: mol_type = other DNA
atgaacaagacaggcccccagctgctggagctgagccctggagagggcttcagcatccaggagaagtatgtggccgctgacaccctgtacagccagatcaaggaggatgtgaagaagagagctgtggccctggatgaggccatcagccagagcacccagttccatgacaagattgaccagatcctggagagcctggagcgcatcgtggagcggctgcggcagcccccatccatctctgctgaggtggagaagatcaaggagcagatcagcgagaacaagaatgtgtctgtggacatggagaagctgcagcccctgtatgagaccctgaagcagagaggagaggagatgattgcccggagcggcggcacagacaaggacatcagcgccaaggctgtgcaggacaagctggaccagatggtgttcatctgggagaacatccacaccctggtggaggagcgggaggccaagctgctggatgtgatggagctggccgagaagttctggtgtgaccacatgagcctgattgtgaccatcaaggacacccaggacttcatccgggacctggaggaccccggcatcgaccccagcgtggtgaagcagcagcaggaggccgctgagaccatccgggaggagattgatggcctgcaggaggagctggacatcgtcatcaacctgggcagcgagctgattgctgcctgtggggagccagacaagcccatcgtgaagaagagcattgatgagctgaacagcatgggcttcagcaagtag

SEQ ID NO: 150721 - DNA, 1359 bp, synthetic construct
  misc_feature 1..1359: note = Description of Artificial Sequence: Synthetic coding sequence
  source 1..1359: mol_type = other DNA
atgtttcctgaccagcctgagaagcccctgaacctggcccacatcgtgccccccaggcctgtgacctccatgaatgacaccctcttcagccacagcgtgcccagcagcggcagccccttcatcacccggcggctgcctgagggcatcagcgccagcagccctgtggccgaggagcacagcctcatcaagctgtatgtgaaccagctggaccatggagcccggagcccccccaaggacagcgaggtggagcagaacaagctgctggcccgggccgccccagccttcctgaagggcaagggcatccagtacagcctgaatgtggccgaccggctggctgatgaacatgtgctgattggcctgtatgtgaacatgctgaggaacaaccccagctgcatgctggagagcagcaaccggctggatgaggagcacaggctcatcgcccgctatgctgcccggctggccgctgagagcagcagcagccagcccccccagcagaggtctgccccagacatctccttcaccattgatgccaacaagcagcagaggcagctgattgctgagctggagaacaagaaccgggagatcctgcaggagatccagaggctgcggctggagcacgagcaggccagccagcccaccccagagaaggcccagcagaaccccaccctgctggccgagctgcggctgctgcggcagaggaaggatgagctggagcagaggatgtctgccctgcaggagagccggcgggagctgatggtgcagctggagggcctgatgaagctgctgaagacccagggcgccggcagccccaggagcagccccagccacaccatcagccggcccatccccatgcccatccgcagcgccagcgcctgcagcacccccacccacaccccccaggacagcctgactggagtgggcggagatgtgcaggaggcctttgcccagagcagcagaagaaacctgagaaatgacctgctggtggccgctgacagcatcaccaacaccatgagcagcctggtgaaggagctgaacagcgaggtgggcagcgagacagagagcaatgtggacagcgagtttgcccggacccagtttgaggacctggtgcccagccccaccagcgagaaggccttcctggcccagatccacgccaggaagccaggctacatccacagcggggccaccaccagcaccatgagaggagacatggtgacagaagatgctgacccctacgtgcagccagaagatgaaaattatgaaaatgattctgtgcggcagctggagaatgagctgcagatggaggagtacctgaagcagaagctgcaggatgaggcctaccaggtgtccctgcagggctag

SEQ ID NO: 150722 - DNA, 1116 bp, synthetic construct
  misc_feature 1..1116: note = Description of Artificial Sequence: Synthetic coding sequence
  source 1..1116: mol_type = other DNA
atgattgaagattctgggaagaggggcaacaccatggccgagcggcggcagctgtttgctgagatgagggcccaggacctggaccgcatccggctgagcacctacagaacagcctgcaagctgcgctttgtgcagaagaagtgcaacctgcacctggtggacatctggaatgtgattgaggccctgcgggagaatgccctgaacaacctggaccccaacacagagctgaatgtgtcccggctggaggccgtgctgagcaccatcttctaccagctgaacaagaggatgcccaccacccaccagatccacgtggagcagagcatcagcctgctgctgaacttcctgctggccgcctttgatcctgagggccacggcaagatctctgtgtttgctgtgaagatggccctggccaccctgtgtggcggcaagatcatggacaagctgcgctacatcttctccatgatcagtgacagcagtggagtgatggtgtatggccgctatgaccagttcctgcgggaggtgctgaagctgcccacagctgtgtttgagggccccagctttggctacacagagcagagcgcccggagctgcttcagccagcagaagaaggtgaccctgaatggcttcctggacaccctgatgtctgaccccccaccccagtgcctggtgtggctgcccctgctgcaccggctggccaacgtggagaatgtgttccaccctgtggagtgcagctactgccacagcgagagcatgatgggcttccgctaccgctgccagcagtgccacaactaccagctgtgccaggactgcttctggaggggccacgccggcggcagccacagcaaccagcaccagatgaaggagtacacctcctggaagagccctgccaagaagctgaccaatgccctgagcaagagcctgagctgtgccagcagccgggagcccctgcaccccatgtttcctgaccagcctgagaagcccctgaacctggcccacatcgtgccccccaggcctgtgacctccatgaatgacaccctcttcagccacagcgtgcccagcagcggcagccccttcatcaccaggagcagtgatggagcctttggaggctgtgtgtag

SEQ ID NO: 150723 - DNA, 1188 bp, synthetic construct
  misc_feature 1..1188: note = Description of Artificial Sequence: Synthetic coding sequence
  source 1..1188: mol_type = other DNA
atgtttcctgaccagcctgagaagcccctgaacctggcccacatcgtgccccccaggcctgtgacctccatgaatgacaccctcttcagccacagcgtgcccagcagcggcagccccttcatcacccggcggctgcctgagggcatcagcgccagcagccctgtggccgaggagcacagcctcatcaagctgtatgtgaaccagctggaccatggagccaggatgctggagagcagcaaccggctggatgaggagcaccggctgattgcccgctatgctgcccggctggccgctgagagcagcagcagccagcccccccagcagaggtctgccccagacatctccttcaccattgatgccaacaagcagcagaggcagctgattgctgagctggagaacaagaaccgggagatcctgcaggagatccagaggctgcggctggagcacgagcaggccagccagcccaccccagagaaggcccagcagaaccccaccctgctggccgagctgcggctgctgcggcagaggaaggatgagctggagcagaggatgtctgccctgcaggagagcagaagagagctgatggtgcagctggagggcctgatgaagctgctgaagacccagggcgccggcagccccaggagcagccccagccacaccatcagccggcccatccccatgcccatccgcagcgccagcgcctgcagcacccccacccacaccccccaggacagcctgactggagtgggcggagatgtgcaggaggcctttgcccagagcagcagaagaaacctgagaaatgacctgctggtggccgctgacagcatcaccaacaccatgagcagcctggtgaaggagctgaacagcgaggtgggcagcgagacagagagcaatgtggacagcgagtttgcccggacccagtttgaggacctggtgcccagccccaccagcgagaaggccttcctggcccagatccacgccaggaagccaggctacatccacagcggggccaccaccagcaccatgagaggagacatggtgacagaagatgctgacccctacgtgcagccagaagatgagaactatgaaaatgacagcgtgcggcagctggagaatgagctgcagatggaggagtacctgaagcagaagctgcaggatgaggcctaccaggtgtccctgcagggctag

SEQ ID NO: 150724 - DNA, 2175 bp, synthetic construct
  misc_feature 1..2175: note = Description of Artificial Sequence: Synthetic coding sequence
  source 1..2175: mol_type = other DNA
atgattgaagattctgggaagaggggcaacaccatggccgagcggcggcagctgtttgctgagatgagggcccaggacctggaccgcatccggctgagcacctacagaacagcctgcaagctgcgctttgtgcagaagaagtgcaacctgcacctggtggacatctggaatgtgattgaggccctgcgggagaatgccctgaacaacctggaccccaacacagagctgaatgtgtcccggctggaggccgtgctgagcaccatcttctaccagctgaacaagaggatgcccaccacccaccagatccacgtggagcagagcatcagcctgctgctgaacttcctgctggccgcctttgatcctgagggccacggcaagatctctgtgtttgctgtgaagatggccctggccaccctgtgtggcggcaagatcatggacaagctgcgctacatcttctccatgatcagtgacagcagtggagtgatggtgtatggccgctatgaccagttcctgcgggaggtgctgaagctgcccacagctgtgtttgagggccccagctttggctacacagagcagagcgcccggagctgcttcagccagcagaagaaggtgaccctgaatggcttcctggacaccctgatgtctgaccccccaccccagtgcctggtgtggctgcccctgctgcaccggctggccaacgtggagaatgtgttccaccctgtggagtgcagctactgccacagcgagagcatgatgggcttccgctaccgctgccagcagtgccacaactaccagctgtgccaggactgcttctggaggggccacgccggcggcagccacagcaaccagcaccagatgaaggagtacacctcctggaagagccctgccaagaagctgaccaatgccctgagcaagagcctgagctgtgccagcagccgggagcccctgcaccccatgtttcctgaccagcctgagaagcccctgaacctggcccacatcgtgccccccaggcctgtgacctccatgaatgacaccctcttcagccacagcgtgcccagcagcggcagccccttcatcaccaggtccatgctggagagcagcaaccggctggatgaggagcaccggctgattgcccgctatgctgcccggctggccgctgagagcagcagcagccagcccccccagcagaggtctgccccagacatctccttcaccattgatgccaacaagcagcagaggcagctgattgctgagctggagaacaagaaccgggagatcctgcaggagatccagaggctgcggctggagcacgagcaggccagccagcccaccccagagaaggcccagcagaaccccaccctgctggccgagctgcggctgctgcggcagaggaaggatgagctggagcagaggatgtctgccctgcaggagagcagaagagagctgatggtgcagctggagggcctgatgaagctgctgaagacccagggcgccggcagccccaggagcagccccagccacaccatcagccggcccatccccatgcccatccgcagcgccagcgcctgcagcacccccacccacaccccccaggacagcctgactggagtgggcggagatgtgcaggaggcctttgcccagagcagcagaagaaacctgagaaatgacctgctggtggccgctgacagcatcaccaacaccatgagcagcctggtgaaggagctgaacagcgaggtgggcagcgagacagagagcaatgtggacagcgagtttgcccggacccagtttgaggacctggtgcccagccccaccagcgagaaggccttcctggcccagatccacgccaggaagccaggctacatccacagcggggccaccaccagcaccatgagaggagacatggtgacagaagatgctgacccctacgtgcagccagaagatgagaactatgaaaatgacagcgtgcggcagctggagaatgagctgcagatggaggagtacctgaagcagaagctgcaggatgaggcctaccagctgcacgtgtccacagagacccggctggagcacccctgccctgtgtctgagaccaagtggagggtgctcttctggggctttgtgttcttcggcggcttcctgagcctggccctgcagatctacttctggggcctcttctag

SEQ ID NO: 150725 - DNA, 912 bp, synthetic construct
  misc_feature 1..912: note = Description of Artificial Sequence: Synthetic coding sequence
  source 1..912: mol_type = other DNA
atgctggagaccctgcgggagcggctgctgtctgtgcagcaggacttcaccagcggcctgaagaccctgagtgacaagagccgggaggccaaggtgaagagcaagcccaggacagtgcccttcctgcccaagtacagcgctggcctggagctgctgagccgctatgaggacacctgggccgccctgcaccggcgggccaaggactgtgccagcgctggggagctggtggacagcgaggtggtgatgctgagcgcccactgggagaagaagaagaccagcctggtggagctgcaggagcagctgcagcagctgcctgccctgattgctgacctggagagcatgacagccaacctgacccacctggaggccagctttgaggaggtggagaacaacctgctgcacctggaggacctgtgtggccagtgtgagctggagcgctgcaagcacatgcagagccagcagctggagaactacaagaagaacaagaggaaggagctggagaccttcaaggccgagctggatgctgagcacgcccagaaggtgctggagatggagcacacccagcagatgaagctgaaggagcggcagaagttctttgaggaggccttccagcaggacatggagcagtacctgagcacaggctacctgcagattgctgagcggcgggagcccatcggctccatgagctccatggaggtgaatgtggacatgctggagcagatggacctgatggacatcagtgaccaggaggccctggatgtgttcctgaacagcggcggggaggagaacacagtgctgagccctgccctgggccgggtggacaagctggccctggccgagcccggccagtaccgctgccacagcccccccaaggtgagaagagagaaccacctgcctgtgacctacgcctag

SEQ ID NO: 150726 - DNA, 1056 bp, synthetic construct
  misc_feature 1..1056: note = Description of Artificial Sequence: Synthetic coding sequence
  source 1..1056: mol_type = other DNA
atgctggagaccctgcgggagcggctgctgtctgtgcagcaggacttcaccagcggcctgaagaccctgagtgacaagagccgggaggccaaggtgaagagcaagcccaggacagtgcccttcctgcccaagtacagcgctggcctggagctgctgagccgctatgaggacacctgggccgccctgcaccggcgggccaaggactgtgccagcgctggggagctggtggacagcgaggtggtgatgctgagcgcccactgggagaagaagaagaccagcctggtggagctgcaggagcagctgcagcagctgcctgccctgattgctgacctggagagcatgacagccaacctgacccacctggaggccagctttgaggaggtggagaacaacctgctgcacctggaggacctgtgtggccagtgtgagctggagcgctgcaagcacatgcagagccagcagctggagaactacaagaagaacaagaggaaggagctggagaccttcaaggccgagctggatgctgagcacgcccagaaggtgctggagatggagcacacccagcagatgaagctgaaggagcggcagaagttctttgaggaggccttccagcaggacatggagcagtacctgagcacaggctacctgcagattgctgagcggcgggagcccatcggctccatgagctccatggaggtgaatgtggacatgctggagcagatggacctgatggacatcagtgaccaggaggccctggatgtgttcctgaacagcggcggggaggagaacacagtgctgagccctgccctgggccctgagagcagcacctgccagaatgagatcaccctgcaggtgcccaaccccagcgagctgcgggccaagccacccagcagcagcagcacctgcacagattctgccacccgggacatcagcgagggcggggagagccctgtggtgcagagtgatgaggaggaggtgcaggtggacacagccctggccaccagccacacagaccgggaggccaccccagatggaggagaagattctgacagctag

SEQ ID NO: 150727 - DNA, 1059 bp, synthetic construct
  misc_feature 1..1059: note = Description of Artificial Sequence: Synthetic coding sequence
  source 1..1059: mol_type = other DNA
atgctggagaccctgcgggagcggctgctgtctgtgcagcaggacttcaccagcggcctgaagaccctgagtgacaagagccgggaggccaaggtgaagagcaagcccaggacagtgcccttcctgcccaagtacagcgctggcctggagctgctgagccgctatgaggacacctgggccgccctgcaccggcgggccaaggactgtgccagcgctggggagctggtggacagcgaggtggtgatgctgagcgcccactgggagaagaagaagaccagcctggtggagctgcaggagcagctgcagcagctgcctgccctgattgctgacctggagagcatgacagccaacctgacccacctggaggccagctttgaggaggtggagaacaacctgctgcacctggaggacctgtgtggccagtgtgagctggagcgctgcaagcacatgcagagccagcagctggagaactacaagaagaacaagaggaaggagctggaggtgaccttccgctctgagctggatgctgagcacgcccagaaggtgctggagatggagcacacccagcagatgaagctgaaggagcggcagaagttctttgaggaggccttccagcaggacatggagcagtacctgagcacaggctacctgcagattgctgagcggcgggagcccatcggctccatgagctccatggaggtgaatgtggacatgctggagcagatggacctgatggacatcagtgaccaggaggccctggatgtgttcctgaacagcggcggggaggagaacacagtgctgagccctgccctgggccctgagagcagcacctgccagaatgagatcaccctgcaggtgcccaaccccagcgagctgcgggccaagccacccagcagcagcagcacctgcacagacagcgccacccgggacatcagcgagggcggggagagccctgtggtgcagagtgatgaggaggaggtgcaggtggacacagccctggccaccagccacacagaccgggaggccaccccagatggaggagaggacagcgacagctag

SEQ ID NO: 150728 - DNA, 813 bp, synthetic construct
  misc_feature 1..813: note = Description of Artificial Sequence: Synthetic coding sequence
  source 1..813: mol_type = other DNA
atgctgagcgcccactgggagaagaagaagaccagcctggtggagctgcaggagcagctgcagcagctgcctgccctgattgctgacctggagagcatgacagccaacctgacccacctggaggccagctttgaggaggtggagaacaacctgctgcacctggaggacctgtgtggccagtgtgagctggagcgctgcaagcacatgcagagccagcagctggagaactacaagaagaacaagagaagaaggctgcggaccttcaagacagagctggatgctgagcacgcccagaaggtgctggagatggagcacacccagcagatgaagctgaaggagcggcagaagttctttgaggaggccttccagcaggacatggagcagtacctgagcacaggctacctgcagattgctgagcggcgggagcccatcggctccatgagctccatggaggtgaatgtggacatgctggagcagatggacctgatggacatcagtgaccaggaggccctggatgtgttcctgaacagcggcggggaggagaacacagtgctgagccctgccctgggccctgagagcagcacctgccagaatgagatcaccctgcaggtgcccaaccccagcgagctgcgggccaagccacccagcagcagcagcacctgcacagacagcgccacccgggacatcagcgagggcggggagagccctgtggtgcagagtgatgaggaggaggtgcaggtggacacagccctggccaccagccacacagaccgggaggccaccccagatggaggagaggacagcgacagctag

SEQ ID NO: 150729 - DNA, 912 bp, synthetic construct
  misc_feature 1..912: note = Description of Artificial Sequence: Synthetic coding sequence
  source 1..912: mol_type = other DNA
atgctggagaccctgcgggagcggctgctgtctgtgcagcaggacttcaccagcggcctgaagaccctgagtgacaagagccgggaggccaaggtgaagagcaagcccaggacagtgcccttcctgcccaagtacagcgctggcctggagctgctgagccgctatgaggacacctgggccgccctgcaccggcgggccaaggactgtgccagcgctggggagctggtggacagcgaggtggtgatgctgagcgcccactgggagaagaagaagaccagcctggtggagctgcaggagcagctgcagcagctgcctgccctgattgctgacctggagagcatgacagccaacctgacccacctggaggccagctttgaggaggtggagaacaacctgctgcacctggaggacctgtgtggccagtgtgagctggagcgctgcaagcacatgcagagccagcagctggagaactacaagaagaacaagagcaaggagctgggcaccgggaaggccgagctggatgctgagcacgcccagaaggtgctggagatggagcacacccagcagatgaagctgaaggagcggcagaagttctttgaggaggccttccagcaggacatggagcagtacctgagcacaggctacctgcagattgctgagcggcgggagcccatcggctccatgagctccatggaggtgaatgtggacatgctggagcagatggacctgatggacatcagtgaccaggaggccctggatgtgttcctgaacagcggcggggaggagaacacagtgctgagccctgccctgggccgggtggacaagctggccctggccgagcccggccagtaccgctgccacagcccccccaaggtgagaagagagaaccacctgcctgtgacctacgcctag

SEQ ID NO: 150730 - DNA, 135 bp, synthetic construct
  misc_feature 1..135: note = Description of Artificial Sequence: Synthetic coding sequence
  source 1..135: mol_type = other DNA
atgctggagaccctgcgggagcggctgctgtctgtgcagcaggacttcaccagcggcctgaagaccctgagtgacaagagccgggaggccaaggtgaagagcaagcccagctggctgaaccaggagcagttctag

SEQ ID NO: 150731 - DNA, 627 bp, synthetic construct
  misc_feature 1..627: note = Description of Artificial Sequence: Synthetic coding sequence
  source 1..627: mol_type = other DNA
atgctggagaccctgcgggagcggctgctgtctgtgcagcaggacttcaccagcggcctgaagaccctgagtgacaagagccgggaggccaaggtgaagagcaagcccaggtatgaggacacctgggccgccctgcacagaagagccaaggactgtgccagcgctggggagctggtggacagcgaggtggtgatgctgagcgcccactgggagaagaagaagaccagcctggtggagctgcaggagcagctgcagcagctgcctgccctgattgctgacctggagagcatgacagccaacctgacccacctggaggccagctttgaggaggtggagaacaacctgctgcacctggaggacctgtgtggccagtgtgagctggagcgctgcaagcacatgcagagccagcagctggagaactacaagaagaacaagaggaaggagctggagaccttcaaggccgagctggatgctgagcacgcccagaaggtgctggagatggagcacacccagcagatgaagctgaaggagcggcagaagttctttgaggaggccttccagcaggacatggagcagtacctgagcacaggctacctgcagattgctgagcggcggggggacccctag

SEQ ID NO: 150732 - DNA, 2235 bp, synthetic construct
  misc_feature 1..2235: note = Description of Artificial Sequence: Synthetic coding sequence
  source 1..2235: mol_type = other DNA
atgattgaagattctgggaagaggggcaacaccatggccgagcggcggcagctgtttgctgagatgagggcccaggacctggaccgcatccggctgagcacctacagaacagcctgcaagctgcgctttgtgcagaagaagtgcaacctgcacctggtggacatctggaatgtgattgaggccctgcgggagaatgccctgaacaacctggaccccaacacagagctgaatgtgtcccggctggaggccgtgctgagcaccatcttctaccagctgaacaagaggatgcccaccacccaccagatccacgtggagcagagcatcagcctgctgctgaacttcctgctggccgcctttgatcctgagggccacggcaagatctctgtgtttgctgtgaagatggccctggccaccctgtgtggcggcaagatcatggacaagctgcgctacatcttctccatgatcagtgacagcagtggagtgatggtgtatggccgctatgaccagttcctgcgggaggtgctgaagctgcccacagctgtgtttgagggccccagctttggctacacagagcagagcgcccggagctgcttcagccagcagaagaaggtgaccctgaatggcttcctggacaccctgatgtctgaccccccaccccagtgcctggtgtggctgcccctgctgcaccggctggccaacgtggagaatgtgttccaccctgtggagtgcagctactgccacagcgagagcatgatgggcttccgctaccgctgccagcagtgccacaactaccagctgtgccaggactgcttctggaggggccacgccggcggcagccacagcaaccagcaccagatgaaggagtacacctcctggaagagccctgccaagaagctgaccaatgccctgagcaagagcctgagctgtgccagcagccgggagcccctgcaccccatgtttcctgaccagcctgagaagcccctgaacctggcccacatcgtgctggacaacatgccacccaggcctgtgacctccatgaatgacaccctcttcagccacagcgtgcccagcagcggcagccccttcatcaccaggagcagcccccccaaggacagcgaggtggagcagaacaagctgctggcccgggccgccccagccttcctgaagggcaagggcatccagtacagcctgaatgtggccgaccggctggctgatgaacatgtgctgattggcctgtatgtgaacatgctgaggaacaaccccagctgcatgctggagagcagcaaccggctggatgaggagcacaggctcatcgcccgctatgctgcccggctggccgctgagagcagcagcagccagcccccccagcagaggtctgccccagacatctccttcaccattgatgccaacaagcagcagaggcagctgattgctgagctggagaacaagaaccgggagatcctgcaggagatccagaggctgcggctggagcacgagcaggccagccagcccaccccagagaaggcccagcagaaccccaccctgctggccgagctgcggctgctgcggcagaggaaggatgagctggagcagaggatgtctgccctgcaggagagccggcgggagctgatggtgcagctggagggcctgatgaagctgctgaagacccagggcgccggcagccccaggagcagccccagccacaccatcagccggcccatccccatgcccatccgcagcgccagcgcctgcagcacccccacccacaccccccaggacagcctgactggagtgggcggagatgtgcaggaggcctttgcccagagcagcagaagaaacctgagaaatgacctgctggtggccgctgacagcatcaccaacaccatgagcagcctggtgaaggagctgaacagcgaggtgggcagcgagacagagagcaatgtggacagcgagtttgcccggacccagtttgaggacctggtgcccagccccaccagcgagaaggccttcctggcccagatccacgccaggaagccaggctacatccacagcggggccaccaccagcaccatgagaggagacatggtgacagaagatgctgacccctacgtgcagccagaagatgaaaattatgaaaatgattctgtgcggcagctggagaatgagctgcagatggaggagtacctgaagcagaagctgcaggatgaggcctaccaggtgtccctgcagggctag

SEQ ID NO: 150733 - DNA, 1713 bp, synthetic construct
  misc_feature 1..1713: note = Description of Artificial Sequence: Synthetic coding sequence
  source 1..1713: mol_type = other DNA
atgattgaagattctgggaagaggggcaacaccatggccgagcggcggcagctgtttgctgagatgagggcccaggacctggaccgcatccggctgagcacctacagaacagcctgcaagctgcgctttgtgcagaagaagtgcaacctgcacctggtggacatctggaatgtgattgaggccctgcgggagaatgccctgaacaacctggaccccaacacagagctgaatgtgtcccggctggaggccgtgctgagcaccatcttctaccagctgaacaagaggatgcccaccacccaccagatccacgtggagcagagcatcagcctgctgctgaacttcctgctggccgcctttgatcctgagggccacggcaagatctctgtgtttgctgtgaagatggccctggccaccctgtgtggcggcaagatcatggacaagctgcgctacatcttctccatgatcagtgacagcagtggagtgatggtgtatggccgctatgaccagttcctgcgggaggtgctgaagctgcccacagctgtgtttgagggccccagctttggctacacagagcagagcgcccggagctgcttcagccagcagaagaaggtgaccctgaatggcttcctggacaccctgatgtctgaccccccaccccagtgcctggtgtggctgcccctgctgcaccggctggccaacgtggagaatgtgttccaccctgtggagtgcagctactgccacagcgagagcatgatgggcttccgctaccgctgccagcagtgccacaactaccagctgtgccaggactgcttctggaggggccacgccggcggcagccacagcaaccagcaccagatgaaggagtacacctcctggaagagccctgccaagaagctgaccaatgccctgagcaagagcctgagctgtgccagcagccgggagcccctgcaccccatgtttcctgaccagcctgagaagcccctgaacctggcccacatcgtggacacctggccacccaggcctgtgacctccatgaatgacaccctcttcagccacagcgtgcccagcagcggcagccccttcatcaccaggagcagcccccccaaggacagcgaggtggagcagaacaagctgctggcccgggccgccccagccttcctgaagggcaagggcatccagtacagcctgaatgtggccgaccggctggctgatgagcacgtgctgattggcctgtatgtgaacatgctgaggaacaaccccagctgcatgctggagagcagcaaccggctggatgaggagcaccggctgattgcccgctatgctgcccggctggccgctgagagcagcagcagccagcccccccagcagaggtctgccccagacatctccttcaccattgatgccaacaagcagcagaggcagctgattgctgagctggagaacaagaaccgggagatcctgcaggagatccagaggctgcggctggagcacgagcaggccagccagcccaccccagagaaggcccagcagaaccccaccctgctggccgagctgcggctgctgcggcagaggaaggatgagctggagcagaggatgtctgccctgcaggagagcagaagagagctgatggtgcagctggagggcctgatgaagctgctgaaggaggaggagctgaagcagggcgtgtcctatgtgccctactgccgctcctag

SEQ ID NO: 150734 - DNA, 2061 bp, synthetic construct
  misc_feature 1..2061: note = Description of Artificial Sequence: Synthetic coding sequence
  source 1..2061: mol_type = other DNA
atgattgaagattctgggaagaggggcaacaccatggccgagcggcggcagctgtttgctgagatgagggcccaggacctggaccgcatccggctgagcacctacagaacagcctgcaagctgcgctttgtgcagaagaagtgcaacctgcacctggtggacatctggaatgtgattgaggccctgcgggagaatgccctgaacaacctggaccccaacacagagctgaatgtgtcccggctggaggccgtgctgagcaccatcttctaccagctgaacaagaggatgcccaccacccaccagatccacgtggagcagagcatcagcctgctgctgaacttcctgctggccgcctttgatcctgagggccacggcaagatctctgtgtttgctgtgaagatggccctggccaccctgtgtggcggcaagatcatggacaagctgcgctacatcttctccatgatcagtgacagcagtggagtgatggtgtatggccgctatgaccagttcctgcgggaggtgctgaagctgcccacagctgtgtttgagggccccagctttggctacacagagcagagcgcccggagctgcttcagccagcagaagaaggtgaccctgaatggcttcctggacaccctgatgtctgaccccccaccccagtgcctggtgtggctgcccctgctgcaccggctggccaacgtggagaatgtgttccaccctgtggagtgcagctactgccacagcgagagcatgatgggcttccgctaccgctgccagcagtgccacaactaccagctgtgccaggactgcttctggaggggccacgccggcggcagccacagcaaccagcaccagatgaaggagtacacctcctggaagagccctgccaagaagctgaccaatgccctgagcaagagcctgagctgtgccagcagccgggagcccctgcaccccatgtttcctgaccagcctgagaagcccctgaacctggcccacatcgtggacacctggccacccaggcctgtgacctccatgaatgacaccctcttcagccacagcgtgcccagcagcggcagccccttcatcaccaggtccatgctggagagcagcaaccggctggatgaggagcacaggctcatcgcccgctatgctgcccggctggccgctgagagcagcagcagccagcccccccagcagaggtctgccccagacatctccttcaccattgatgccaacaagcagcagaggcagctgattgctgagctggagaacaagaaccgggagatcctgcaggagatccagaggctgcggctggagcacgagcaggccagccagcccaccccagagaaggcccagcagaaccccaccctgctggccgagctgcggctgctgcggcagaggaaggatgagctggagcagaggatgtctgccctgcaggagagccggcgggagctgatggtgcagctggagggcctgatgaagctgctgaagacccagggcgccggcagccccaggagcagccccagccacaccatcagccggcccatccccatgcccatccgcagcgccagcgcctgcagcacccccacccacaccccccaggacagcctgactggagtgggcggagatgtgcaggaggcctttgcccagagcagcagaagaaacctgagaaatgacctgctggtggccgctgacagcatcaccaacaccatgagcagcctggtgaaggagctgaacagcgaggtgggcagcgagacagagagcaatgtggacagcgagtttgcccggacccagtttgaggacctggtgcccagccccaccagcgagaaggccttcctggcccagatccacgccaggaagccaggctacatccacagcggggccaccaccagcaccatgagaggagacatggtgacagaagatgctgacccctacgtgcagccagaagatgaaaattatgaaaatgattctgtgcggcagctggagaatgagctgcagatggaggagtacctgaagcagaagctgcaggatgaggcctaccaggtgtccctgcagggctag

SEQ ID NO: 150735 - DNA, 1125 bp, synthetic construct
  misc_feature 1..1125: note = Description of Artificial Sequence: Synthetic coding sequence
  source 1..1125: mol_type = other DNA
atgattgaagattctgggaagaggggcaacaccatggccgagcggcggcagctgtttgctgagatgagggcccaggacctggaccgcatccggctgagcacctacagaacagcctgcaagctgcgctttgtgcagaagaagtgcaacctgcacctggtggacatctggaatgtgattgaggccctgcgggagaatgccctgaacaacctggaccccaacacagagctgaatgtgtcccggctggaggccgtgctgagcaccatcttctaccagctgaacaagaggatgcccaccacccaccagatccacgtggagcagagcatcagcctgctgctgaacttcctgctggccgcctttgatcctgagggccacggcaagatctctgtgtttgctgtgaagatggccctggccaccctgtgtggcggcaagatcatggacaagctgcgctacatcttctccatgatcagtgacagcagtggagtgatggtgtatggccgctatgaccagttcctgcgggaggtgctgaagctgcccacagctgtgtttgagggccccagctttggctacacagagcagagcgcccggagctgcttcagccagcagaagaaggtgaccctgaatggcttcctggacaccctgatgtctgaccccccaccccagtgcctggtgtggctgcccctgctgcaccggctggccaacgtggagaatgtgttccaccctgtggagtgcagctactgccacagcgagagcatgatgggcttccgctaccgctgccagcagtgccacaactaccagctgtgccaggactgcttctggaggggccacgccggcggcagccacagcaaccagcaccagatgaaggagtacacctcctggaagagccctgccaagaagctgaccaatgccctgagcaagagcctgagctgtgccagcagccgggagcccctgcaccccatgtttcctgaccagcctgagaagcccctgaacctggcccacatcgtggacacctggccacccaggcctgtgacctccatgaatgacaccctcttcagccacagcgtgcccagcagcggcagccccttcatcaccaggagcagtgatggagccttcggcggctgtgtgtag

SEQ ID NO: 150736 - DNA, 1704 bp, synthetic construct
  misc_feature 1..1704: note = Description of Artificial Sequence: Synthetic coding sequence
  source 1..1704: mol_type = other DNA
atgattgaagattctgggaagaggggcaacaccatggccgagcggcggcagctgtttgctgagatgagggcccaggacctggaccgcatccggctgagcacctacagaacagcctgcaagctgcgctttgtgcagaagaagtgcaacctgcacctggtggacatctggaatgtgattgaggccctgcgggagaatgccctgaacaacctggaccccaacacagagctgaatgtgtcccggctggaggccgtgctgagcaccatcttctaccagctgaacaagaggatgcccaccacccaccagatccacgtggagcagagcatcagcctgctgctgaacttcctgctggccgcctttgatcctgagggccacggcaagatctctgtgtttgctgtgaagatggccctggccaccctgtgtggcggcaagatcatggacaagctgcgctacatcttctccatgatcagtgacagcagtggagtgatggtgtatggccgctatgaccagttcctgcgggaggtgctgaagctgcccacagctgtgtttgagggccccagctttggctacacagagcagagcgcccggagctgcttcagccagcagaagaaggtgaccctgaatggcttcctggacaccctgatgtctgaccccccaccccagtgcctggtgtggctgcccctgctgcaccggctggccaacgtggagaatgtgttccaccctgtggagtgcagctactgccacagcgagagcatgatgggcttccgctaccgctgccagcagtgccacaactaccagctgtgccaggactgcttctggaggggccacgccggcggcagccacagcaaccagcaccagatgaaggagtacacctcctggaagagccctgccaagaagctgaccaatgccctgagcaagagcctgagctgtgccagcagccgggagcccctgcaccccatgtttcctgaccagcctgagaagcccctgaacctggcccacatcgtgccccccaggcctgtgacctccatgaatgacaccctcttcagccacagcgtgcccagcagcggcagccccttcatcaccaggagcagcccccccaaggacagcgaggtggagcagaacaagctgctggcccgggccgccccagccttcctgaagggcaagggcatccagtacagcctgaatgtggccgaccggctggctgatgaacatgtgctgattggcctgtatgtgaacatgctgaggaacaaccccagctgcatgctggagagcagcaaccggctggatgaggagcacaggctcatcgcccgctatgctgcccggctggccgctgagagcagcagcagccagcccccccagcagaggtctgccccagacatctccttcaccattgatgccaacaagcagcagaggcagctgattgctgagctggagaacaagaaccgggagatcctgcaggagatccagaggctgcggctggagcacgagcaggccagccagcccaccccagagaaggcccagcagaaccccaccctgctggccgagctgcggctgctgcggcagaggaaggatgagctggagcagaggatgtctgccctgcaggagagccggcgggagctgatggtgcagctggagggcctgatgaagctgctgaaggaggaggagctgaagcagggcgtgtcctatgtgccctactgccgctcctag

SEQ ID NO: 150737 - DNA, 1176 bp, synthetic construct
  misc_feature 1..1176: note = Description of Artificial Sequence: Synthetic coding sequence
  source 1..1176: mol_type = other DNA
atgtttcctgaccagcctgagaagcccctgaacctggcccacatcgtgccccccaggcctgtgacctccatgaatgacaccctcttcagccacagcgtgcccagcagcggcagccccttcatcaccaggagcagcccccccaaggacagcgaggtggagcagaacaagctgctggcccgggccgccccagccttcctgaagggcaagggcatgctggagagcagcaaccggctggatgaggagcaccggctgattgcccgctatgctgcccggctggccgctgagagcagcagcagccagcccccccagcagaggtctgccccagacatctccttcaccattgatgccaacaagcagcagaggcagctgattgctgagctggagaacaagaaccgggagatcctgcaggagatccagaggctgcggctggagcacgagcaggccagccagcccaccccagagaaggcccagcagaaccccaccctgctggccgagctgcggctgctgcggcagaggaaggatgagctggagcagaggatgtctgccctgcaggagagcagaagagagctgatggtgcagctggagggcctgatgaagctgctgaagacccagggcgccggcagccccaggagcagccccagccacaccatcagccggcccatccccatgcccatccgcagcgccagcgcctgcagcacccccacccacaccccccaggacagcctgactggagtgggcggagatgtgcaggaggcctttgcccagagcagcagaagaaacctgagaaatgacctgctggtggccgctgacagcatcaccaacaccatgagcagcctggtgaaggagctgaacagcgaggtgggcagcgagacagagagcaatgtggacagcgagtttgcccggacccagtttgaggacctggtgcccagccccaccagcgagaaggccttcctggcccagatccacgccaggaagccaggctacatccacagcggggccaccaccagcaccatgagaggagacatggtgacagaagatgctgacccctacgtgcagccagaagatgagaactatgaaaatgacagcgtgcggcagctggagaatgagctgcagatggaggagtacctgaagcagaagctgcaggatgaggcctaccaggtgtccctgcagggctag

SEQ ID NO: 150738 - DNA, 2232 bp, synthetic construct
  misc_feature 1..2232: note = Description of Artificial Sequence: Synthetic coding sequence
  source 1..2232: mol_type = other DNA
atgattgaagattctgggaagaggggcaacaccatggccgagcggcggcagctgtttgctgagatgagggcccaggacctggaccgcatccggctgagcacctacagaacagcctgcaagctgcgctttgtgcagaagaagtgcaacctgcacctggtggacatctggaatgtgattgaggccctgcgggagaatgccctgaacaacctggaccccaacacagagctgaatgtgtcccggctggaggccgtgctgagcaccatcttctaccagctgaacaagaggatgcccaccacccaccagatccacgtggagcagagcatcagcctgctgctgaacttcctgctggccgcctttgatcctgagggccacggcaagatctctgtgtttgctgtgaagatggccctggccaccctgtgtggcggcaagatcatggacaagctgcgctacatcttctccatgatcagtgacagcagtggagtgatggtgtatggccgctatgaccagttcctgcgggaggtgctgaagctgcccacagctgtgtttgagggccccagctttggctacacagagcagagcgcccggagctgcttcagccagcagaagaaggtgaccctgaatggcttcctggacaccctgatgtctgaccccccaccccagtgcctggtgtggctgcccctgctgcaccggctggccaacgtggagaatgtgttccaccctgtggagtgcagctactgccacagcgagagcatgatgggcttccgctaccgctgccagcagtgccacaactaccagctgtgccaggactgcttctggaggggccacgccggcggcagccacagcaaccagcaccagatgaaggagtacacctcctggaagagccctgccaagaagctgaccaatgccctgagcaagagcctgagctgtgccagcagccgggagcccctgcaccccatgtttcctgaccagcctgagaagcccctgaacctggcccacatcgtggacacctggccacccaggcctgtgacctccatgaatgacaccctcttcagccacagcgtgcccagcagcggcagccccttcatcaccaggagcagcccccccaaggacagcgaggtggagcagaacaagctgctggcccgggccgccccagccttcctgaagggcaagggcatccagtacagcctgaatgtggccgaccggctggctgatgagcacgtgctgattggcctgtatgtgaacatgctgaggaacaaccccagctgcatgctggagagcagcaaccggctggatgaggagcaccggctgattgcccgctatgctgcccggctggccgctgagagcagcagcagccagcccccccagcagaggtctgccccagacatctccttcaccattgatgccaacaagcagcagaggcagctgattgctgagctggagaacaagaaccgggagatcctgcaggagatccagaggctgcggctggagcacgagcaggccagccagcccaccccagagaaggcccagcagaaccccaccctgctggccgagctgcggctgctgcggcagaggaaggatgagctggagcagaggatgtctgccctgcaggagagcagaagagagctgatggtgcagctggagggcctgatgaagctgctgaagacccagggcgccggcagccccaggagcagccccagccacaccatcagccggcccatccccatgcccatccgcagcgccagcgcctgcagcacccccacccacaccccccaggacagcctgactggagtgggcggagatgtgcaggaggcctttgcccagagcagcagaagaaacctgagaaatgacctgctggtggccgctgacagcatcaccaacaccatgagcagcctggtgaaggagctgaacagcgaggtgggcagcgagacagagagcaatgtggacagcgagtttgcccggacccagtttgaggacctggtgcccagccccaccagcgagaaggccttcctggcccagatccacgccaggaagccaggctacatccacagcggggccaccaccagcaccatgagaggagacatggtgacagaagatgctgacccctacgtgcagccagaagatgagaactatgaaaatgacagcgtgcggcagctggagaatgagctgcagatggaggagtacctgaagcagaagctgcaggatgaggcctaccaggtgtccctgcagggctag

SEQ ID NO: 150739 - DNA, 2073 bp, synthetic construct
  misc_feature 1..2073: note = Description of Artificial Sequence: Synthetic coding sequence
  source 1..2073: mol_type = other DNA
atgattgaagattctgggaagaggggcaacaccatggccgagcggcggcagctgtttgctgagatgagggcccaggacctggaccgcatccggctgagcacctacagaacagcctgcaagctgcgctttgtgcagaagaagtgcaacctgcacctggtggacatctggaatgtgattgaggccctgcgggagaatgccctgaacaacctggaccccaacacagagctgaatgtgtcccggctggaggccgtgctgagcaccatcttctaccagctgaacaagaggatgcccaccacccaccagatccacgtggagcagagcatcagcctgctgctgaacttcctgctggccgcctttgatcctgagggccacggcaagatctctgtgtttgctgtgaagatggccctggccaccctgtgtggcggcaagatcatggacaagctgcgctacatcttctccatgatcagtgacagcagtggagtgatggtgtatggccgctatgaccagttcctgcgggaggtgctgaagctgcccacagctgtgtttgagggccccagctttggctacacagagcagagcgcccggagctgcttcagccagcagaagaaggtgaccctgaatggcttcctggacaccctgatgtctgaccccccaccccagtgcctggtgtggctgcccctgctgcaccggctggccaacgtggagaatgtgttccaccctgtggagtgcagctactgccacagcgagagcatgatgggcttccgctaccgctgccagcagtgccacaactaccagctgtgccaggactgcttctggaggggccacgccggcggcagccacagcaaccagcaccagatgaaggagtacacctcctggaagagccctgccaagaagctgaccaatgccctgagcaagagcctgagctgtgccagcagccgggagcccctgcaccccatgtttcctgaccagcctgagaagcccctgaacctggcccacatcgtgccccccaggcctgtgacctccatgaatgacaccctcttcagccacagcgtgcccagcagcggcagccccttcatcaccaggtccatgctggagagcagcaaccggctggatgaggagcaccggctgattgcccgctatgctgcccggctggccgctgagagcagcagcagccagcccccccagcagaggtctgccccagacatctccttcaccattgatgccaacaagcagcagaggcagctgattgctgagctggagaacaagaaccgggagatcctgcaggagatccagaggctgcggctggagcacgagcaggccagccagcccaccccagagaaggcccagcagaaccccaccctgctggccgagctgcggctgctgcggcagaggaaggatgagctggagcagaggatgtctgccctgcaggagagcagaagagagctgatggtgcagctggagggcctgatgaagctgctgaaggaggaggagctgaagcagggcacccagggcgccggcagccccaggagcagccccagccacaccatcagccggcccatccccatgcccatccgcagcgccagcgcctgcagcacccccacccacaccccccaggacagcctgactggagtgggcggagatgtgcaggaggcctttgcccagagcagcagaagaaacctgagaaatgacctgctggtggccgctgacagcatcaccaacaccatgagcagcctggtgaaggagctgaacagcgaggtgggcagcgagacagagagcaatgtggacagcgagtttgcccggacccagtttgaggacctggtgcccagccccaccagcgagaaggccttcctggcccagatccacgccaggaagccaggctacatccacagcggggccaccaccagcaccatgagaggagacatggtgacagaagatgctgacccctacgtgcagccagaagatgaaaattatgaaaatgattctgtgcggcagctggagaatgagctgcagatggaggagtacctgaagcagaagctgcaggatgaggcctaccaggtgtccctgcagggctag

SEQ ID NO: 150740 - DNA, 2061 bp, synthetic construct
  misc_feature 1..2061: note = Description of Artificial Sequence: Synthetic coding sequence
  source 1..2061: mol_type = other DNA
atgattgaagattctgggaagaggggcaacaccatggccgagcggcggcagctgtttgctgagatgagggcccaggacctggaccgcatccggctgagcacctacagaacagcctgcaagctgcgctttgtgcagaagaagtgcaacctgcacctggtggacatctggaatgtgattgaggccctgcgggagaatgccctgaacaacctggaccccaacacagagctgaatgtgtcccggctggaggccgtgctgagcaccatcttctaccagctgaacaagaggatgcccaccacccaccagatccacgtggagcagagcatcagcctgctgctgaacttcctgctggccgcctttgatcctgagggccacggcaagatctctgtgtttgctgtgaagatggccctggccaccctgtgtggcggcaagatcatggacaagctgcgctacatcttctccatgatcagtgacagcagtggagtgatggtgtatggccgctatgaccagttcctgcgggaggtgctgaagctgcccacagctgtgtttgagggccccagctttggctacacagagcagagcgcccggagctgcttcagccagcagaagaaggtgaccctgaatggcttcctggacaccctgatgtctgaccccccaccccagtgcctggtgtggctgcccctgctgcaccggctggccaacgtggagaatgtgttccaccctgtggagtgcagctactgccacagcgagagcatgatgggcttccgctaccgctgccagcagtgccacaactaccagctgtgccaggactgcttctggaggggccacgccggcggcagccacagcaaccagcaccagatgaaggagtacacctcctggaagagccctgccaagaagctgaccaatgccctgagcaagagcctgagctgtgccagcagccgggagcccctgcaccccatgtttcctgaccagcctgagaagcccctgaacctggcccacatcgtgtgcttccggccccccaggcctgtgacctccatgaatgacaccctcttcagccacagcgtgcccagcagcggcagccccttcatcaccaggtccatgctggagagcagcaaccggctggatgaggagcacaggctcatcgcccgctatgctgcccggctggccgctgagagcagcagcagccagcccccccagcagaggtctgccccagacatctccttcaccattgatgccaacaagcagcagaggcagctgattgctgagctggagaacaagaaccgggagatcctgcaggagatccagaggctgcggctggagcacgagcaggccagccagcccaccccagagaaggcccagcagaaccccaccctgctggccgagctgcggctgctgcggcagaggaaggatgagctggagcagaggatgtctgccctgcaggagagccggcgggagctgatggtgcagctggagggcctgatgaagctgctgaagacccagggcgccggcagccccaggagcagccccagccacaccatcagccggcccatccccatgcccatccgcagcgccagcgcctgcagcacccccacccacaccccccaggacagcctgactggagtgggcggagatgtgcaggaggcctttgcccagagcagcagaagaaacctgagaaatgacctgctggtggccgctgacagcatcaccaacaccatgagcagcctggtgaaggagctgaacagcgaggtgggcagcgagacagagagcaatgtggacagcgagtttgcccggacccagtttgaggacctggtgcccagccccaccagcgagaaggccttcctggcccagatccacgccaggaagccaggctacatccacagcggggccaccaccagcaccatgagaggagacatggtgacagaagatgctgacccctacgtgcagccagaagatgaaaattatgaaaatgattctgtgcggcagctggagaatgagctgcagatggaggagtacctgaagcagaagctgcaggatgaggcctaccaggtgtccctgcagggctag

SEQ ID NO: 150741 - DNA, 2232 bp, synthetic construct
  misc_feature 1..2232: note = Description of Artificial Sequence: Synthetic coding sequence
  source 1..2232: mol_type = other DNA
atgattgaagattctgggaagaggggcaacaccatggccgagcggcggcagctgtttgctgagatgagggcccaggacctggaccgcatccggctgagcacctacagaacagcctgcaagctgcgctttgtgcagaagaagtgcaacctgcacctggtggacatctggaatgtgattgaggccctgcgggagaatgccctgaacaacctggaccccaacacagagctgaatgtgtcccggctggaggccgtgctgagcaccatcttctaccagctgaacaagaggatgcccaccacccaccagatccacgtggagcagagcatcagcctgctgctgaacttcctgctggccgcctttgatcctgagggccacggcaagatctctgtgtttgctgtgaagatggccctggccaccctgtgtggcggcaagatcatggacaagctgcgctacatcttctccatgatcagtgacagcagtggagtgatggtgtatggccgctatgaccagttcctgcgggaggtgctgaagctgcccacagctgtgtttgagggccccagctttggctacacagagcagagcgcccggagctgcttcagccagcagaagaaggtgaccctgaatggcttcctggacaccctgatgtctgaccccccaccccagtgcctggtgtggctgcccctgctgcaccggctggccaacgtggagaatgtgttccaccctgtggagtgcagctactgccacagcgagagcatgatgggcttccgctaccgctgccagcagtgccacaactaccagctgtgccaggactgcttctggaggggccacgccggcggcagccacagcaaccagcaccagatgaaggagtacacctcctggaagagccctgccaagaagctgaccaatgccctgagcaagagcctgagctgtgccagcagccgggagcccctgcaccccatgtttcctgaccagcctgagaagcccctgaacctggcccacatcgtgtgcttccggccccccaggcctgtgacctccatgaatgacaccctcttcagccacagcgtgcccagcagcggcagccccttcatcaccaggagcagcccccccaaggacagcgaggtggagcagaacaagctgctggcccgggccgccccagccttcctgaagggcaagggcatccagtacagcctgaatgtggccgaccggctggctgatgagcacgtgctgattggcctgtatgtgaacatgctgaggaacaaccccagctgcatgctggagagcagcaaccggctggatgaggagcaccggctgattgcccgctatgctgcccggctggccgctgagagcagcagcagccagcccccccagcagaggtctgccccagacatctccttcaccattgatgccaacaagcagcagaggcagctgattgctgagctggagaacaagaaccgggagatcctgcaggagatccagaggctgcggctggagcacgagcaggccagccagcccaccccagagaaggcccagcagaaccccaccctgctggccgagctgcggctgctgcggcagaggaaggatgagctggagcagaggatgtctgccctgcaggagagcagaagagagctgatggtgcagctggagggcctgatgaagctgctgaagacccagggcgccggcagccccaggagcagccccagccacaccatcagccggcccatccccatgcccatccgcagcgccagcgcctgcagcacccccacccacaccccccaggacagcctgactggagtgggcggagatgtgcaggaggcctttgcccagagcagcagaagaaacctgagaaatgacctgctggtggccgctgacagcatcaccaacaccatgagcagcctggtgaaggagctgaacagcgaggtgggcagcgagacagagagcaatgtggacagcgagtttgcccggacccagtttgaggacctggtgcccagccccaccagcgagaaggccttcctggcccagatccacgccaggaagccaggctacatccacagcggggccaccaccagcaccatgagaggagacatggtgacagaagatgctgacccctacgtgcagccagaagatgagaactatgaaaatgacagcgtgcggcagctggagaatgagctgcagatggaggagtacctgaagcagaagctgcaggatgaggcctaccaggtgtccctgcagggctag

SEQ ID NO: 150742 - DNA, 2232 bp, synthetic construct; identical to SEQ ID NO: 150738
  misc_feature 1..2232: note = Description of Artificial Sequence: Synthetic coding sequence
  source 1..2232: mol_type = other DNA

SEQ ID NO: 150743 - DNA, 1176 bp, synthetic construct; identical to SEQ ID NO: 150737
  misc_feature 1..1176: note = Description of Artificial Sequence: Synthetic coding sequence
  source 1..1176: mol_type = other DNA

SEQ ID NO: 150744 - DNA, 1116 bp, synthetic construct; identical to SEQ ID NO: 150722
  misc_feature 1..1116: note = Description of Artificial Sequence: Synthetic coding sequence
  source 1..1116: mol_type = other DNA

SEQ ID NO: 150745 - DNA, 1794 bp, synthetic construct
  misc_feature 1..1794: note = Description of Artificial Sequence: Synthetic coding sequence
  source 1..1794: mol_type = other DNA
atgattgaggagagcggcaacaagaggaagaccatggccgagaagaggcagctgttcatcgagatgagggcccagaactttgatgtgatccggctgagcacctacagaacagcctgcaagctgcgctttgtgcagaagcgctgcaacctgcacctggtggacatctggaacatgattgaggccttccgggacaatggcctgaacaccctggaccacaccacagagatctctgtgtcccggctggagaccgtcatcagcagcatctactaccagctgaacaagaggctgcccagcacccaccagatctctgtggagcagagcatcagcctgctgctgaacttcatgattgctgcctatgattctgagggccggggcaagctgaccgtcttctctgtgaaggccatgctggccaccatgtgtggcggcaagatgctggacaagctgcgctacgtgttcagccagatgtctgacagcaatggcctgatgatcttcagcaagtttgaccagttcctgaaggaggtgctgaagctgcccacagctgtgtttgagggccccagctttggctacacagagcacagcgtgaggacctgcttcccccagcagaggaagatcatgctgaacatgttcctggacaccatgatggctgaccccccaccccagtgcctggtgtggctgcccctgatgcaccggctggcccacgtggagaatgtgttccaccctgtggagtgcagctactgccgctgtgagagcatgatgggcttccgctaccgctgccagcagtgccacaactaccagctgtgccagaactgcttctggaggggccacgccggcggcccccacagcaaccagcaccagatgaaggagcacagctcctggaagagccctgccaagaagctgagccacgccatcagcaagagcctgggctgtgtgcccacccgggagcccccccaccctgtgtttcctgagcagcctgagaagcccctggacctggcccacatcgtgcccccccggcccctgaccaacatgaatgacaccatggtgagccacatgagcagcggcgtgcccacccccaccaagaggctgcagtacagccaggacatccccagccacctggctgatgaacatgccctgattgccagctatgtggcccggctgcagcactgtgcccgggtgctggacagccccagccggctggatgaggagcaccggctgattgcccgctatgctgcccggctggccgctgaggccggaaatgtgacccggcccccaacagacctgtccttcaactttgatgccaacaagcagcagaggcagctgattgctgagctggagaacaagaaccgggagatcctgcaggagatccagaggctgcggctggagcacgagcaggccagccagcccaccccagagaaggcccagcagaaccccaccctgctggccgagctgcggctgctgcggcagaggaaggatgagctggagcagaggatgtctgccctgcaggagagcagaagagagctgatggtgcagctggaggagctgatgaagctgctgaaggaggccgaggcccgggagagcgcccaggccaccggcagcccccacaccagccccacccacggcggcggccggcccatgcccatgcctgtgcgcagcaccagcgctggcagcacccccacccactgcccccaggacagcctgagcggcgtgggcggagatgtgcaggaggcctttgcccaggccgaggagggcgctgaggaggaggaggagaagatgcagaatggcaaggaccggggctag

SEQ ID NO: 150746 - DNA, 567 bp, synthetic construct
  misc_feature 1..567: note = Description of Artificial Sequence: Synthetic coding sequence
  source 1..567: mol_type = other DNA
atgattgaggagagcggcaacaagaggaagaccatggccgagaagaggcagctgttcatcgagatgagggcccagaactttgatgtgatccggctgagcacctacagaacagcctgcaagctgcgctttgtgcagaagcgctgcaacctgcacctggtggacatctggaacatgattgaggccttccgggacaatggcctgaacaccctggaccacaccacagagatctctgtgtcccggctggagaccgtcatcagcagcatctactaccagctgaacaagaggctgcccagcacccaccagatctctgtggagcagagcatcagcctgctgctgaacttcatgattgctgcctatgattctgagggccggggcaagctgaccgtcttctctgtgaaggccatgctggccaccatgtgtggcggcaagatgctggacaagctgcgctacgtgttcagccagatgtctgacagcaatggcctgatgatcttcagcaagtttgaccagttcctgaaggaggtgctgaagctgcccacagctgtgtttgagggccccagctttggatag

SEQ ID NO: 150747 - DNA, 399 bp, synthetic construct
  misc_feature 1..399: note = Description of Artificial Sequence: Synthetic coding sequence
  source 1..399: mol_type = other DNA
atgattgaggagagcggcaacaagaggaagaccatggccgagaagaggcagctgttcatcgagatgagggcccagaactttgatgtgatccggctgagcacctacagaacagcctgcaagctgcgctttgtgcagaagcgctgcaacctgcacctggtggacatctggaacatgattgaggccttccgggacaatggcctgaacaccctggaccacaccacagagatctctgtgtcccggctggagaccgtcatcagcagcatctactaccagctgaacaagaggctgcccagcacccaccagatctctgtggagcagagcatcagcctgctgctgaacttcatgattgctgcctatgattctgagggccggggcaagctgaccgtcttctctgtgtag

SEQ ID NO: 150748 - DNA, 450 bp, synthetic construct
  misc_feature 1..450: note = Description of Artificial Sequence: Synthetic coding sequence
  source 1..450: mol_type = other DNA
atgattgaggagagcggcaacaagaggaagaccatggccgagaagaggcagctgttcatcgagatgagggcccagaactttgatgtgatccggctgagcacctacagaacagcctgcaagctgcgctttgtgcagaagcgctgcaacctgcacctggtggacatctggaacatgattgaggccttccgggacaatggcctgaacaccctggaccacaccacagagatctctgtgtcccggctggagaccgtcatcagcagcatctactaccagctgaacaagaggctgcccagcacccaccagatctctgtggagcagagcatcagcctgctgctgaacttcatgattgctgcctatgattctgagggccggggcaagctgaccgtcttctctgtgaaggccatgctggccaccatgtgtggcggcaagatgctggacaagctgaggtag

SEQ ID NO: 150749 - DNA, 1794 bp, synthetic construct
  misc_feature 1..1794: note = Description of Artificial Sequence: Synthetic coding sequence
  source 1..1794: mol_type = other DNA
atgattgaggagagcggcaacaagaggaagaccatggccgagaagaggcagctgttcatcgagatgagggcccagaactttgatgtgatccggctgagcacctacagaacagcctgcaagctgcgctttgtgcagaagcgctgcaacctgcacctggtggacatctggaacatgattgaggccttccgggacaatggcctgaacaccctggaccacaccacagagatctctgtgtcccggctggagaccgtcatcagcagcatctactaccagctgaacaagaggctgcccagcacccaccagatctctgtggagcagagcatcagcctgctgctgaacttcatgattgctgcctatgattctgagggccggggcaagctgaccgtcttctctgtgaaggccatgctggccaccatgtgtggcggcaagatgctggacaagctgcgctacgtgttcagccagatgtctgacagcaatggcctgatgatcttcagcaagtttgaccagttcctgaaggaggtgctgaagctgcccacagctgtgtttgagggccccagctttggctacacagagcacagcgtgaggacctgcttcccccagcagaggaagatcatgctgaacatgttcctggacaccatgatggctgaccccccaccccagtgcctggtgtggctgcccctgatgcaccggctggcccacgtggagaatgtgttccaccctgtggagtgcagctactgccgctgtgagagcatgatgggcttccgctaccgctgccagcagtgccacaactaccagctgtgccagaactgcttctggaggggccacgccggcggcccccacagcaaccagcaccagatgaaggagcacagctcctggaagagccctgccaagaagctgagccacgccatcagcaagagcctgggctgtgtgcccacccgggagcccccccaccctgtgtttcctgagcagcctgagaagcccctggacctggcccacatcgtgcccccccggcccctgaccaacatgaatgacaccatggtgagccacatgagcagcggcgtgcccacccccaccaagaggctgcagtacagccaggacatccccagccacctggctgatgaacatgccctgattgccagctatgtggcccggctgcagcactgtgcccgggtgctggacagccccagccggctggatgaggagcaccggctgattgcccgctatgctgcccggctggccgctgaggccggaaatgtgacccggcccccaacagacctgtccttcaactttgatgccaacaagcagcagaggcagctgattgctgagctggagaacaagaaccgggagatcctgcaggagatccagaggctgcggctggagcacgagcaggccagccagcccaccccagagaaggcccagcagaaccccaccctgctggccgagctgcggctgctgcggcagaggaaggatgagctggagcagaggatgtctgccctgcaggagagcagaagagagctgatggtgcagctggaggagctgatgaagctgctgaaggaggaggagcagaagcaggccgcccaggccaccggcagcccccacaccagccccacccacggcggcggccggcccatgcccatgcctgtgcgcagcaccagcgctggcagcacccccacccactgcccccaggacagcctgagcggcgtgggcggagatgtgcaggaggcctttgcccaggccgaggagggcgctgaggaggaggaggagaagatgcagaatggcaaggaccggggctag

SEQ ID NO: 150750 - DNA, 1683 bp, synthetic construct
  misc_feature 1..1683: note = Description of Artificial Sequence: Synthetic coding sequence
  source 1..1683: mol_type = other DNA
atgattgaggagagcggcaacaagaggaagaccatggccgagaagaggcagctgttcatcgagatgagggcccagaactttgatgtgatccggctgagcacctacagaacagcctgcaagctgcgctttgtgcagaagcgctgcaacctgcacctggtggacatctggaacatgattgaggccttccgggacaatggcctgaacaccctggaccacaccacagagatctctgtgtcccggctggagaccgtcatcagcagcatctactaccagctgaacaagaggctgcccagcacccaccagatctctgtggagcagagcatcagcctgctgctgaacttcatgattgctgcctatgattctgagggccggggcaagctgaccgtcttctctgtgaaggccatgctggccaccatgtgtggcggcaagatgctggacaagctgcgctacgtgttcagccagatgtctgacagcaatggcctgatgatcttcagcaagtttgaccagttcctgaaggaggtgctgaagctgcccacagctgtgtttgagggccccagctttggctacacagagcacagcgtgaggacctgcttcccccagcagaggaagatcatgctgaacatgttcctggacaccatgatggctgaccccccaccccagtgcctggtgtggctgcccctgatgcaccggctggcccacgtggagaatgtgttccaccctgtggagtgcagctactgccgctgtgagagcatgatgggcttccgctaccgctgccagcagtgccacaactaccagctgtgccagaactgcttctggaggggccacgccggcggcccccacagcaaccagcaccagatgaaggagcacagctcctggaagagccctgccaagaagctgagccacgccatcagcaagagcctgggctgtgtgcccacccgggagcccccccaccctgtgtttcctgagcagcctgagaagcccctggacctggcccacatcgtgcccccccggcccctgaccaacatgaatgacaccatggtgagccacatgagcagcggcgtgcccacccccaccaagtctgtgctggacagccccagccggctggatgaggagcaccggctgattgcccgctatgctgcccggctggccgctgaggccggaaatgtgacccggcccccaacagacctgtccttcaactttgatgccaacaagcagcagaggcagctgattgctgagctggagaacaagaaccgggagatcctgcaggagatccagaggctgcggctggagcacgagcaggccagccagcccaccccagagaaggcccagcagaaccccaccctgctggccgagctgcggctgctgcggcagaggaaggatgagctggagcagaggatgtctgccctgcaggagagcagaagagagctgatggtgcagctggaggagctgatgaagctgctgaaggcccaggccaccggcagcccccacaccagccccacccatggaggcggccggcccatgcccatgcctgtgcgcagcaccagcgctggcagcacccccacccactgcccccaggacagcctgtctggagtgggcggagatgtgcaggaggcctttgcccaggccgaggagggcgctgaggaggaggaggagaagatgcagaatggcaaggaccggggctag

SEQ ID NO: 150751 - DNA, 1884 bp, synthetic construct
  misc_feature 1..1884: note = Description of Artificial Sequence: Synthetic coding sequence
  source 1..1884: mol_type = other DNA
atgattgaggagagcggcaacaagaggaagaccatggccgagaagaggcagctgttcatcgagatgagggcccagaactttgatgtgatccggctgagcacctacagaacagcctgcaagctgcgctttgtgcagaagcgctgcaacctgcacctggtggacatctggaacatgattgaggccttccgggacaatggcctgaacaccctggaccacaccacagagatctctgtgtcccggctggagaccgtcatcagcagcatctactaccagctgaacaagaggctgcccagcacccaccagatctctgtggagcagagcatcagcctgctgctgaacttcatgattgctgcctatgattctgagggccggggcaagctgaccgtcttctctgtgaaggccatgctggccaccatgtgtggcggcaagatgctggacaagctgcgctacgtgttcagccagatgtctgacagcaatggcctgatgatcttcagcaagtttgaccagttcctgaaggaggtgctgaagctgcccacagctgtgtttgagggccccagctttggctacacagagcacagcgtgaggacctgcttcccccagcagaggaagatcatgctgaacatgttcctggacaccatgatggctgaccccccaccccagtgcctggtgtggctgcccctgatgcaccggctggcccacgtggagaatgtgttccaccctgtggagtgcagctactgccgctgtgagagcatgatgggcttccgctaccgctgccagcagtgccacaactaccagctgtgccagaactgcttctggaggggccacgccggcggcccccacagcaaccagcaccagatgaaggagcacagctcctggaagagccctgccaagaagctgagccacgccatcagcaagagcctgggctgtgtgcccacccgggagcccccccaccctgtgtttcctgagcagcctgagaagcccctggacctggcccacatcgtgcccccccggcccctgaccaacatgaatgacaccatggtgagccacatgagcagcggcgtgcccacccccaccaagaggctgcagtacagccaggacatccccagccacctggctgatgaacatgccctgattgccagctatgtggcccggctgcagcactgtgcccgggtgctggacagccccagccggctggatgaggagcaccggctgattgcccgctatgctgcccggctggccgctgaggccggaaatgtgacccggcccccaacagacctgtccttcaactttgatgccaacaagcagcagaggcagctgattgctgagctggagaacaagaaccgggagatcctgcaggagatccagaggctgcggctggagcacgagcaggccagccagcccaccccagagaaggcccagcagaaccccaccctgctggccgagctgcggctgctgcggcagaggaaggatgagctggagcagaggatgtctgccctgcaggagagcagaagagagctgatggtgcagctggaggagctgatgaagctgctgaaggaggaggagcagaagcaggccgcccaggccaccggcagcccccacaccagccccacccacggcggcggccggcccatgcccatgcctgtgcgcagcaccagcgctggcagcacccccacccactgcccccaggacagcctgagcggcgtgggcggagatgtgcaggaggcctttgcccagggcaccaggaggaacctgagaaatgacctgctggtggccgctgacagcatcaccaacaccatgagcagcctggtgaaggagctgcacagcgctgaggagggcgctgaggaggaggaggagaagatgcagaatggcaaggaccggggctag

SEQ ID NO: 150752 - DNA, 1704 bp, synthetic construct
  misc_feature 1..1704: note = Description of Artificial Sequence: Synthetic coding sequence
  source 1..1704: mol_type = other DNA
atgattgaggagagcggcaacaagaggaagaccatggccgagaagaggcagctgttcatcgagatgagggcccagaactttgatgtgatccggctgagcacctacagaacagcctgcaagctgcgctttgtgcagaagcgctgcaacctgcacctggtggacatctggaacatgattgaggccttccgggacaatggcctgaacaccctggaccacaccacagagatctctgtgtcccggctggagaccgtcatcagcagcatctactaccagctgaacaagaggctgcccagcacccaccagatctctgtggagcagagcatcagcctgctgctgaacttcatgattgctgcctatgattctgagggccggggcaagctgaccgtcttctctgtgaaggccatgctggccaccatgtgtggcggcaagatgctggacaagctgcgctacgtgttcagccagatgtctgacagcaatggcctgatgatcttcagcaagtttgaccagttcctgaaggaggtgctgaagctgcccacagctgtgtttgagggccccagctttggctacacagagcacagcgtgaggacctgcttcccccagcagaggaagatcatgctgaacatgttcctggacaccatgatggctgaccccccaccccagtgcctggtgtggctgcccctgatgcaccggctggcccacgtggagaatgtgttccaccctgtggagtgcagctactgccgctgtgagagcatgatgggcttccgctaccgctgccagcagtgccacaactaccagctgtgccagaactgcttctggaggggccacgccggcggcccccacagcaaccagcaccagatgaaggagcacagctcctggaagagccctgccaagaagctgagccacgccatcagcaagagcctgggctgtgtgcccacccgggagcccccccaccctgtgtttcctgagcagcctgagaagcccctggacctggcccacatcgtgcccccccggcccctgaccaacatgaatgacaccatggtgagccacatgagcagcggcgtgcccacccccaccaagtctgtgctggacagccccagccggctggatgaggagcaccggctgattgcccgctatgctgcccggctggccgctgaggccggaaatgtgacccggcccccaacagacctgtccttcaactttgatgccaacaagcagcagaggcagctgattgctgagctggagaacaagaaccgggagatcctgcaggagatccagaggctgcggctggagcacgagcaggccagccagcccaccccagagaaggcccagcagaaccccaccctgctggccgagctgcggctgctgcggcagaggaaggatgagctggagcagaggatgtctgccctgcaggagagcagaagagagctgatggtgcagctggaggagctgatgaagctgctgaaggaggaggagcagaagcaggccgcccaggccaccggcagcccccacaccagccccacccacggcggcggccggcccatgcccatgcctgtgcgcagcaccagcgctggcagcacccccacccactgcccccaggacagcctgagcggcgtgggcggagatgtgcaggaggcctttgcccaggccgaggagggcgctgaggaggaggaggagaagatgcagaatggcaaggaccggggctag

SEQ ID NO: 150753 - DNA, 1773 bp, synthetic construct
  misc_feature 1..1773: note = Description of Artificial Sequence: Synthetic coding sequence
  source 1..1773: mol_type = other DNA
atgattgaggagagcggcaacaagaggaagaccatggccgagaagaggcagctgttcatcgagatgagggcccagaactttgatgtgatccggctgagcacctacagaacagcctgcaagctgcgctttgtgcagaagcgctgcaacctgcacctggtggacatctggaacatgattgaggccttccgggacaatggcctgaacaccctggaccacaccacagagatctctgtgtcccggctggagaccgtcatcagcagcatctactaccagctgaacaagaggctgcccagcacccaccagatctctgtggagcagagcatcagcctgctgctgaacttcatgattgctgcctatgattctgagggccggggcaagctgaccgtcttctctgtgaaggccatgctggccaccatgtgtggcggcaagatgctggacaagctgcgctacgtgttcagccagatgtctgacagcaatggcctgatgatcttcagcaagtttgaccagttcctgaaggaggtgctgaagctgcccacagctgtgtttgagggccccagctttggctacacagagcacagcgtgaggacctgcttcccccagcagaggaagatcatgctgaacatgttcctggacaccatgatggctgaccccccaccccagtgcctggtgtggctgcccctgatgcaccggctggcccacgtggagaatgtgttccaccctgtggagtgcagctactgccgctgtgagagcatgatgggcttccgctaccgctgccagcagtgccacaactaccagctgtgccagaactgcttctggaggggccacgccggcggcccccacagcaaccagcaccagatgaaggagcacagctcctggaagagccctgccaagaagctgagccacgccatcagcaagagcctgggctgtgtgcccacccgggagcccccccaccctgtgtttcctgagcagcctgagaagcccctggacctggcccacatcgtgcccccccggcccctgaccaacatgaatgacaccatggtgagccacatgagcagcggcgtgcccacccccaccaagtctgtgctggacagccccagccggctggatgaggagcaccggctgattgcccgctatgctgcccggctggccgctgaggccggaaatgtgacccggcccccaacagacctgtccttcaactttgatgccaacaagcagcagaggcagctgattgctgagctggagaacaagaaccgggagatcctgcaggagatccagaggctgcggctggagcacgagcaggccagccagcccaccccagagaaggcccagcagaaccccaccctgctggccgagctgcggctgctgcggcagaggaaggatgagctggagcagaggatgtctgccctgcaggagagcagaagagagctgatggtgcagctggaggagctgatgaagctgctgaaggcccaggccaccggcagcccccacaccagccccacccatggaggcggccggcccatgcccatgcctgtgcgcagcaccagcgctggcagcacccccacccactgcccccaggacagcctgtctggagtgggcggagatgtgcaggaggcctttgcccagggcaccaggaggaacctgagaaatgacctgctggtggccgctgacagcatcaccaacaccatgagcagcctggtgaaggagctgcacagcgctgaggagggcgctgaggaggaggaggagaagatgcagaatggcaaggaccggggctag

SEQ ID NO: 150754 - DNA, 1830 bp, synthetic construct
  misc_feature 1..1830: note = Description of Artificial Sequence: Synthetic coding sequence
  source 1..1830: mol_type = other DNA
atgattgaggagagcggcaacaagaggaagaccatggccgagaagaggcagctgttcatcgagatgagggcccagaactttgatgtgatccggctgagcacctacagaacagcctgcaagctgcgctttgtgcagaagcgctgcaacctgcacctggtggacatctggaacatgattgaggccttccgggacaatggcctgaacaccctggaccacaccacagagatctctgtgtcccggctggagaccgtcatcagcagcatctactaccagctgaacaagaggctgcccagcacccaccagatctctgtggagcagagcatcagcctgctgctgaacttcatgattgctgcctatgattctgagggccggggcaagctgaccgtcttctctgtgaaggccatgctggccaccatgtgtggcggcaagatgctggacaagctgcgctacgtgttcagccagatgtctgacagcaatggcctgatgatcttcagcaagtttgaccagttcctgaaggaggtgctgaagctgcccacagctgtgtttgagggccccagctttggctacacagagcacagcgtgaggacctgcttcccccagcagaggaagatcatgctgaacatgttcctggacaccatgatggctgaccccccaccccagtgcctggtgtggctgcccctgatgcaccggctggcccacgtggagaatgtgttccaccctgtggagtgcagctactgccgctgtgagagcatgatgggcttccgctaccgctgccagcagtgccacaactaccagctgtgccagaactgcttctggaggggccacgccggcggcccccacagcaaccagcaccagatgaaggagcacagctcctggaagagccctgccaagaagctgagccacgccatcagcaagagcctgggctgtgtgcccacccgggagcccccccaccctgtgtttcctgagcagcctgagaagcccctggacctggcccacatcgtgcccccccggcccctgaccaacatgaatgacaccatggtgagccacatgagcagcggcgtgcccacccccaccaagaggctgcagtacagccaggacatccccagccacctggctgatgaacatgccctgattgccagctatgtggcccggctgcagcactgtgcccgggtgctggacagccccagccggctggatgaggagcaccggctgattgcccgctatgctgcccggctggccgctgaggccggaaatgtgacccggcccccaacagacctgtccttcaactttgatgccaacaagcagcagaggcagctgattgctgagctggagaacaagaaccgggagatcctgcaggagatccagaggctgcggctggagcacgagcaggccagccagcccaccccagagaaggcccagcagaaccccaccctgctggccgagctgcggctgctgcggcagaggaaggatgagctggagcagaggatgtctgccctgcaggagagcagaagagagctgatggtgcagctggaggagctgatgaagctgctgaaggaggaggagcagaagcaggccgcccaggccaccggcagcccccacaccagccccacccacggcggcggccggcccatgcccatgcctgtgcgcagcaccagcgctggcagcacccccacccactgcccccaggacagcctgagcggcgtgggcggagatgtgcaggaggcctttgcccagggcaccaggaggaacctgagaaatgacctgctggtggccgctgacagcatcaccaacaccatgagcagcctggtgaaggagctgcacagcggctag

SEQ ID NO: 150755 - DNA, 1638 bp, synthetic construct
  misc_feature 1..1638: note = Description of Artificial Sequence: Synthetic coding sequence
  source 1..1638: mol_type = other DNA
atgattgaggccttccgggacaatggcctgaacaccctggaccacaccacagagatctctgtgtcccggctggagaccgtcatcagcagcatctactaccagctgaacaagaggctgcccagcacccaccagatctctgtggagcagagcatcagcctgctgctgaacttcatgattgctgcctatgacagcgagggccggggcaagctgactgtgttttctgtgaaggccatgctggccaccatgtgtggcggcaagatgctggacaagctgcgctacgtgttcagccagatgtctgacagcaatggcctgatgatcttcagcaagtttgaccagttcctgaaggaggtgctgaagctgcccacagctgtgtttgagggccccagctttggctacacagagcacagcgtgaggacctgcttcccccagcagaggaagatcatgctgaacatgttcctggacaccatgatggctgaccccccaccccagtgcctggtgtggctgcccctgatgcaccggctggcccacgtggagaatgtgttccaccctgtggagtgcagctactgccgctgtgagagcatgatgggcttccgctaccgctgccagcagtgccacaactaccagctgtgccagaactgcttctggaggggccatgctgggggcccccacagcaaccagcaccagatgaaggagcacagctcctggaagagccctgccaagaagctgagccacgccatcagcaagagcctgggctgtgtgcccacccgggagcccccccaccctgtgtttcctgagcagcctgagaagcccctggacctggcccacatcgtgcccccccggcccctgaccaacatgaatgacaccatggtgagccacatgagcagtggagtgcccacccccaccaagaggctgcagtacagccaggacatccccagccacctggctgatgagcacgccctgattgccagctatgtggcccggctgcagcactgtgcccgggtgctggacagccccagccggctggatgaggagcacaggctcatcgcccgctatgctgcccggctggccgctgaggccggaaatgtgaccaggcctcccacagacctgtccttcaactttgatgccaacaagcagcagaggcagctgattgctgagctggagaacaagaaccgggagatcctgcaggagatccagaggctgcggctggagcacgagcaggccagccagcccaccccagagaaggcccagcagaaccccaccctgctggccgagctgcggctgctgcggcagaggaaggatgagctggagcagaggatgtctgccctgcaggagagccggcgggagctgatggtgcagctggaggagctgatgaagctgctgaaggcccaggccaccggcagcccccacaccagccccacccacggcggcggccggcccatgcccatgcctgtgcgcagcaccagcgctggcagcacccccacccactgcccccaggacagcctgagcggcgtgggcggagatgtgcaggaggcctttgcccagggcaccaggaggaacctgagaaatgacctgctggtggccgctgacagcatcaccaacaccatgagcagcctggtgaaggagctgcacagcggctag

SEQ ID NO: 150756 - DNA, 960 bp, synthetic construct
  misc_feature 1..960: note = Description of Artificial Sequence: Synthetic coding sequence
  source 1..960: mol_type = other DNA
atgacagatgtgttcagccagatgtctgacagcaatggcctgatgatcttcagcaagtttgaccagttcctgaaggaggtgctgaagctgcccacagctgtgtttgagggccccagctttggctacacagagcacagcgtgaggacctgcttcccccagcagaggaagatcatgctgaacatgttcctggacaccatgatggctgaccccccaccccagtgcctggtgtggctgcccctgatgcaccggctggcccacgtggagaatgtgttccaccctgtggagtgcagctactgccgctgtgagagcatgatgggcttccgctaccgctgccagcagtgccacaactaccagctgtgccagaactgcttctggaggggccatgctgggggcccccacagcaaccagcaccagatgaaggagcacagctcctggaagagccctgccaagaagctgagccacgccatcagcaagagcctgggctgtgtgcccacccgggagcccccccaccctgtgtttcctgagcagcctgagaagcccctggacctggcccacatcgtgcccccccggcccctgaccaacatgaatgacaccatggtgagccacatgagcagtggagtgcccacccccaccaagaggctgcagtacagccaggacatccccagccacctggctgatgagcacgccctgattgccagctatgtggcccggctgcagcactgtgcccgggtgctggacagccccagccggctggatgaggagcacaggctcatcgcccgctatgctgcccggctggccgctgaggccggaaatgtgaccaggcctcccacagacctgtccttcaactttgatgccaacaagcagcagaggcagctgattgctgagctggagaacaagaaccgggagatcctgcaggagatccagaggctgcggctggagcacgagcaggccagccagtag

SEQ ID NO: 150757 - DNA, 1251 bp, synthetic construct
  misc_feature 1..1251: note = Description of Artificial Sequence: Synthetic coding sequence
  source 1..1251: mol_type = other DNA
atgctgaacatgttcctggacaccatgatggctgaccccccaccccagtgcctggtgtggctgcccctgatgcaccggctggcccacgtggagaatgtgttccaccctgtggagtgcagctactgccgctgtgagagcatgatgggcttccgctaccgctgccagcagtgccacaactaccagctgtgccagaactgcttctggaggggccacgccggcggcccccacagcaaccagcaccagatgaaggagcacagctcctggaagagccctgccaagaagctgagccacgccatcagcaagagcctgggctgtgtgcccacccgggagcccccccaccctgtgtttcctgagcagcctgagaagcccctggacctggcccacatcgtgcccccccggcccctgaccaacatgaatgacaccatggtgagccacatgagcagcggcgtgcccacccccaccaagaggctgcagtacagccaggacatccccagccacctggctgatgaacatgccctgattgccagctatgtggcccggctgcagcactgtgcccgggtgctggacagccccagccggctggatgaggagcaccggctgattgcccgctatgctgcccggctggccgctgaggccggaaatgtgacccggcccccaacagacctgtccttcaactttgatgccaacaagcagcagaggcagctgattgctgagctggagaacaagaaccgggagatcctgcaggagatccagaggctgcggctggagcacgagcaggccagccagcccaccccagagaaggcccagcagaaccccaccctgctggccgagctgcggctgctgcggcagaggaaggatgagctggagcagaggatgtctgccctgcaggagagcagaagagagctgatggtgcagctggaggagctgatgaagctgctgaaggcccaggccaccggcagcccccacaccagccccacccatggaggcggccggcccatgcccatgcctgtgcgcagcaccagcgctggcagcacccccacccactgcccccaggacagcctgtctggagtgggcggagatgtgcaggaggcctttgcccagggcaccaggaggaacctgagaaatgacctgctggtggccgctgacagcatcaccaacaccatgagcagcctggtgaaggagctgcacagcgctgaggagggcgctgaggaggaggaggagaagatgcagaatggcaaggaccggggctag

SEQ ID NO: 150758 - DNA, 2688 bp, synthetic construct
  misc_feature 1..2688: note = Description of Artificial Sequence: Synthetic coding sequence
  source 1..2688: mol_type = other DNA
atgaggatgtctgtgggcctgagcctgctgctgcccctgagcggccgcaccttcctgctgctgctgtctgtggtgatggcccagagccactggcccagcgagcccagcgaggccgtgcgggactgggagaaccagctggaggcctccatgcacagcgtgctgagtgacctgcacgaggccgtgcccaccgtggtgggcatcccagatggaacagctgtggtgggccgctccttccgggtgaccatccccacagacctgattgccagcagcggggacatcatcaaggtgtctgctgctgggaaggaggccctgcccagctggctgcactgggacagccagagccacaccctggagggcctgcccctggacacagacaagggcgtgcactacatctctgtgtctgccacccggctgggcgccaacggcagccacatcccccagaccagcagcgtcttcagcattgaggtgtacccagaggaccacagcgagctgcagagcgtgaggacagccagcccagaccccggggaggtggtgagcagcgcctgtgccgcagatgagcctgtgacagtgctgaccgtcatcctggatgctgacctgaccaagatgacccccaagcagagaattgacctgctgcacaggatgaggagcttcagcgaggtggagctgcacaacatgaagctggtgcctgtggtgaacaacagactctttgacatgtctgccttcatggccggccctggaaatgccaagaaggtggtggagaatggagccctgctgtcctggaagctgggctgcagcctgaaccagaacagcgtgcctgacatccatggagtggaggccccagcccgggagggcgccatgtctgcccagctgggctaccctgtggtgggctggcacatcgccaacaagaagccacccctgcccaagagggtgcggcggcagatccacgccacccccacccctgtgacagccatcggcccccccaccacagccatccaggagccccccagccgcatcgtgcccacccccaccagccctgccatcgccccacccacagagaccatggcccctcctgtgcgggaccctgtgcctgggaagcccaccgtgaccatccgcaccaggggggccatcatccagacccccaccctgggccccatccagcccaccagggtgtctgaggccggcaccaccgtgcccggccagatccggcccaccatgaccatccctggctacgtggagcccacagctgtggccaccccacccaccaccaccaccaagaagccccgggtgtccacccccaagccagccacccccagcacagacagcaccaccaccaccacccggcggcccaccaagaagcccaggacccccaggcctgtgccccgggtgaccaccaaggtgtccatcacccggctggagacagccagcccccccacccgcatccgcaccaccaccagcggcgtgccccggggcggggagcccaaccagaggcctgagctgaagaaccacatcgacagagtggatgcctgggtgggcacctactttgaggtgaagatccccagcgacaccttctatgaccacgaggacaccaccacagacaagctgaagctgaccctgaagctgcgggagcagcagctggtgggggagaagtcctgggtgcagttcaacagcaacagccagctgatgtatggcctgcctgacagcagccacgtgggcaagcatgagtacttcatgcacgccacagacaagggcggcctgtctgctgtggatgcctttgagatccacgtgcacagaagaccccagggcgaccgggccccagcccgcttcaaggccaagtttgtgggggaccctgccctggtgctgaatgacatccacaagaagatcgccctggtgaagaagctggcctttgcctttggagacaggaactgcagcaccatcaccctgcagaacatcacccggggcagcatcgtggtggagtggaccaacaacaccctgcccctggagccctgccccaaggagcagattgctggcctgagcagaagaattgctgaagatgatggcaagcccaggcctgccttcagcaatgccctggagccagacttcaaggccaccagcatcaccgtgacaggcagcggcagctgccgccacctgcagttcatccctgtggtgcccccaagaagagtgcccagcgaggccccacccacagaggtgcctgaccgggaccctgagaagagcagtgaagatgatgtgtacctgcacacagtcatcccagctgtggtggtggccgccatcctgctgattgctggcatcatcgccatgatctgctacaggaagaagaggaagggcaagctgaccctggaggaccaggccaccttcatcaagaagggcgtgcccatcatctttgctgatgagctggatgacagcaagcccccacccagcagctccatgcccctcatcctgcaggaggagaaggcccccctgcccccacctgagtaccccaaccagagcgtgcctgagaccacccccctgaaccaggacaccatgggagagtacacccccctgagagatgaggaccccaatgccccaccctaccagcccccaccacccttcaccgcccccatggagggcaagggcagccggcccaagaacatgaccccctaccgcagccccccaccctacgtgcccccatag

SEQ ID NO: 150759 - DNA, 432 bp, synthetic construct
  misc_feature 1..432: note = Description of Artificial Sequence: Synthetic coding sequence
  source 1..432: mol_type = other DNA
atgacccccaagcagagaattgacctgctgcacaggatgaggagcttcagcgaggtggagctgcacaacatgaagctggtgcctgtggtgaacaaccggctgtttgacatgtctgccttcatggccggccctggaaatgccaagaaggtggtggagaatggagccctgctgtcctggaagctgggctgcagcctgaaccagaacagcgtgcctgacatccacggcgtggaggccccagcccgggagggcgccatgtctgcccagctgggctaccctgtggtgggctggcacatcgccaacaagaagcccccagccctgagcggcccccccaagccccagagctcctggagggactttggagacttcttcatcttcatcttctgcctgacagccttcggcctcttcatcgagaacagcagcctgcacttctag

SEQ ID NO: 150760 - DNA, 267 bp, synthetic construct
  misc_feature 1..267: note = Description of Artificial Sequence: Synthetic coding sequence
  source 1..267: mol_type = other DNA
atgaggatgtctgtgggcctgagcctgctgctgcccctgagcggccgcaccttcctgctgctgctgtctgtggtgatggcccagagccactggcccagcgagcccagcgaggccgtgcgggactgggagaaccagctggaggcctccatgcacagcgtgctgagtgacctgcacgaggccgtgcccaccgtggtgggcatcccagatggaacagctgtggtgggccgctccttccgggtgaccatccccacagacctgattgcctag

SEQ ID NO: 150761 - DNA, 48 bp, synthetic construct
  misc_feature 1..48: note = Description of Artificial Sequence: Synthetic coding sequence
  source 1..48: mol_type = other DNA
atgaggatgtctgtgggcctgagcctgctgctgcccctgagcggctag

SEQ ID NO: 150762 - DNA, 321 bp, synthetic construct
  misc_feature 1..321: note = Description of Artificial Sequence: Synthetic coding sequence
  source 1..321: mol_type = other DNA
atgaggatgtctgtgggcctgagcctgctgctgcccctgagcggccgcaccttcctgctgctgctgtctgtggtgatggcccagagccactggcccagcgagcccagcgaggccgtgcgggactgggagaaccagctggaggcctccatgcacagcgtgctgagtgacctgcacgaggccgtgcccaccgtggtgggcatcccagatggaacagctgtggtgggccgctccttccgggtgaccatccccacagacctgattgccagcagcggggacatcatcaaggtgtctgctgctgggaaggaggccctgcccagctag

SEQ ID NO: 150763 - DNA, 291 bp, synthetic construct
  misc_feature 1..291: note = Description of Artificial Sequence: Synthetic coding sequence
  source 1..291: mol_type = other DNA
atgaggatgtctgtgggcctgagcctgctgctgcccctgagcggccgcaccttcctgctgctgctgtctgtggtgatggcccagagccactggcccagcgagcccagcgaggccgtgcgggactgggagaaccagctggaggcctccatgcacagcgtgctgagtgacctgcacgaggccgtgcccaccgtggtgggcatcccagatggaacagctgtggtgggccgctccttccgggtgaccatccccacagacctgattgccagcagcggggacatcatcaaggtgtag

SEQ ID NO: 150764 - DNA, 30 bp, synthetic construct
  misc_feature 1..30: note = Description of Artificial Sequence: Synthetic coding sequence
  source 1..30: mol_type = other DNA
atgaggatgtctgtgggcctgagcctgtag

SEQ ID NO: 150765 - DNA, 354 bp, synthetic construct
  misc_feature 1..354: note = Description of Artificial Sequence: Synthetic coding sequence
  source 1..354: mol_type = other DNA
atgaggatgtctgtgggcctgagcctgctgctgcccctgagcggccgcaccttcctgctgctgctgtctgtggtgatggcccagagccactggcccagcgagcccagcgaggccgtgcgggactgggagaaccagctggaggcctccatgcacagcgtgctgagtgacctgcacgaggccgtgcccaccgtggtgggcatcccagatggaacagctgtggtgggccgctccttccgggtgaccatccccacagacctgattgccagcagcggggacatcatcaaggtgtctgctgctgggaaggaggccctgcccagctggctgcactgggacagccagagccacaccctgtag

SEQ ID NO: 150766 - DNA, 159 bp, synthetic construct
  misc_feature 1..159: note = Description of Artificial Sequence: Synthetic coding sequence
  source 1..159: mol_type = other DNA
atgaggatgtctgtgggcctgagcctgctgctgcccctgagcggccgcaccttcctgctgctgctgtctgtggtgatggcccagagccactggcccagcgagcccagcgaggccgtgcgggactgggagaaccagctggaggcctccatgcacagctag

SEQ ID NO: 150767 - DNA, 261 bp, synthetic construct
  misc_feature 1..261: note = Description of Artificial Sequence: Synthetic coding sequence
  source 1..261: mol_type = other DNA
atgaggatgtctgtgggcctgagcctgctgctgcccctgagcggccgcaccttcctgctgctgctgtctgtggtgatggcccagagccactggcccagcgagcccagcgaggccgtgcgggactgggagaaccagctggaggcctccatgcacagcgtgctgagtgacctgcacgaggccgtgcccaccgtggtgggcatcccagatggaacagctgtggtgggccgctccttccgggtgaccatccccacagacctgtag

SEQ ID NO: 150768 - DNA, 126 bp, synthetic construct
  misc_feature 1..126: note = Description of Artificial Sequence: Synthetic coding sequence
  source 1..126: mol_type = other DNA
atgaggatgtctgtgggcctgagcctgctgctgcccctgagcggccgcaccttcctgctgctgctgtctgtggtgatggcccagagccactggcccagcgagcccagcgaggccgtgcgggactag

SEQ ID NO: 150769 - DNA, 2688 bp, synthetic construct; identical to SEQ ID NO: 150758
  misc_feature 1..2688: note = Description of Artificial Sequence: Synthetic coding sequence
  source 1..2688: mol_type = other DNA

SEQ ID NO: 150770 - DNA, 2688 bp, synthetic construct; identical to SEQ ID NO: 150758
  misc_feature 1..2688: note = Description of Artificial Sequence: Synthetic coding sequence
  source 1..2688: mol_type = other DNA

SEQ ID NO: 150771 - DNA, 2688 bp, synthetic construct; identical to SEQ ID NO: 150758
  misc_feature 1..2688: note = Description of Artificial Sequence: Synthetic coding sequence
  source 1..2688: mol_type = other DNA

SEQ ID NO: 150772 - DNA, 2688 bp, synthetic construct; identical to SEQ ID NO: 150758
  misc_feature 1..2688: note = Description of Artificial Sequence: Synthetic coding sequence
  source 1..2688: mol_type = other DNA

SEQ ID NO: 150773 - DNA, 2688 bp, synthetic construct; identical to SEQ ID NO: 150758
  misc_feature 1..2688: note = Description of Artificial Sequence: Synthetic coding sequence
  source 1..2688: mol_type = other DNA

SEQ ID NO: 150774 - DNA, 2025 bp, synthetic construct
  misc_feature 1..2025: note = Description of Artificial Sequence: Synthetic coding sequence
  source 1..2025: mol_type = other DNA
atggctgctggaggagctgagggcggcagcggccctggggccgccatgggagactgtgccgagatcaagagccagttccgcacccgggagggcttctacaagctgctgcctggagatggagctgccaggagaagtggccctgccagcgcccagacccctgtgcccccccagcccccccagcccccacctggccctgccagcgccagcggccctggagctgctggccctgccagcagccccccacctgctggccctggccctggccctgccctgcctgctgtgcggctgagcctggtgcggctgggggagccagacagcgctggagctggggagcccccagccaccccagctggcctgggcagcggcggggacagagtgtgcttcaacctgggccgggagctgtacttctacccaggctgctgccggcggggcagccagaggagcattgacctgaacaagcccatcgacaagaggatctacaagggcacccagcccacctgccacgacttcaaccagttcaccgctgccacagagaccatcagcctgctggtgggcttctctgctggccaggtgcagtacctggacctgatcaagaaggacaccagcaagctgttcaatgaggagcggctgattgacaagaccaaggtgacctacctgaagtggctgcctgagagcgagagcctcttcctggccagccacgccagcggccacctgtacctgtacaacgtgagccacccctgtgccagcgccccaccccagtacagcctgctgaagcagggcgagggcttctctgtgtatgctgccaagagcaaggcccccaggaaccccctggccaagtgggccgtgggggagggccccctgaatgaatttgccttctccccagatggccgccacctggcctgtgtgtcccaggacggctgcctgcgggtcttccactttgacagcatgctgctgcggggcctgatgaagagctactttggaggcctgctgtgtgtgtgctggagcccagatggccgctacgtggtgactggaggagaagatgacctggtgacagtgtggagcttcacagagggccgggtggtggcccggggccacggccacaagtcctgggtgaatgctgtggcctttgacccctacaccaccagggctgaggaggccgccacagctgctggagcagatggagagaggtctggagaggaggaggaggaggagcctgaggccgccggcaccggcagcgctggaggagcccccctgagccccctgcccaaggccggcagcatcacctacagatttggatctgctggccaggacacccagttctgcctgtgggacctgacagaagatgtgctgtacccccacccccccctggcccggaccaggaccctgcccggcaccccaggcaccaccccacctgctgccagcagcagccggggcggggagcccggccctggccccctgcccaggagcctgagccgcagcaacagcctgccccaccctgctgggggcggcaaggccggcggccctggggtggccgctgagcccggcacccccttcagcatcggccgctttgccaccctgaccctgcaggagcggcgggacagaggagctgagaaggagcacaagcgctaccacagcctgggcaacatcagccggggcggcagcggcggcagcggcagcggcggggagaagcccagcggccctgtgcccaggagccggctggaccctgccaaggtgctgggcacagccctgtgcccccgcatccacgaggtgcccctgctggagcccctggtgtgcaagaagatcgcccaggagcggctgactgtgctgctcttcctggaggactgcatcatcacagcctgccaggagggcctcatctgcacctgggcccggcctgggaaggccttcacagatgaggagacagaggcccagacaggagagggctcctggcccaggagccccagcaagtctgtggtggagggcatcagcagccagcccggcaacagccccagcggcaccgtggtgtag

SEQ ID NO: 150775 - DNA, 1890 bp, synthetic construct
  misc_feature 1..1890: note = Description of Artificial Sequence: Synthetic coding sequence
  source 1..1890: mol_type = other DNA
atgtctgctgaggtgcggctgcggcggctgcagcagctggtgctggaccccggcttcctgggcctggagcccctgctggacctgctgctgggcgtgcaccaggagctgggcgccagcgagctggcccaggacaagtatgtggccgacttcctgcagtgggccgagcccatcgtggtgcggctgaaggaggtgcggctgcagagagatgactttgagatcctgaaggtgattggccgcggggccttcagcgaggtggccgtggtgaagatgaagcagacaggccaggtgtatgccatgaagatcatgaacaagtgggacatgctgaagagaggagaggtgtcctgcttccgggaggagagagatgtgctggtgaatggagaccggcgctggatcacccagctgcactttgccttccaggatgagaactacctgtacctggtgatggagtactacgtgggcggggacctgctgaccctgctgagcaagtttggagagcgcatcccagctgagatggcccgcttctacctggccgagatcgtgatggccattgattctgtgcaccggctgggctacgtgcaccgggacatcaagccagacaacatcctgctggacagatgtggccacatccggctggccgactttggcagctgcctgaagctgcgggcagatggcaccgtgcgcagcctggtggccgtgggcaccccagactacctgagccctgagatcctgcaggccgtgggcggcggccctggcaccggcagctatggcccagaatgtgactggtgggccctgggcgtgtttgcctatgagatgttttatggccagacccccttctacgccgacagcacagctgagacctacggcaagatcgtgcactacaaggagcacctgagcctgcccctggtggatgaaggagtgcctgaggaggcccgggacttcatccagaggctgctgtgccccccagagacccggctgggccggggcggggccggggacttccgcacccaccccttcttcttcggcctggactgggatggcctgcgggacagcgtgccccccttcaccccagactttgagggcgccacagacacctgcaactttgacctggtggaggatggcctgacagccatggtgtctgggggcggggagaccctgagtgacatccgggagggcgcccccctgggcgtgcacctgccctttgtgggctacagctacagctgcatggccctgcgggacagcgaggtgcccggccccacccccatggagctggaggccgagcagctgctggagccccacgtgcaggcccccagcctggagcccagcgtgagcccccaggatgaaacagctgaggtggccgtgcctgctgctgtgcctgctgctgaggccgaggccgaggtgaccctgcgggagctgcaggaggccctggaggaggaggtgctgacccggcagagcctgagccgggagatggaggccatcagaacagacaaccagaactttgccagccagctgcgggaggccgaggccaggaacagagacctggaggcccacgtgcggcagctgcaggagaggatggagctgctgcaggccgagggcgccacagctgtgactggagtgcccagcccccgggccacagacccccccagccacctggatggccccccagctgtggccgtgggccagtgccccctggtgggccctggccccatgcacagaagacacctgctgctgcctgcccgggtgcccaggcctggcctgtctgaggccctgagcctgctgctgtttgctgtggtgctgagcagagctgctgccctgggctgcatcggcctggtggcccatgctggccagctgacagctgtgtggaggaggcctggagctgcccgggccccctag

SEQ ID NO: 150776 - DNA, 1968 bp, synthetic construct
  misc_feature 1..1968: note = Description of Artificial Sequence: Synthetic coding sequence
  source 1..1968: mol_type = other DNA
atggtgctgcctgtgcagcacgtgtccagaggagctgctgaggccgccccagctgctggggtgggccctggcctgcccggggccggggccccagcccggcccagccctggccggcccccaggggccggccgcctgaggactggacctggccaggtgcggggccgcctgctggccgtgggccccaagagcagggtcttccagagcgtggtgcaggagcccccagccagcgagagcagagctgagcccatcgtggtgcggctgaaggaggtgcggctgcagagagatgactttgagatcctgaaggtgattggccgcggggccttcagcgaggtggccgtggtgaagatgaagcagacaggccaggtgtatgccatgaagatcatgaacaagtgggacatgctgaagagaggagaggtgtcctgcttccgggaggagagagatgtgctggtgaatggagaccggcgctggatcacccagctgcactttgccttccaggatgagaactacctgtacctggtgatggagtactacgtgggcggggacctgctgaccctgctgagcaagtttggagagcgcatcccagctgagatggcccgcttctacctggccgagatcgtgatggccattgattctgtgcaccggctgggctacgtgcaccgggacatcaagccagacaacatcctgctggacagatgtggccacatccggctggccgactttggcagctgcctgaagctgcgggcagatggcaccgtgcgcagcctggtggccgtgggcaccccagactacctgagccctgagatcctgcaggccgtgggcggcggccctggcaccggcagctatggcccagaatgtgactggtgggccctgggcgtgtttgcctatgagatgttttatggccagacccccttctacgccgacagcacagctgagacctacggcaagatcgtgcactacaaggagcacctgagcctgcccctggtggatgaaggagtgcctgaggaggcccgggacttcatccagaggctgctgtgccccccagagacccggctgggccggggcggggccggggacttccgcacccaccccttcttcttcggcctggactgggatggcctgcgggacagcgtgccccccttcaccccagactttgagggcgccacagacacctgcaactttgacctggtggaggatggcctgacagccatggtgtctgggggcggggagaccctgagtgacatccgggagggcgcccccctgggcgtgcacctgccctttgtgggctacagctacagctgcatggccctgcgggacagcgaggtgcccggccccacccccatggagctggaggccgagcagctgctggagccccacgtgcaggcccccagcctggagcccagcgtgagcccccaggatgaaacagctgaggtggccgtgcctgctgctgtgcctgctgctgaggccgaggccgaggtgaccctgcgggagctgcaggaggccctggaggaggaggtgctgacccggcagagcctgagccgggagatggaggccatcagaacagacaaccagaactttgccagccagctgcgggaggccgaggccaggaacagagacctggaggcccacgtgcggcagctgcaggagaggatggagctgctgcaggccgagggcgccacagctgtgactggagtgcccagcccccgggccacagacccccccagccacctggatggccccccagctgtggccgtgggccagtgccccctggtgggccctggccccatgcacagaagacacctgctgctgcctgcccgggtgcccaggcctggcctgtctgaggccctgagcctgctgctgtttgctgtggtgctgagcagagctgctgccctgggctgcatcggcctggtggcccatgctggccagctgacagctgtgtggaggaggcctggagctgcccgggccccctag

SEQ ID NO: 150777 - DNA, 1920 bp, synthetic construct
  misc_feature 1..1920: note = Description of Artificial Sequence: Synthetic coding sequence
  source 1..1920: mol_type = other DNA
atgggcggccacttctggcccccagagccctacaccgtcttcatgtggggcagcccctgggaggccgacagcccccgggtgaagctgcggggccgggagaagggccggcagacagagggcggggccttccccctggtgagcagcgccctgagcggggacccccgcttcttcagccccaccaccccacctgctgagcccatcgtggtgcggctgaaggaggtgcggctgcagagagatgactttgagatcctgaaggtgattggccgcggggccttcagcgaggtggccgtggtgaagatgaagcagacaggccaggtgtatgccatgaagatcatgaacaagtgggacatgctgaagagaggagaggtgtcctgcttccgggaggagagagatgtgctggtgaatggagaccggcgctggatcacccagctgcactttgccttccaggatgagaactacctgtacctggtgatggagtactacgtgggcggggacctgctgaccctgctgagcaagtttggagagcgcatcccagctgagatggcccgcttctacctggccgagatcgtgatggccattgattctgtgcaccggctgggctacgtgcaccgggacatcaagccagacaacatcctgctggacagatgtggccacatccggctggccgactttggcagctgcctgaagctgcgggcagatggcaccgtgcgcagcctggtggccgtgggcaccccagactacctgagccctgagatcctgcaggccgtgggcggcggccctggcaccggcagctatggcccagaatgtgactggtgggccctgggcgtgtttgcctatgagatgttttatggccagacccccttctacgccgacagcacagctgagacctacggcaagatcgtgcactacaaggagcacctgagcctgcccctggtggatgaaggagtgcctgaggaggcccgggacttcatccagaggctgctgtgccccccagagacccggctgggccggggcggggccggggacttccgcacccaccccttcttcttcggcctggactgggatggcctgcgggacagcgtgccccccttcaccccagactttgagggcgccacagacacctgcaactttgacctggtggaggatggcctgacagccatggtgtctgggggcggggagaccctgagtgacatccgggagggcgcccccctgggcgtgcacctgccctttgtgggctacagctacagctgcatggccctgcgggacagcgaggtgcccggccccacccccatggagctggaggccgagcagctgctggagccccacgtgcaggcccccagcctggagcccagcgtgagcccccaggatgaaacagctgaggtggccgtgcctgctgctgtgcctgctgctgaggccgaggccgaggtgaccctgcgggagctgcaggaggccctggaggaggaggtgctgacccggcagagcctgagccgggagatggaggccatcagaacagacaaccagaactttgccagccagctgcgggaggccgaggccaggaacagagacctggaggcccacgtgcggcagctgcaggagaggatggagctgctgcaggccgagggcgccacagctgtgactggagtgcccagcccccgggccacagacccccccagccacctggatggccccccagctgtggccgtgggccagtgccccctggtgggccctggccccatgcacagaagacacctgctgctgcctgcccgggtgcccaggcctggcctgtctgaggccctgagcctgctgctgtttgctgtggtgctgagcagagctgctgccctgggctgcatcggcctggtggcccatgctggccagctgacagctgtgtggaggaggcctggagctgcccgggccccctag

SEQ ID NO: 150778 - DNA, 1830 bp, synthetic construct
  misc_feature 1..1830: note = Description of Artificial Sequence: Synthetic coding sequence
  source 1..1830: mol_type = other DNA
atgggcggccacttctggcccccagagccctacaccgtcttcatgtggggcagcccctgggaggccgacagcccccgggtgaagctgcggggccgggagaagggccggcagacagagggcggggccttccccctggtgagcagcgccctgagcggggacccccgcttcttcagccccaccaccccacctgctgagcccatcgtggtgcggctgaaggaggtgcggctgcagagagatgactttgagatcctgaaggtgattggccgcggggccttcagcgaggtggccgtggtgaagatgaagcagacaggccaggtgtatgccatgaagatcatgaacaagtgggacatgctgaagagaggagaggtgtcctgcttccgggaggagagagatgtgctggtgaatggagaccggcgctggatcacccagctgcactttgccttccaggatgagaactacctgtacctggtgatggagtactacgtgggcggggacctgctgaccctgctgagcaagtttggagagcgcatcccagctgagatggcccgcttctacctggccgagatcgtgatggccattgattctgtgcaccggctgggctacgtgcaccgggacatcaagccagacaacatcctgctggacagatgtggccacatccggctggccgactttggcagctgcctgaagctgcgggcagatggcaccgtgcgcagcctggtggccgtgggcaccccagactacctgagccctgagatcctgcaggccgtgggcggcggccctggcaccggcagctatggcccagaatgtgactggtgggccctgggcgtgtttgcctatgagatgttttatggccagacccccttctacgccgacagcacagctgagacctacggcaagatcgtgcactacaaggagcacctgagcctgcccctggtggatgaaggagtgcctgaggaggcccgggacttcatccagaggctgctgtgccccccagagacccggctgggccggggcggggccggggacttccgcacccaccccttcttcttcggcctggactgggatggcctgcgggacagcgtgccccccttcaccccagactttgagggcgccacagacacctgcaactttgacctggtggaggatggcctgacagccatggtgtctgggggcggggagaccctgagtgacatccgggagggcgcccccctgggcgtgcacctgccctttgtgggctacagctacagctgcatggccctgcgggacagcgaggtgcccggccccacccccatggagctggaggccgagcagctgctggagccccacgtgcaggcccccagcctggagcccagcgtgagcccccaggatgaaacagctgaggtggccgtgcctgctgctgtgcctgctgctgaggccgaggccgaggtgaccctgcgggagctgcaggaggccctggaggaggaggtgctgacccggcagagcctgagccgggagatggaggccatcagaacagacaaccagaactttgccagccagctgcgggaggccgaggccaggaacagagacctggaggcccacgtgcggcagctgcaggagaggatggagctgctgcaggccgagggcgccacagctgtgactggagtgcccagcccccgggccacagacccccccagccacgtgcccaggcctggcctgtctgaggccctgagcctgctgctgtttgctgtggtgctgagcagagctgctgccctgggctgcatcggcctggtggcccatgctggccagctgacagctgtgtggaggaggcctggagctgcccgggccccctag

SEQ ID NO: 150779 - DNA, 1593 bp, synthetic construct
  misc_feature 1..1593: note = Description of Artificial Sequence: Synthetic coding sequence
  source 1..1593: mol_type = other DNA
atgtctgctgaggtgcggctgcggcggctgcagcagctggtgctggaccccggcttcctgggcctggagcccctgctggacctgctgctgggcgtgcaccaggagctgggcgccagcgagctggcccaggacaagtatgtggccgacttcctgcagtgggccgagcccatcgtggtgcggctgaaggaggtgcggctgcagagagatgactttgagatcctgaaggtgattggccgcggggccttcagcgaggtggccgtggtgaagatgaagcagacaggccaggtgtatgccatgaagatcatgaacaagtgggacatgctgaagagaggagaggtgtcctgcttccgggaggagagagatgtgctggtgaatggagaccggcgctggatcacccagctgcactttgccttccaggatgagaactacctgtacctggtgatggagtactacgtgggcggggacctgctgaccctgctgagcaagtttggagagcgcatcccagctgagatggcccgcttctacctggccgagatcgtgatggccattgattctgtgcaccggctgggctacgtgcaccgggacatcaagccagacaacatcctgctggacagatgtggccacatccggctggccgactttggcagctgcctgaagctgcgggcagatggcaccgtgcgcagcctggtggccgtgggcaccccagactacctgagccctgagatcctgcaggccgtgggcggcggccctggcaccggcagctatggcccagaatgtgactggtgggccctgggcgtgtttgcctatgagatgttttatggccagacccccttctacgccgacagcacagctgagacctacggcaagatcgtgcactacaaggagcacctgagcctgcccctggtggatgaaggagtgcctgaggaggcccgggacttcatccagaggctgctgtgccccccagagacccggctgggccggggcggggccggggacttccgcacccaccccttcttcttcggcctggactgggatggcctgcgggacagcgtgccccccttcaccccagactttgagggcgccacagacacctgcaactttgacctggtggaggatggcctgacagccatggagaccctgagtgacatccgggagggcgcccccctgggcgtgcacctgccctttgtgggctacagctacagctgcatggccctgcgggacagcgaggtgcccggccccacccccatggagctggaggccgagcagctgctggagccccacgtgcaggcccccagcctggagcccagcgtgagcccccaggatgaaacagctgaggtggccgtgcctgctgctgtgcctgctgctgaggccgaggccgaggtgaccctgcgggagctgcaggaggccctggaggaggaggtgctgacccggcagagcctgagccgggagatggaggccatcagaacagacaaccagaactttgccagccagctgcgggaggccgaggccaggaacagagacctggaggcccacgtgcggcagctgcaggagaggatggagctgctgcaggccgagggcgccaccggcccctag

SEQ ID NO: 150780 - DNA, 1866 bp, synthetic construct
  misc_feature 1..1866: note = Description of Artificial Sequence: Synthetic coding sequence
  source 1..1866: mol_type = other DNA
atgtctgctgaggtgcggctgcggcggctgcagcagctggtgctggaccccggcttcctgggcctggagcccctgctggacctgctgctgggcgtgcaccaggagctgggcgccagcgagctggcccaggacaagtatgtggccgacttcctgcagtgggccgagcccatcgtggtgcggctgaaggaggtgcggctgcagagagatgactttgagatcctgaaggtgattggccgcggggccttcagcgaggtggccgtggtgaagatgaagcagacaggccaggtgtatgccatgaagatcatgaacaagtgggacatgctgaagagaggagaggtgtcctgcttccgggaggagagagatgtgctggtgaatggagaccggcgctggatcacccagctgcactttgccttccaggatgagaactacctgtacctggtgatggagtactacgtgggcggggacctgctgaccctgctgagcaagtttggagagcgcatcccagctgagatggcccgcttctacctggccgagatcgtgatggccattgattctgtgcaccggctgggctacgtgcaccgggacatcaagccagacaacatcctgctggacagatgtggccacatccggctggccgactttggcagctgcctgaagctgcgggcagatggcaccgtgcgcagcctggtggccgtgggcaccccagactacctgagccctgagatcctgcaggccgtgggcggcggccctggcaccggcagctatggcccagaatgtgactggtgggccctgggcgtgtttgcctatgagatgttttatggccagacccccttctacgccgacagcacagctgagacctacggcaagatcgtgcactacaaggagcacctgagcctgcccctggtggatgaaggagtgcctgaggaggcccgggacttcatccagaggctgctgtgccccccagagacccggctgggccggggcggggccggggacttccgcacccaccccttcttcttcggcctggactgggatggcctgcgggacagcgtgccccccttcaccccagactttgagggcgccacagacacctgcaactttgacctggtggaggatggcctgacagccatggagaccctgagtgacatccgggagggcgcccccctgggcgtgcacctgccctttgtgggctacagctacagctgcatggccctgcgggacagcgaggtgcccggccccacccccatggagctggaggccgagcagctgctggagccccacgtgcaggcccccagcctggagcccagcgtgagcccccaggatgaaacagctgaggtggccgtgcctgctgctgtgcctgctgctgaggccgaggccgaggtgaccctgcgggagctgcaggaggccctggaggaggaggtgctgacccggcagagcctgagccgggagatggaggccatcagaacagacaaccagaactttgccagccagctgcgggaggccgaggccaggaacagagacctggaggcccacgtgcggcagctgcaggagaggatggagctgctgcaggccgagggcgccacagctgtgactggagtgcccagcccccgggccacagatcctcccagccacctggatggccccccctggctgtgggccagcgcccgctggtggggccagatgcacagaagacacctgctgctgcctgcccgggtgcccaggcctggcctgtctgaggccctgagcctgctgctgtttgctgtggtgctgagcagagctgctgccctgggctgcatcggcctggtggcccatgctggccagctgacagctgtgtggaggaggcctggagctgcccgggccccctag

SEQ ID NO: 150781 - DNA, 1875 bp, synthetic construct
  misc_feature 1..1875: note = Description of Artificial Sequence: Synthetic coding sequence
  source 1..1875: mol_type = other DNA
atgtctgctgaggtgcggctgcggcggctgcagcagctggtgctggaccccggcttcctgggcctggagcccctgctggacctgctgctgggcgtgcaccaggagctgggcgccagcgagctggcccaggacaagtatgtggccgacttcctgcagtgggccgagcccatcgtggtgcggctgaaggaggtgcggctgcagagagatgactttgagatcctgaaggtgattggccgcggggccttcagcgaggtggccgtggtgaagatgaagcagacaggccaggtgtatgccatgaagatcatgaacaagtgggacatgctgaagagaggagaggtgtcctgcttccgggaggagagagatgtgctggtgaatggagaccggcgctggatcacccagctgcactttgccttccaggatgagaactacctgtacctggtgatggagtactacgtgggcggggacctgctgaccctgctgagcaagtttggagagcgcatcccagctgagatggcccgcttctacctggccgagatcgtgatggccattgattctgtgcaccggctgggctacgtgcaccgggacatcaagccagacaacatcctgctggacagatgtggccacatccggctggccgactttggcagctgcctgaagctgcgggcagatggcaccgtgcgcagcctggtggccgtgggcaccccagactacctgagccctgagatcctgcaggccgtgggcggcggccctggcaccggcagctatggcccagaatgtgactggtgggccctgggcgtgtttgcctatgagatgttttatggccagacccccttctacgccgacagcacagctgagacctacggcaagatcgtgcactacaaggagcacctgagcctgcccctggtggatgaaggagtgcctgaggaggcccgggacttcatccagaggctgctgtgccccccagagacccggctgggccggggcggggccggggacttccgcacccaccccttcttcttcggcctggactgggatggcctgcgggacagcgtgccccccttcaccccagactttgagggcgccacagacacctgcaactttgacctggtggaggatggcctgacagccatggagaccctgagtgacatccgggagggcgcccccctgggcgtgcacctgccctttgtgggctacagctacagctgcatggccctgcgggacagcgaggtgcccggccccacccccatggagctggaggccgagcagctgctggagccccacgtgcaggcccccagcctggagcccagcgtgagcccccaggatgaaacagctgaggtggccgtgcctgctgctgtgcctgctgctgaggccgaggccgaggtgaccctgcgggagctgcaggaggccctggaggaggaggtgctgacccggcagagcctgagccgggagatggaggccatcagaacagacaaccagaactttgccagccagctgcgggaggccgaggccaggaacagagacctggaggcccacgtgcggcagctgcaggagaggatggagctgctgcaggccgagggcgccacagctgtgactggagtgcccagcccccgggccacagatcctcccagccacctggatggccccccagctgtggccgtgggccagtgccccctggtgggccctggccccatgcaccggcggcacctgctgctgcctgcccgggtgccccggcccggcctgtctgaggccctgagcctgctgctgtttgctgtggtgctgagcagagctgctgccctgggctgcatcggcctggtggcccacgccggccagctgacagctgtgtggaggaggcctggggccgcccgggccccctag

SEQ ID NO: 150782 - DNA, 1878 bp, synthetic construct
  misc_feature 1..1878: note = Description of Artificial Sequence: Synthetic coding sequence
  source 1..1878: mol_type = other DNA
atgtctgctgaggtgcggctgcggcggctgcagcagctggtgctggaccccggcttcctgggcctggagcccctgctggacctgctgctgggcgtgcaccaggagctgggcgccagcgagctggcccaggacaagtatgtggccgacttcctgcagtgggccgagcccatcgtggtgcggctgaaggaggtgcggctgcagagagatgactttgagatcctgaaggtgattggccgcggggccttcagcgaggtggccgtggtgaagatgaagcagacaggccaggtgtatgccatgaagatcatgaacaagtgggacatgctgaagagaggagaggtgtcctgcttccgggaggagagagatgtgctggtgaatggagaccggcgctggatcacccagctgcactttgccttccaggatgagaactacctgtacctggtgatggagtactacgtgggcggggacctgctgaccctgctgagcaagtttggagagcgcatcccagctgagatggcccgcttctacctggccgagatcgtgatggccattgattctgtgcaccggctgggctacgtgcaccgggacatcaagccagacaacatcctgctggacagatgtggccacatccggctggccgactttggcagctgcctgaagctgcgggcagatggcaccgtgcgcagcctggtggccgtgggcaccccagactacctgagccctgagatcctgcaggccgtgggcggcggccctggcaccggcagctatggcccagaatgtgactggtgggccctgggcgtgtttgcctatgagatgttttatggccagacccccttctacgccgacagcacagctgagacctacggcaagatcgtgcactacaaggagcacctgagcctgcccctggtggatgaaggagtgcctgaggaggcccgggacttcatccagaggctgctgtgccccccagagacccggctgggccggggcggggccggggacttccgcacccaccccttcttcttcggcctggactgggatggcctgcgggacagcgtgccccccttcaccccagactttgagggcgccacagacacctgcaactttgacctggtggaggatggcctgacagccatggagaccctgagtgacatccgggagggcgcccccctgggcgtgcacctgccctttgtgggctacagctacagctgcatggccctgcgggacagcgaggtgcccggccccacccccatggagctggaggccgagcagctgctggagccccacgtgcaggcccccagcctggagcccagcgtgagcccccaggatgaaacagctgaggtggccgtgcctgctgctgtgcctgctgctgaggccgaggccgaggtgaccctgcgggagctgcaggaggccctggaggaggaggtgctgacccggcagagcctgagccgggagatggaggccatcagaacagacaaccagaactttgccagccagctgcgggaggccgaggccaggaacagagacctggaggcccacgtgcggcagctgcaggagaggatggagctgctgcaggccgagggcgccacagctgtgactggagtgcccagcccccgggccacagatcctcccagccacatggccccccggccctggctgtgggccagcgcccgctggtggggccaggccccctgcacagctgccacctgctgcagcctgcccggcagcctgggcctggcctacagaagacgcttcccctgcagctgcagccccctcttctgcctggtgcccccaccctgggccgccctgggctggtggcccaccccagccaacagcccccagagcggggccgcccaggagcccccagccctgcctgagccctag

SEQ ID NO: 150783 - DNA, 129 bp, synthetic construct
  misc_feature 1..129: note = Description of Artificial Sequence: Synthetic coding sequence
  source 1..129: mol_type = other DNA
atggagctgctgcaggccgagggcgccacagcccgctggcccccaggccggggctgcggccctgtgcctgctgggggcgcccggccccacgcccctcctcctcctgctgccccctgccagggcccctag

SEQ ID NO: 150784 - DNA, 3402 bp, synthetic construct
  misc_feature 1..3402: note = Description of Artificial Sequence: Synthetic coding sequence
  source 1..3402: mol_type = other DNA
atgcccagcagcctgatgctggaggtgcctgccctggccgacttcaacagagcctggacagagctgacagactggctgagcctgctggaccaggtgatcaagagccagagggtgatggtgggggacctggaggacatcaatgagatgatcatcaagcagaaggccaccatgcaggacctggagcagaggcggccccagctggaggagctgatcacagctgcccagaacctgaagaacaagaccagcaaccaggaggcccggaccatcatcacagaccgcatcgagcgcatccagaaccagtgggatgaggtgcaggagcacctgcagaacagacggcagcagctgaatgagatgctgaaggacagcacccagtggctggaggccaaggaggaggccgagcaggtgctgggccaggcccgggccaagctggagagctggaaggagggcccctacacagtggatgccatccagaagaagatcacagagaccaagcagctggccaaggacctgcggcagtggcagaccaacgtggatgtggccaatgacctggccctgaagctgctgcgggactacagcgcagatgacaccaggaaggtgcacatgatcacagagaacatcaatgcctcctggaggagcatccacaagagggtgtctgagcgggaggccgccctggaggagacccaccggctgctgcagcagttccccctggacctggagaagttcctggcctggctgacagaggccgagaccacagccaacgtgctgcaggatgccaccaggaaggagcggctgctggaggacagcaaaggagtgaaggagctgatgaagcagtggcaggacctgcagggcgagattgaggcccacacagatgtgtaccacaacctggatgagaacagccagaagatcctgcggagcctggagggcagtgatgatgctgtgctgctgcagaggcggctggacaacatgaacttcaagtggagcgagctgaggaagaagagcctgaacatccgcagccacctggaggccagcagtgaccagtggaagaggctgcacctgagcctgcaggagctgctggtgtggctgcagctgaaggatgatgagctgagccggcaggcccccatcggcggggacttccctgctgtgcagaagcagaatgatgtgcaccgggccttcaagcgggagctgaagaccaaggagcccgtcatcatgagcaccctggagaccgtgcgcatcttcctgacagagcagcccctggagggcctggagaagctgtaccaggagccccgggagctgcccccagaggagcgggcccagaatgtgacccggctgctgaggaagcaggccgaggaggtgaacacagagtgggagaagctgaacctgcacagcgctgactggcagaggaagattgatgagaccctggagcggctgcgggagctgcaggaggccacagatgagctggacctgaagctgcggcaggccgaggtgatcaagggctcctggcagcctgtgggggacctgctgattgacagcctgcaggaccacctggagaaggtgaaggccctgcggggggagatcgcccccctgaaggaaaatgtgagccacgtgaatgacctggcccggcagctgaccaccctgggcatccagctgagcccctacaacctgagcaccctggaggacctgaacacccgctggaagctgctgcaggtggccgtggaggacagagtgcggcagctgcacgaggcccaccgggactttggacctgccagccagcacttcctgagcacctctgtgcagggcccctgggagcgggccatcagccccaacaaggtgccctactacatcaaccacgagacccagaccacctgctgggaccaccccaagatgacagagctgtaccagagcctggccgacctgaacaacgtgcgcttcagcgcctacagaacagccatgaagctgcggcggctgcagaaggccctgtgcctggacctgctgagcctgtctgctgcctgtgatgccctggaccagcacaacctgaagcagaatgaccagcccatggacatcctgcagatcatcaactgcctgaccaccatctatgaccggctggagcaggagcacaacaacctggtgaatgtgcccctgtgtgtggacatgtgcctgaactggctgctgaatgtgtatgacaccggccgcacaggccgcatccgggtgctgtccttcaagacaggcatcatcagcctgtgcaaggcccacctggaggacaagtaccgctacctgttcaagcaggtggccagcagcacaggcttctgtgaccagaggcggctgggcctgctgctgcatgacagcatccagatcccccggcagctgggggaggtggccagctttggaggcagcaacatcgagcccagcgtgcgcagctgcttccagtttgccaacaacaagccagaaattgaggccgccctcttcctggactggatgaggctggagccccagagcatggtgtggctgcctgtgctgcaccgggtggccgctgctgagacagccaagcaccaggccaagtgcaacatctgcaaggagtgccccatcatcggcttccgctaccgcagcctgaagcacttcaactatgacatctgccagagctgcttcttcagcggccgggtggccaagggccacaagatgcactaccccatggtggagtactgcacccccaccaccagcggagaagatgtgcgggactttgccaaggtgctgaagaacaagttccgcaccaagcgctactttgccaagcaccccaggatgggctacctgcctgtgcagacagtgctggagggggacaacatggagaccaacctgcaggccgagtatgaccggctgaagcagcagcacgagcacaagggcctgagccccctgcccagccccccagagatgatgcccaccagcccccagagccccagagatgctgagctgattgctgaggccaagctgctgcggcagcacaagggccgcctggaggccaggatgcagatcctggaggaccacaacaagcagctggagagccagctgcaccggctgcggcagctgctggagcagccccaggccgaggccaaggtgaatggcaccaccgtgagcagccccagcaccagcctgcagaggagtgacagcagccagcccatgctgctgcgggtggtgggcagccagaccagtgacagcatgggagaggaggacctgctgagccccccccaggacaccagcacaggcctggaggaggtgatggagcagctgaacaacagcttccccagcagccggggccacaacgtgggcagcctcttccacatggctgatgacctgggccgggccatggagagcctggtgtctgtgatgacagatgaggagggcgctgagtag

SEQ ID NO: 150785 - DNA, 11058 bp, synthetic construct
  misc_feature 1..11058: note = Description of Artificial Sequence: Synthetic coding sequence
  source 1..11058: mol_type = other DNA
atgctgtggtgggaggaggtggaggactgctatgagcgggaggatgtgcagaagaagaccttcaccaagtgggtgaatgcccagttcagcaagtttgggaagcagcacatcgagaacctcttcagtgacctgcaggacggccggcggctgctggacctgctggagggcctgaccggccagaagctgcccaaggagaagggcagcaccagggtgcacgccctgaacaacgtgaacaaggccctgcgggtgctgcagaacaacaacgtggacctggtgaacatcggcagcacagacatcgtggatggcaaccacaagctgaccctgggcctcatctggaacatcatcctgcactggcaggtgaagaatgtgatgaagaacatcatggccggcctgcagcagaccaacagcgagaagatcctgctgtcctgggtgcggcagagcaccaggaactacccccaggtgaatgtcatcaacttcaccacctcctggagcgatggcctggccctgaatgccctgatccacagccacaggccagacctgtttgactggaacagcgtggtgtgccagcagagcgccacccagaggctggagcacgccttcaacatcgcccgctaccagctgggcatcgagaagctgctggaccctgaagatgtggacaccacctacccagacaagaagagcatcctgatgtacatcaccagcctcttccaggtgctgccccagcaggtgtccattgaggccatccaggaggtggagatgctgcccaggcctcccaaggtgaccaaggaggagcacttccagctgcaccaccagatgcactacagccagcagatcaccgtgtccctggcccagggctatgaaagaaccagcagccccaagccccgcttcaagagctatgcctacacccaggccgcctacgtgaccaccagtgaccccaccaggagccccttccccagccagcacctggaggcccctgaggacaagagctttggcagcagcctgatggagagcgaggtgaacctggaccgctaccagacagccctggaggaggtgctgtcctggctgctgtctgctgaggacaccctgcaggcccagggcgagatcagcaatgatgtggaggtggtgaaggaccagttccacacccatgagggctacatgatggacctgacagcccaccagggccgggtgggcaacatcctgcagctgggcagcaagctgattggaacaggcaagctgtctgaagatgaggagacagaggtgcaggagcagatgaacctgctgaacagccgctgggagtgcctgcgggtggcctccatggagaagcagagcaacctgcaccgggtgctgatggacctgcagaaccagaagctgaaggagctgaatgactggctgaccaagacagaggagaggaccaggaagatggaggaggagcccctgggccctgacctggaggacctgaagaggcaggtgcagcagcacaaggtgctgcaggaggacctggagcaggagcaggtgcgggtgaacagcctgacccacatggtggtggtggtggatgagagcagcggggaccacgccacagctgccctggaggagcagctgaaggtgctgggggaccgctgggccaacatctgccgctggacagaggaccgctgggtgctgctgcaggacatcctgctgaagtggcagaggctgacagaggagcagtgcctcttcagcgcctggctgtctgagaaggaggatgctgtgaacaagatccacaccaccggcttcaaggaccagaatgagatgctgagcagcctgcagaagctggccgtgctgaaggctgacctggagaagaagaagcagagcatgggcaagctgtacagcctgaagcaggacctgctgagcaccctgaagaacaagtctgtgacccagaagacagaggcctggctggacaactttgcccgctgctgggacaacctggtgcagaagctggagaagagcacagcccagatcagccaggccgtgaccaccacccagcccagcctgacccagaccaccgtgatggagaccgtgaccaccgtgaccacccgggagcagatcctggtgaagcacgcccaggaggagctgcccccacctccaccccagaagaagaggcagatcaccgtggacagcgagatcaggaagaggctggatgtggacatcacagagctgcacagctggatcaccaggtctgaggccgtgctgcagagccctgagtttgccatcttcaggaaggagggcaacttcagtgacctgaaggagaaggtgaatgccatcgagcgggagaaggccgagaagttcaggaagctgcaggatgccagccgcagcgcccaggccctggtggagcagatggtgaatgaaggagtgaatgctgacagcatcaagcaggccagcgagcagctgaacagccgctggattgagttctgccagctgctgtctgagcggctgaactggctggagtaccagaacaacatcatcgccttctacaaccagctgcagcagctggagcagatgaccaccacagctgagaactggctgaagatccagcccaccaccccatctgagcccacagccatcaagagccagctgaagatctgcaaggatgaggtgaaccggctgagtgacctgcagccccagatcgagcggctgaagatccagagcatcgccctgaaggagaagggccagggccccatgttcctggatgctgactttgtggccttcaccaaccacttcaagcaggtgttcagtgatgtgcaggcccgggagaaggagctgcagaccatctttgacaccctgccccccatgagataccaggagaccatgtctgccatccgcacctgggtgcagcagagcgagaccaagctgagcatcccccagctgtctgtgacagattatgagatcatggagcagaggctgggggagctgcaggccctgcagagcagcctgcaggagcagcagagcggcctgtactacctgagcaccaccgtgaaggagatgagcaagaaggcccccagcgagatcagcaggaagtaccagagcgagtttgaggagattgagggccgctggaagaagctgagcagccagctggtggagcactgccagaagctggaggagcagatgaacaagctgaggaagatccagaaccacatccagaccctgaagaagtggatggccgaggtggatgtgttcctgaaggaggagtggccagccctgggggacagcgagatcctgaagaagcagctgaagcagtgccgcctgctggtgtctgacatccagaccatccagcccagcctgaacagcgtgaatgaaggaggccagaagatcaagaatgaagctgagcctgagtttgccagccggctggagacagagctgaaggagctgaacacccagtgggaccacatgtgccagcaggtgtatgccaggaaggaggccctgaagggcggcctggagaagacagtgtccctgcagaaggacctgtctgagatgcatgagtggatgacccaggccgaggaggagtacctggagcgggactttgagtacaagaccccagatgagctgcagaaggctgtggaggagatgaagagggccaaggaggaggcccagcagaaggaggccaaggtgaagctgctgacagagagcgtgaacagcgtgattgcccaggcccctcctgtggcccaggaggccctgaagaaggagctggagaccctgaccaccaactaccagtggctgtgcacccggctgaatggcaagtgcaagaccctggaggaggtgtgggcctgctggcatgagctgctgagctacctggagaaggccaacaagtggctgaatgaggtggagttcaagctgaagaccacagagaacatccctgggggcgctgaggagatcagcgaggtgctggacagcctggagaacctgatgaggcacagcgaggacaaccccaaccagatccgcatcctggcccagaccctgacagatggcggcgtgatggatgagctgatcaatgaggagctggagaccttcaacagccgctggagggagctgcacgaggaggccgtgcggcggcagaagctgctggagcagagcatccagagcgcccaggagacagagaagagcctgcacctgatccaggagagcctgaccttcatcgacaagcagctggccgcctacatcgctgacaaggtggatgctgcccagatgccccaggaggcccagaagatccagagcgacctgaccagccatgagatcagcctggaggagatgaagaagcacaaccagggcaaggaggccgcccagagggtgctgagccagattgatgtggcccagaagaagctgcaggatgtgtccatgaagttccgcctcttccagaagccagccaactttgagcagaggctgcaggagagcaagatgatcctggatgaggtgaagatgcacctgcctgccctggagaccaagtctgtggagcaggaggtggtgcagagccagctgaaccactgtgtgaacctgtacaagagcctgtctgaggtgaagtctgaggtggagatggtgatcaagacaggccggcagatcgtgcagaagaagcagacagagaaccccaaggagctggatgagcgggtgacagccctgaagctgcactacaatgagctgggcgccaaggtgacagagaggaagcagcagctggagaagtgcctgaagctgagcaggaagatgaggaaggagatgaatgtgctgacagagtggctggccgccacagacatggagctgaccaagaggtctgctgtggagggcatgcccagcaacctggacagcgaggtggcctggggcaaggccacccagaaggagattgagaagcagaaggtgcacctgaagagcatcacagaggtgggggaggccctgaagacagtgctgggcaagaaggagaccctggtggaggacaagctgagcctgctgaacagcaactggattgctgtgaccagcagagctgaggagtggctgaacctgctgctggagtaccagaagcacatggagacctttgaccagaatgtggaccacatcaccaagtggatcatccaggccgacaccctgctggatgaaagtgagaagaagaagccccagcagaaggaggatgtgctgaagaggctgaaggccgagctgaatgacatccggcccaaggtggacagcacccgggaccaggccgccaacctgatggccaacagaggagaccactgcaggaagctggtggagccccagatcagcgagctgaaccacagatttgctgccatcagccaccgcatcaagacaggcaaggccagcatccccctgaaggagctggagcagttcaacagcgacatccagaagctgctggagcccctggaggccgagatccagcagggcgtgaacctgaaggaggaggacttcaacaaggacatgaatgaagataatgaaggaacagtgaaggagctgctgcagagaggagacaacctgcagcagaggatcacagatgagaggaagcgggaggagatcaagatcaagcagcagctgctgcagaccaagcacaatgccctgaaggacctgcggagccagaggaggaagaaggccctggagatcagccaccagtggtaccagtacaagaggcaggctgatgacctgctgaagtgcctggatgacatcgagaagaagctggccagcctgcctgagcccagagatgagaggaagatcaaggagattgaccgggagctgcagaagaagaaggaggagctgaatgctgtgcggcggcaggccgagggcctgtctgaagatggagctgccatggctgtggagcccacccagatccagctgagcaagcgctggagagaaattgagagcaagtttgcccagttccggcggctgaactttgcccagatccacacagtgcgggaggagaccatgatggtgatgacagaggacatgcccctggagatctcctatgtgcccagcacctacctgacagagatcacccacgtgtcccaggccctgctggaggtggagcagctgctgaatgccccagacctgtgtgccaaggactttgaagatctcttcaagcaggaggagagcctgaagaacatcaaggacagcctgcagcagagcagcggcagaattgacatcatccacagcaagaagacagctgccctgcagagcgccacccctgtggagcgggtgaagctgcaggaggccctgagccagctggacttccagtgggagaaggtgaacaagatgtacaaggaccggcagggccgctttgacagatctgtggagaagtggaggcgcttccactatgacatcaagatcttcaaccagtggctgacagaagctgagcagttcctgaggaagacccagatccctgagaactgggagcacgccaagtacaagtggtacctgaaggagctgcaggacggcatcggccagaggcagacagtggtgaggaccctgaatgccactggagaggagatcatccagcagagcagcaagacagatgccagcatcctgcaggagaagctgggcagcctgaacctgcgctggcaggaggtgtgcaagcagctgagtgacaggaagaagaggctggaggagcagaagaacatcctgtctgagttccagagggacctgaatgaatttgtgctgtggctggaggaggccgacaacatcgccagcatccccctggagcccgggaaggagcagcagctgaaggagaagctggagcaggtgaagctgctggtggaggagctgcccctgcggcagggcatcctgaagcagctgaatgaaacaggaggccctgtgctggtgtctgcccccatcagccctgaggagcaggacaagctggagaacaagctgaagcagaccaacctgcagtggatcaaggtgtcccgggccctgcctgagaagcagggcgagattgaggcccagatcaaggacctgggccagctggagaagaagctggaggacctggaggagcagctgaaccacctgctgctgtggctgagccccatccggaaccagctggagatctacaaccagcccaaccaggagggcccctttgatgtgaaggagacagaaattgctgtgcaggccaagcagccagatgtggaggagatcctgagcaagggccagcacctgtacaaggagaagccagccacccagcctgtgaagaggaagctggaggacctgagcagcgagtggaaggctgtgaaccggctgctgcaggagctgcgggccaagcagcctgacctggcccctggcctgaccaccatcggggccagccccacccagacagtgaccctggtgacccagcctgtggtgaccaaggagacagccatcagcaagctggagatgcccagcagcctgatgctggaggtgcctgccctggccgacttcaacagagcctggacagagctgacagactggctgagcctgctggaccaggtgatcaagagccagagggtgatggtgggggacctggaggacatcaatgagatgatcatcaagcagaaggccaccatgcaggacctggagcagaggcggccccagctggaggagctgatcacagctgcccagaacctgaagaacaagaccagcaaccaggaggcccggaccatcatcacagaccgcatcgagcgcatccagaaccagtgggatgaggtgcaggagcacctgcagaacagacggcagcagctgaatgagatgctgaaggacagcacccagtggctggaggccaaggaggaggccgagcaggtgctgggccaggcccgggccaagctggagagctggaaggagggcccctacacagtggatgccatccagaagaagatcacagagaccaagcagctggccaaggacctgcggcagtggcagaccaacgtggatgtggccaatgacctggccctgaagctgctgcgggactacagcgcagatgacaccaggaaggtgcacatgatcacagagaacatcaatgcctcctggaggagcatccacaagagggtgtctgagcgggaggccgccctggaggagacccaccggctgctgcagcagttccccctggacctggagaagttcctggcctggctgacagaggccgagaccacagccaacgtgctgcaggatgccaccaggaaggagcggctgctggaggacagcaaaggagtgaaggagctgatgaagcagtggcaggacctgcagggcgagattgaggcccacacagatgtgtaccacaacctggatgagaacagccagaagatcctgcggagcctggagggcagtgatgatgctgtgctgctgcagaggcggctggacaacatgaacttcaagtggagcgagctgaggaagaagagcctgaacatccgcagccacctggaggccagcagtgaccagtggaagaggctgcacctgagcctgcaggagctgctggtgtggctgcagctgaaggatgatgagctgagccggcaggcccccatcggcggggacttccctgctgtgcagaagcagaatgatgtgcaccgggccttcaagcgggagctgaagaccaaggagcccgtcatcatgagcaccctggagaccgtgcgcatcttcctgacagagcagcccctggagggcctggagaagctgtaccaggagccccgggagctgcccccagaggagcgggcccagaatgtgacccggctgctgaggaagcaggccgaggaggtgaacacagagtgggagaagctgaacctgcacagcgctgactggcagaggaagattgatgagaccctggagcggctgcgggagctgcaggaggccacagatgagctggacctgaagctgcggcaggccgaggtgatcaagggctcctggcagcctgtgggggacctgctgattgacagcctgcaggaccacctggagaaggtgaaggccctgcggggggagatcgcccccctgaaggaaaatgtgagccacgtgaatgacctggcccggcagctgaccaccctgggcatccagctgagcccctacaacctgagcaccctggaggacctgaacacccgctggaagctgctgcaggtggccgtggaggacagagtgcggcagctgcacgaggcccaccgggactttggacctgccagccagcacttcctgagcacctctgtgcagggcccctgggagcgggccatcagccccaacaaggtgccctactacatcaaccacgagacccagaccacctgctgggaccaccccaagatgacagagctgtaccagagcctggccgacctgaacaacgtgcgcttcagcgcctacagaacagccatgaagctgcggcggctgcagaaggccctgtgcctggacctgctgagcctgtctgctgcctgtgatgccctggaccagcacaacctgaagcagaatgaccagcccatggacatcctgcagatcatcaactgcctgaccaccatctatgaccggctggagcaggagcacaacaacctggtgaatgtgcccctgtgtgtggacatgtgcctgaactggctgctgaatgtgtatgacaccggccgcacaggccgcatccgggtgctgtccttcaagacaggcatcatcagcctgtgcaaggcccacctggaggacaagtaccgctacctgttcaagcaggtggccagcagcacaggcttctgtgaccagaggcggctgggcctgctgctgcatgacagcatccagatcccccggcagctgggggaggtggccagctttggaggcagcaacatcgagcccagcgtgcgcagctgcttccagtttgccaacaacaagccagaaattgaggccgccctcttcctggactggatgaggctggagccccagagcatggtgtggctgcctgtgctgcaccgggtggccgctgctgagacagccaagcaccaggccaagtgcaacatctgcaaggagtgccccatcatcggcttccgctaccgcagcctgaagcacttcaactatgacatctgccagagctgcttcttcagcggccgggtggccaagggccacaagatgcactaccccatggtggagtactgcacccccaccaccagcggagaagatgtgcgggactttgccaaggtgctgaagaacaagttccgcaccaagcgctactttgccaagcaccccaggatgggctacctgcctgtgcagacagtgctggagggggacaacatggagacccctgtgaccctcatcaacttctggcctgtggacagcgccccagccagcagcccccagctgagccatgatgacacccacagcagaattgagcactacgccagccggctggccgagatggagaacagcaatggcagctacctgaatgacagcatcagccccaatgaaagcattgatgatgagcacctgctgatccagcactactgccagagcctgaaccaggacagccccctgagccagcccaggagccctgcccagatcctgatcagcctggagagcgaggagcggggggagctggagcgcatcctggccgacctggaggaggagaacagaaacctgcaggccgagtatgaccggctgaagcagcagcacgagcacaagggcctgagccccctgcccagccccccagagatgatgcccaccagcccccagagccccagagatgctgagctgattgctgaggccaagctgctgcggcagcacaagggccgcctggaggccaggatgcagatcctggaggaccacaacaagcagctggagagccagctgcaccggctgcggcagctgctggagcagccccaggccgaggccaaggtgaatggcaccaccgtgagcagccccagcaccagcctgcagaggagtgacagcagccagcccatgctgctgcgggtggtgggcagccagaccagtgacagcatgggagaggaggacctgctgagccccccccaggacaccagcacaggcctggaggaggtgatggagcagctgaacaacagcttccccagcagccggggcaggaacacccctgggaagcccatgagggaggacaccatgtag

SEQ ID NO: 150786 - DNA, 3693 bp, synthetic construct
  misc_feature 1..3693: note = Description of Artificial Sequence: Synthetic coding sequence
  source 1..3693: mol_type = other DNA
atgcccagcagcctgatgctggaggtgcctgccctggccgacttcaacagagcctggacagagctgacagactggctgagcctgctggaccaggtgatcaagagccagagggtgatggtgggggacctggaggacatcaatgagatgatcatcaagcagaaggccaccatgcaggacctggagcagaggcggccccagctggaggagctgatcacagctgcccagaacctgaagaacaagaccagcaaccaggaggcccggaccatcatcacagaccgcatcgagcgcatccagaaccagtgggatgaggtgcaggagcacctgcagaacagacggcagcagctgaatgagatgctgaaggacagcacccagtggctggaggccaaggaggaggccgagcaggtgctgggccaggcccgggccaagctggagagctggaaggagggcccctacacagtggatgccatccagaagaagatcacagagaccaagcagctggccaaggacctgcggcagtggcagaccaacgtggatgtggccaatgacctggccctgaagctgctgcgggactacagcgcagatgacaccaggaaggtgcacatgatcacagagaacatcaatgcctcctggaggagcatccacaagagggtgtctgagcgggaggccgccctggaggagacccaccggctgctgcagcagttccccctggacctggagaagttcctggcctggctgacagaggccgagaccacagccaacgtgctgcaggatgccaccaggaaggagcggctgctggaggacagcaaaggagtgaaggagctgatgaagcagtggcaggacctgcagggcgagattgaggcccacacagatgtgtaccacaacctggatgagaacagccagaagatcctgcggagcctggagggcagtgatgatgctgtgctgctgcagaggcggctggacaacatgaacttcaagtggagcgagctgaggaagaagagcctgaacatccgcagccacctggaggccagcagtgaccagtggaagaggctgcacctgagcctgcaggagctgctggtgtggctgcagctgaaggatgatgagctgagccggcaggcccccatcggcggggacttccctgctgtgcagaagcagaatgatgtgcaccgggccttcaagcgggagctgaagaccaaggagcccgtcatcatgagcaccctggagaccgtgcgcatcttcctgacagagcagcccctggagggcctggagaagctgtaccaggagccccgggagctgcccccagaggagcgggcccagaatgtgacccggctgctgaggaagcaggccgaggaggtgaacacagagtgggagaagctgaacctgcacagcgctgactggcagaggaagattgatgagaccctggagcggctgcgggagctgcaggaggccacagatgagctggacctgaagctgcggcaggccgaggtgatcaagggctcctggcagcctgtgggggacctgctgattgacagcctgcaggaccacctggagaaggtgaaggccctgcggggggagatcgcccccctgaaggaaaatgtgagccacgtgaatgacctggcccggcagctgaccaccctgggcatccagctgagcccctacaacctgagcaccctggaggacctgaacacccgctggaagctgctgcaggtggccgtggaggacagagtgcggcagctgcacgaggcccaccgggactttggacctgccagccagcacttcctgagcacctctgtgcagggcccctgggagcgggccatcagccccaacaaggtgccctactacatcaaccacgagacccagaccacctgctgggaccaccccaagatgacagagctgtaccagagcctggccgacctgaacaacgtgcgcttcagcgcctacagaacagccatgaagctgcggcggctgcagaaggccctgtgcctggacctgctgagcctgtctgctgcctgtgatgccctggaccagcacaacctgaagcagaatgaccagcccatggacatcctgcagatcatcaactgcctgaccaccatctatgaccggctggagcaggagcacaacaacctggtgaatgtgcccctgtgtgtggacatgtgcctgaactggctgctgaatgtgtatgacaccggccgcacaggccgcatccgggtgctgtccttcaagacaggcatcatcagcctgtgcaaggcccacctggaggacaagtaccgctacctgttcaagcaggtggccagcagcacaggcttctgtgaccagaggcggctgggcctgctgctgcatgacagcatccagatcccccggcagctgggggaggtggccagctttggaggcagcaacatcgagcccagcgtgcgcagctgcttccagtttgccaacaacaagccagaaattgaggccgccctcttcctggactggatgaggctggagccccagagcatggtgtggctgcctgtgctgcaccgggtggccgctgctgagacagccaagcaccaggccaagtgcaacatctgcaaggagtgccccatcatcggcttccgctaccgcagcctgaagcacttcaactatgacatctgccagagctgcttcttcagcggccgggtggccaagggccacaagatgcactaccccatggtggagtactgcacccccaccaccagcggagaagatgtgcgggactttgccaaggtgctgaagaacaagttccgcaccaagcgctactttgccaagcaccccaggatgggctacctgcctgtgcagacagtgctggagggggacaacatggagaccccagccagcagcccccagctgagccatgatgacacccacagccgcatcgagcactacgccagccggctggccgagatggagaacagcaatggcagctacctgaatgacagcatcagccccaatgaaagcattgatgatgagcacctgctgatccagcactactgccagagcctgaaccaggacagccccctgagccagcccaggagccctgcccagatcctgatcagcctggagagcgaggagcggggggagctggagcgcatcctggccgacctggaggaggagaacagaaacctgcaggccgagtatgaccggctgaagcagcagcacgagcacaagggcctgagccccctgcccagccccccagagatgatgcccaccagcccccagagccccagagatgctgagctgattgctgaggccaagctgctgcggcagcacaagggccgcctggaggccaggatgcagatcctggaggaccacaacaagcagctggagagccagctgcaccggctgcggcagctgctggagcagccccaggccgaggccaaggtgaatggcaccaccgtgagcagccccagcaccagcctgcagaggagtgacagcagccagcccatgctgctgcgggtggtgggcagccagaccagtgacagcatgggagaggaggacctgctgagccccccccaggacaccagcacaggcctggaggaggtgatggagcagctgaacaacagcttccccagcagccggggccacaacgtgggcagcctcttccacatggctgatgacctgggccgggccatggagagcctggtgtctgtgatgacagatgaggagggcgctgagtag

SEQ ID NO: 150787 - DNA, 1869 bp, synthetic construct
  misc_feature 1..1869: note = Description of Artificial Sequence: Synthetic coding sequence
  source 1..1869: mol_type = other DNA
atgagggagcagctgaagggccacgagacccagaccacctgctgggaccaccccaagatgacagagctgtaccagagcctggccgacctgaacaacgtgcgcttcagcgcctacagaacagccatgaagctgcggcggctgcagaaggccctgtgcctggacctgctgagcctgtctgctgcctgtgatgccctggaccagcacaacctgaagcagaatgaccagcccatggacatcctgcagatcatcaactgcctgaccaccatctatgaccggctggagcaggagcacaacaacctggtgaatgtgcccctgtgtgtggacatgtgcctgaactggctgctgaatgtgtatgacaccggccgcacaggccgcatccgggtgctgtccttcaagacaggcatcatcagcctgtgcaaggcccacctggaggacaagtaccgctacctgttcaagcaggtggccagcagcacaggcttctgtgaccagaggcggctgggcctgctgctgcatgacagcatccagatcccccggcagctgggggaggtggccagctttggaggcagcaacatcgagcccagcgtgcgcagctgcttccagtttgccaacaacaagccagaaattgaggccgccctcttcctggactggatgaggctggagccccagagcatggtgtggctgcctgtgctgcaccgggtggccgctgctgagacagccaagcaccaggccaagtgcaacatctgcaaggagtgccccatcatcggcttccgctaccgcagcctgaagcacttcaactatgacatctgccagagctgcttcttcagcggccgggtggccaagggccacaagatgcactaccccatggtggagtactgcacccccaccaccagcggagaagatgtgcgggactttgccaaggtgctgaagaacaagttccgcaccaagcgctactttgccaagcaccccaggatgggctacctgcctgtgcagacagtgctggagggggacaacatggagaccccagccagcagcccccagctgagccatgatgacacccacagccgcatcgagcactacgccagccggctggccgagatggagaacagcaatggcagctacctgaatgacagcatcagccccaatgaaagcattgatgatgagcacctgctgatccagcactactgccagagcctgaaccaggacagccccctgagccagcccaggagccctgcccagatcctgatcagcctggagagcgaggagcggggggagctggagcgcatcctggccgacctggaggaggagaacagaaacctgcaggccgagtatgaccggctgaagcagcagcacgagcacaagggcctgagccccctgcccagccccccagagatgatgcccaccagcccccagagccccagagatgctgagctgattgctgaggccaagctgctgcggcagcacaagggccgcctggaggccaggatgcagatcctggaggaccacaacaagcagctggagagccagctgcaccggctgcggcagctgctggagcagccccaggccgaggccaaggtgaatggcaccaccgtgagcagccccagcaccagcctgcagaggagtgacagcagccagcccatgctgctgcgggtggtgggcagccagaccagtgacagcatgggagaggaggacctgctgagccccccccaggacaccagcacaggcctggaggaggtgatggagcagctgaacaacagcttccccagcagccggggccacaacgtgggcagcctcttccacatggctgatgacctgggccgggccatggagagcctggtgtctgtgatgacagatgaggagggcgctgagtag

SEQ ID NO: 150788 - DNA, 11046 bp, synthetic construct
  misc_feature 1..11046: note = Description of Artificial Sequence: Synthetic coding sequence
  source 1..11046: mol_type = other DNA
atgtctgaggtgtccagtgatgagcgggaggatgtgcagaagaagaccttcaccaagtgggtgaatgcccagttcagcaagtttgggaagcagcacatcgagaacctcttcagtgacctgcaggacggccggcggctgctggacctgctggagggcctgaccggccagaagctgcccaaggagaagggcagcaccagggtgcacgccctgaacaacgtgaacaaggccctgcgggtgctgcagaacaacaacgtggacctggtgaacatcggcagcacagacatcgtggatggcaaccacaagctgaccctgggcctcatctggaacatcatcctgcactggcaggtgaagaatgtgatgaagaacatcatggccggcctgcagcagaccaacagcgagaagatcctgctgtcctgggtgcggcagagcaccaggaactacccccaggtgaatgtcatcaacttcaccacctcctggagcgatggcctggccctgaatgccctgatccacagccacaggccagacctgtttgactggaacagcgtggtgtgccagcagagcgccacccagaggctggagcacgccttcaacatcgcccgctaccagctgggcatcgagaagctgctggaccctgaagatgtggacaccacctacccagacaagaagagcatcctgatgtacatcaccagcctcttccaggtgctgccccagcaggtgtccattgaggccatccaggaggtggagatgctgcccaggcctcccaaggtgaccaaggaggagcacttccagctgcaccaccagatgcactacagccagcagatcaccgtgtccctggcccagggctatgaaagaaccagcagccccaagccccgcttcaagagctatgcctacacccaggccgcctacgtgaccaccagtgaccccaccaggagccccttccccagccagcacctggaggcccctgaggacaagagctttggcagcagcctgatggagagcgaggtgaacctggaccgctaccagacagccctggaggaggtgctgtcctggctgctgtctgctgaggacaccctgcaggcccagggcgagatcagcaatgatgtggaggtggtgaaggaccagttccacacccatgagggctacatgatggacctgacagcccaccagggccgggtgggcaacatcctgcagctgggcagcaagctgattggaacaggcaagctgtctgaagatgaggagacagaggtgcaggagcagatgaacctgctgaacagccgctgggagtgcctgcgggtggcctccatggagaagcagagcaacctgcaccgggtgctgatggacctgcagaaccagaagctgaaggagctgaatgactggctgaccaagacagaggagaggaccaggaagatggaggaggagcccctgggccctgacctggaggacctgaagaggcaggtgcagcagcacaaggtgctgcaggaggacctggagcaggagcaggtgcgggtgaacagcctgacccacatggtggtggtggtggatgagagcagcggggaccacgccacagctgccctggaggagcagctgaaggtgctgggggaccgctgggccaacatctgccgctggacagaggaccgctgggtgctgctgcaggacatcctgctgaagtggcagaggctgacagaggagcagtgcctcttcagcgcctggctgtctgagaaggaggatgctgtgaacaagatccacaccaccggcttcaaggaccagaatgagatgctgagcagcctgcagaagctggccgtgctgaaggctgacctggagaagaagaagcagagcatgggcaagctgtacagcctgaagcaggacctgctgagcaccctgaagaacaagtctgtgacccagaagacagaggcctggctggacaactttgcccgctgctgggacaacctggtgcagaagctggagaagagcacagcccagatcagccaggccgtgaccaccacccagcccagcctgacccagaccaccgtgatggagaccgtgaccaccgtgaccacccgggagcagatcctggtgaagcacgcccaggaggagctgcccccacctccaccccagaagaagaggcagatcaccgtggacagcgagatcaggaagaggctggatgtggacatcacagagctgcacagctggatcaccaggtctgaggccgtgctgcagagccctgagtttgccatcttcaggaaggagggcaacttcagtgacctgaaggagaaggtgaatgccatcgagcgggagaaggccgagaagttcaggaagctgcaggatgccagccgcagcgcccaggccctggtggagcagatggtgaatgaaggagtgaatgctgacagcatcaagcaggccagcgagcagctgaacagccgctggattgagttctgccagctgctgtctgagcggctgaactggctggagtaccagaacaacatcatcgccttctacaaccagctgcagcagctggagcagatgaccaccacagctgagaactggctgaagatccagcccaccaccccatctgagcccacagccatcaagagccagctgaagatctgcaaggatgaggtgaaccggctgagtgacctgcagccccagatcgagcggctgaagatccagagcatcgccctgaaggagaagggccagggccccatgttcctggatgctgactttgtggccttcaccaaccacttcaagcaggtgttcagtgatgtgcaggcccgggagaaggagctgcagaccatctttgacaccctgccccccatgagataccaggagaccatgtctgccatccgcacctgggtgcagcagagcgagaccaagctgagcatcccccagctgtctgtgacagattatgagatcatggagcagaggctgggggagctgcaggccctgcagagcagcctgcaggagcagcagagcggcctgtactacctgagcaccaccgtgaaggagatgagcaagaaggcccccagcgagatcagcaggaagtaccagagcgagtttgaggagattgagggccgctggaagaagctgagcagccagctggtggagcactgccagaagctggaggagcagatgaacaagctgaggaagatccagaaccacatccagaccctgaagaagtggatggccgaggtggatgtgttcctgaaggaggagtggccagccctgggggacagcgagatcctgaagaagcagctgaagcagtgccgcctgctggtgtctgacatccagaccatccagcccagcctgaacagcgtgaatgaaggaggccagaagatcaagaatgaagctgagcctgagtttgccagccggctggagacagagctgaaggagctgaacacccagtgggaccacatgtgccagcaggtgtatgccaggaaggaggccctgaagggcggcctggagaagacagtgtccctgcagaaggacctgtctgagatgcatgagtggatgacccaggccgaggaggagtacctggagcgggactttgagtacaagaccccagatgagctgcagaaggctgtggaggagatgaagagggccaaggaggaggcccagcagaaggaggccaaggtgaagctgctgacagagagcgtgaacagcgtgattgcccaggcccctcctgtggcccaggaggccctgaagaaggagctggagaccctgaccaccaactaccagtggctgtgcacccggctgaatggcaagtgcaagaccctggaggaggtgtgggcctgctggcatgagctgctgagctacctggagaaggccaacaagtggctgaatgaggtggagttcaagctgaagaccacagagaacatccctgggggcgctgaggagatcagcgaggtgctggacagcctggagaacctgatgaggcacagcgaggacaaccccaaccagatccgcatcctggcccagaccctgacagatggcggcgtgatggatgagctgatcaatgaggagctggagaccttcaacagccgctggagggagctgcacgaggaggccgtgcggcggcagaagctgctggagcagagcatccagagcgcccaggagacagagaagagcctgcacctgatccaggagagcctgaccttcatcgacaagcagctggccgcctacatcgctgacaaggtggatgctgcccagatgccccaggaggcccagaagatccagagcgacctgaccagccatgagatcagcctggaggagatgaagaagcacaaccagggcaaggaggccgcccagagggtgctgagccagattgatgtggcccagaagaagctgcaggatgtgtccatgaagttccgcctcttccagaagccagccaactttgagcagaggctgcaggagagcaagatgatcctggatgaggtgaagatgcacctgcctgccctggagaccaagtctgtggagcaggaggtggtgcagagccagctgaaccactgtgtgaacctgtacaagagcctgtctgaggtgaagtctgaggtggagatggtgatcaagacaggccggcagatcgtgcagaagaagcagacagagaaccccaaggagctggatgagcgggtgacagccctgaagctgcactacaatgagctgggcgccaaggtgacagagaggaagcagcagctggagaagtgcctgaagctgagcaggaagatgaggaaggagatgaatgtgctgacagagtggctggccgccacagacatggagctgaccaagaggtctgctgtggagggcatgcccagcaacctggacagcgaggtggcctggggcaaggccacccagaaggagattgagaagcagaaggtgcacctgaagagcatcacagaggtgggggaggccctgaagacagtgctgggcaagaaggagaccctggtggaggacaagctgagcctgctgaacagcaactggattgctgtgaccagcagagctgaggagtggctgaacctgctgctggagtaccagaagcacatggagacctttgaccagaatgtggaccacatcaccaagtggatcatccaggccgacaccctgctggatgaaagtgagaagaagaagccccagcagaaggaggatgtgctgaagaggctgaaggccgagctgaatgacatccggcccaaggtggacagcacccgggaccaggccgccaacctgatggccaacagaggagaccactgcaggaagctggtggagccccagatcagcgagctgaaccacagatttgctgccatcagccaccgcatcaagacaggcaaggccagcatccccctgaaggagctggagcagttcaacagcgacatccagaagctgctggagcccctggaggccgagatccagcagggcgtgaacctgaaggaggaggacttcaacaaggacatgaatgaagataatgaaggaacagtgaaggagctgctgcagagaggagacaacctgcagcagaggatcacagatgagaggaagcgggaggagatcaagatcaagcagcagctgctgcagaccaagcacaatgccctgaaggacctgcggagccagaggaggaagaaggccctggagatcagccaccagtggtaccagtacaagaggcaggctgatgacctgctgaagtgcctggatgacatcgagaagaagctggccagcctgcctgagcccagagatgagaggaagatcaaggagattgaccgggagctgcagaagaagaaggaggagctgaatgctgtgcggcggcaggccgagggcctgtctgaagatggagctgccatggctgtggagcccacccagatccagctgagcaagcgctggagagaaattgagagcaagtttgcccagttccggcggctgaactttgcccagatccacacagtgcgggaggagaccatgatggtgatgacagaggacatgcccctggagatctcctatgtgcccagcacctacctgacagagatcacccacgtgtcccaggccctgctggaggtggagcagctgctgaatgccccagacctgtgtgccaaggactttgaagatctcttcaagcaggaggagagcctgaagaacatcaaggacagcctgcagcagagcagcggcagaattgacatcatccacagcaagaagacagctgccctgcagagcgccacccctgtggagcgggtgaagctgcaggaggccctgagccagctggacttccagtgggagaaggtgaacaagatgtacaaggaccggcagggccgctttgacagatctgtggagaagtggaggcgcttccactatgacatcaagatcttcaaccagtggctgacagaagctgagcagttcctgaggaagacccagatccctgagaactgggagcacgccaagtacaagtggtacctgaaggagctgcaggacggcatcggccagaggcagacagtggtgaggaccctgaatgccactggagaggagatcatccagcagagcagcaagacagatgccagcatcctgcaggagaagctgggcagcctgaacctgcgctggcaggaggtgtgcaagcagctgagtgacaggaagaagaggctggaggagcagaagaacatcctgtctgagttccagagggacctgaatgaatttgtgctgtggctggaggaggccgacaacatcgccagcatccccctggagcccgggaaggagcagcagctgaaggagaagctggagcaggtgaagctgctggtggaggagctgcccctgcggcagggcatcctgaagcagctgaatgaaacaggaggccctgtgctggtgtctgcccccatcagccctgaggagcaggacaagctggagaacaagctgaagcagaccaacctgcagtggatcaaggtgtcccgggccctgcctgagaagcagggcgagattgaggcccagatcaaggacctgggccagctggagaagaagctggaggacctggaggagcagctgaaccacctgctgctgtggctgagccccatccggaaccagctggagatctacaaccagcccaaccaggagggcccctttgatgtgaaggagacagaaattgctgtgcaggccaagcagccagatgtggaggagatcctgagcaagggccagcacctgtacaaggagaagccagccacccagcctgtgaagaggaagctggaggacctgagcagcgagtggaaggctgtgaaccggctgctgcaggagctgcgggccaagcagcctgacctggcccctggcctgaccaccatcggggccagccccacccagacagtgaccctggtgacccagcctgtggtgaccaaggagacagccatcagcaagctggagatgcccagcagcctgatgctggaggtgcctgccctggccgacttcaacagagcctggacagagctgacagactggctgagcctgctggaccaggtgatcaagagccagagggtgatggtgggggacctggaggacatcaatgagatgatcatcaagcagaaggccaccatgcaggacctggagcagaggcggccccagctggaggagctgatcacagctgcccagaacctgaagaacaagaccagcaaccaggaggcccggaccatcatcacagaccgcatcgagcgcatccagaaccagtgggatgaggtgcaggagcacctgcagaacagacggcagcagctgaatgagatgctgaaggacagcacccagtggctggaggccaaggaggaggccgagcaggtgctgggccaggcccgggccaagctggagagctggaaggagggcccctacacagtggatgccatccagaagaagatcacagagaccaagcagctggccaaggacctgcggcagtggcagaccaacgtggatgtggccaatgacctggccctgaagctgctgcgggactacagcgcagatgacaccaggaaggtgcacatgatcacagagaacatcaatgcctcctggaggagcatccacaagagggtgtctgagcgggaggccgccctggaggagacccaccggctgctgcagcagttccccctggacctggagaagttcctggcctggctgacagaggccgagaccacagccaacgtgctgcaggatgccaccaggaaggagcggctgctggaggacagcaaaggagtgaaggagctgatgaagcagtggcaggacctgcagggcgagattgaggcccacacagatgtgtaccacaacctggatgagaacagccagaagatcctgcggagcctggagggcagtgatgatgctgtgctgctgcagaggcggctggacaacatgaacttcaagtggagcgagctgaggaagaagagcctgaacatccgcagccacctggaggccagcagtgaccagtggaagaggctgcacctgagcctgcaggagctgctggtgtggctgcagctgaaggatgatgagctgagccggcaggcccccatcggcggggacttccctgctgtgcagaagcagaatgatgtgcaccgggccttcaagcgggagctgaagaccaaggagcccgtcatcatgagcaccctggagaccgtgcgcatcttcctgacagagcagcccctggagggcctggagaagctgtaccaggagccccgggagctgcccccagaggagcgggcccagaatgtgacccggctgctgaggaagcaggccgaggaggtgaacacagagtgggagaagctgaacctgcacagcgctgactggcagaggaagattgatgagaccctggagcggctgcgggagctgcaggaggccacagatgagctggacctgaagctgcggcaggccgaggtgatcaagggctcctggcagcctgtgggggacctgctgattgacagcctgcaggaccacctggagaaggtgaaggccctgcggggggagatcgcccccctgaaggaaaatgtgagccacgtgaatgacctggcccggcagctgaccaccctgggcatccagctgagcccctacaacctgagcaccctggaggacctgaacacccgctggaagctgctgcaggtggccgtggaggacagagtgcggcagctgcacgaggcccaccgggactttggacctgccagccagcacttcctgagcacctctgtgcagggcccctgggagcgggccatcagccccaacaaggtgccctactacatcaaccacgagacccagaccacctgctgggaccaccccaagatgacagagctgtaccagagcctggccgacctgaacaacgtgcgcttcagcgcctacagaacagccatgaagctgcggcggctgcagaaggccctgtgcctggacctgctgagcctgtctgctgcctgtgatgccctggaccagcacaacctgaagcagaatgaccagcccatggacatcctgcagatcatcaactgcctgaccaccatctatgaccggctggagcaggagcacaacaacctggtgaatgtgcccctgtgtgtggacatgtgcctgaactggctgctgaatgtgtatgacaccggccgcacaggccgcatccgggtgctgtccttcaagacaggcatcatcagcctgtgcaaggcccacctggaggacaagtaccgctacctgttcaagcaggtggccagcagcacaggcttctgtgaccagaggcggctgggcctgctgctgcatgacagcatccagatcccccggcagctgggggaggtggccagctttggaggcagcaacatcgagcccagcgtgcgcagctgcttccagtttgccaacaacaagccagaaattgaggccgccctcttcctggactggatgaggctggagccccagagcatggtgtggctgcctgtgctgcaccgggtggccgctgctgagacagccaagcaccaggccaagtgcaacatctgcaaggagtgccccatcatcggcttccgctaccgcagcctgaagcacttcaactatgacatctgccagagctgcttcttcagcggccgggtggccaagggccacaagatgcactaccccatggtggagtactgcacccccaccaccagcggagaagatgtgcgggactttgccaaggtgctgaagaacaagttccgcaccaagcgctactttgccaagcaccccaggatgggctacctgcctgtgcagacagtgctggagggggacaacatggagacccctgtgaccctcatcaacttctggcctgtggacagcgccccagccagcagcccccagctgagccatgatgacacccacagcagaattgagcactacgccagccggctggccgagatggagaacagcaatggcagctacctgaatgacagcatcagccccaatgaaagcattgatgatgagcacctgctgatccagcactactgccagagcctgaaccaggacagccccctgagccagcccaggagccctgcccagatcctgatcagcctggagagcgaggagcggggggagctggagcgcatcctggccgacctggaggaggagaacagaaacctgcaggccgagtatgaccggctgaagcagcagcacgagcacaagggcctgagccccctgcccagccccccagagatgatgcccaccagcccccagagccccagagatgctgagctgattgctgaggccaagctgctgcggcagcacaagggccgcctggaggccaggatgcagatcctggaggaccacaacaagcagctggagagccagctgcaccggctgcggcagctgctggagcagccccaggccgaggccaaggtgaatggcaccaccgtgagcagccccagcaccagcctgcagaggagtgacagcagccagcccatgctgctgcgggtggtgggcagccagaccagtgacagcatgggagaggaggacctgctgagccccccccaggacaccagcacaggcctggaggaggtgatggagcagctgaacaacagcttccccagcagccggggcaggaacacccctgggaagcccatgagggaggacaccatgtag

SEQ ID NO: 150789 - DNA, 7035 bp, synthetic construct
  misc_feature 1..7035: note = Description of Artificial Sequence: Synthetic coding sequence
  source 1..7035: mol_type = other DNA
atgacagagatgatcctgctgatcttcttccctgcctacttcctgaatgctgtgcggcggcagaagctgctggagcagagcatccagagcgcccaggagacagagaagagcctgcacctgatccaggagagcctgaccttcatcgacaagcagctggccgcctacatcgctgacaaggtggatgctgcccagatgccccaggaggcccagaagatccagagcgacctgaccagccatgagatcagcctggaggagatgaagaagcacaaccagggcaaggaggccgcccagagggtgctgagccagattgatgtggcccagaagaagctgcaggatgtgtccatgaagttccgcctcttccagaagccagccaactttgagcagaggctgcaggagagcaagatgatcctggatgaggtgaagatgcacctgcctgccctggagaccaagtctgtggagcaggaggtggtgcagagccagctgaaccactgtgtgaacctgtacaagagcctgtctgaggtgaagtctgaggtggagatggtgatcaagacaggccggcagatcgtgcagaagaagcagacagagaaccccaaggagctggatgagcgggtgacagccctgaagctgcactacaatgagctgggcgccaaggtgacagagaggaagcagcagctggagaagtgcctgaagctgagcaggaagatgaggaaggagatgaatgtgctgacagagtggctggccgccacagacatggagctgaccaagaggtctgctgtggagggcatgcccagcaacctggacagcgaggtggcctggggcaaggccacccagaaggagattgagaagcagaaggtgcacctgaagagcatcacagaggtgggggaggccctgaagacagtgctgggcaagaaggagaccctggtggaggacaagctgagcctgctgaacagcaactggattgctgtgaccagcagagctgaggagtggctgaacctgctgctggagtaccagaagcacatggagacctttgaccagaatgtggaccacatcaccaagtggatcatccaggccgacaccctgctggatgagagcgagaagaagaagccccagcagaaggaggatgtgctgaagaggctgaaggccgagctgaatgacatccggcccaaggtggacagcacccgggaccaggccgccaacctgatggccaacagaggagaccactgcaggaagctggtggagccccagatcagcgagctgaaccacagatttgctgccatcagccaccgcatcaagacaggcaaggccagcatccccctgaaggagctggagcagttcaacagcgacatccagaagctgctggagcccctggaggccgagatccagcagggcgtgaacctgaaggaggaggacttcaacaaggacatgaatgaagataatgaaggcaccgtgaaggagctgctgcagagaggagacaacctgcagcagaggatcacagatgagaggaagcgggaggagatcaagatcaagcagcagctgctgcagaccaagcacaatgccctgaaggacctgcggagccagaggaggaagaaggccctggagatcagccaccagtggtaccagtacaagaggcaggctgatgacctgctgaagtgcctggatgacatcgagaagaagctggccagcctgcctgagcccagagatgagaggaagatcaaggagattgaccgggagctgcagaagaagaaggaggagctgaatgctgtgcggcggcaggccgagggcctgtctgaagatggagctgccatggctgtggagcccacccagatccagctgagcaagcgctggagagaaattgagagcaagtttgcccagttccggcggctgaactttgcccagatccacacagtgcgggaggagaccatgatggtgatgacagaggacatgcccctggagatctcctatgtgcccagcacctacctgacagagatcacccacgtgtcccaggccctgctggaggtggagcagctgctgaatgccccagacctgtgtgccaaggactttgaggacctcttcaagcaggaggagagcctgaagaacatcaaggacagcctgcagcagagcagcggcagaattgacatcatccacagcaagaagacagctgccctgcagagcgccacccctgtggagcgggtgaagctgcaggaggccctgagccagctggacttccagtgggagaaggtgaacaagatgtacaaggaccggcagggccgctttgacagatctgtggagaagtggaggcgcttccactatgacatcaagatcttcaaccagtggctgacagaggccgagcagttcctgaggaagacccagatccctgagaactgggagcacgccaagtacaagtggtacctgaaggagctgcaggacggcatcggccagaggcagacagtggtgaggaccctgaatgccaccggggaggagatcatccagcagagcagcaagacagatgccagcatcctgcaggagaagctgggcagcctgaacctgcgctggcaggaggtgtgcaagcagctgagtgacaggaagaagaggctggaggagcagaagaacatcctgtctgagttccagagggacctgaatgaatttgtgctgtggctggaggaggccgacaacatcgccagcatccccctggagcccgggaaggagcagcagctgaaggagaagctggagcaggtgaagctgctggtggaggagctgcccctgcggcagggcatcctgaagcagctgaatgagaccggcggccctgtgctggtgtctgcccccatcagccctgaggagcaggacaagctggagaacaagctgaagcagaccaacctgcagtggatcaaggtgtcccgggccctgcctgagaagcagggcgagattgaggcccagatcaaggacctgggccagctggagaagaagctggaggacctggaggagcagctgaaccacctgctgctgtggctgagccccatccggaaccagctggagatctacaaccagcccaaccaggagggcccctttgatgtgaaggagacagaaattgctgtgcaggccaagcagccagatgtggaggagatcctgagcaagggccagcacctgtacaaggagaagccagccacccagcctgtgaagaggaagctggaggacctgagcagcgagtggaaggctgtgaaccggctgctgcaggagctgcgggccaagcagcctgacctggcccctggcctgaccaccatcggggccagccccacccagacagtgaccctggtgacccagcctgtggtgaccaaggagacagccatcagcaagctggagatgcccagcagcctgatgctggaggtgcctgccctggccgacttcaacagagcctggacagagctgacagactggctgagcctgctggaccaggtgatcaagagccagagggtgatggtgggggacctggaggacatcaatgagatgatcatcaagcagaaggccaccatgcaggacctggagcagaggcggccccagctggaggagctgatcacagctgcccagaacctgaagaacaagaccagcaaccaggaggcccggaccatcatcacagacagaattgagcgcatccagaaccagtgggatgaggtgcaggagcacctgcagaacagacggcagcagctgaatgagatgctgaaggacagcacccagtggctggaggccaaggaggaggccgagcaggtgctgggccaggcccgggccaagctggagagctggaaggagggcccctacacagtggatgccatccagaagaagatcacagagaccaagcagctggccaaggacctgcggcagtggcagaccaacgtggatgtggccaatgacctggccctgaagctgctgcgggactacagcgcagatgacaccaggaaggtgcacatgatcacagagaacatcaatgcctcctggaggagcatccacaagagggtgtctgagcgggaggccgccctggaggagacccaccggctgctgcagcagttccccctggacctggagaagttcctggcctggctgacagaagctgagaccacagccaacgtgctgcaggatgccaccaggaaggagcggctgctggaggacagcaagggcgtgaaggagctgatgaagcagtggcaggacctgcagggcgagattgaggcccacacagatgtgtaccacaacctggatgagaacagccagaagatcctgcggagcctggagggcagtgatgatgctgtgctgctgcagaggcggctggacaacatgaacttcaagtggagcgagctgaggaagaagagcctgaacatccgcagccacctggaggccagcagtgaccagtggaagaggctgcacctgagcctgcaggagctgctggtgtggctgcagctgaaggatgatgagctgagccggcaggcccccatcggcggggacttccctgctgtgcagaagcagaatgatgtgcaccgggccttcaagcgggagctgaagaccaaggagcctgtgatcatgagcaccctggagaccgtgcgcatcttcctgacagagcagcccctggagggcctggagaagctgtaccaggagccccgggagctgcccccagaggagcgggcccagaatgtgacccggctgctgaggaagcaggccgaggaggtgaacacagagtgggagaagctgaacctgcacagcgctgactggcagaggaagattgatgagaccctggagcggctgcgggagctgcaggaggccacagatgagctggacctgaagctgcggcaggccgaggtgatcaagggctcctggcagcctgtgggggacctgctgattgacagcctgcaggaccacctggagaaggtgaaggccctgcggggggagatcgcccccctgaaggaaaatgtgagccacgtgaatgacctggcccggcagctgaccaccctgggcatccagctgagcccctacaacctgagcaccctggaggacctgaacacccgctggaagctgctgcaggtggccgtggaggacagagtgcggcagctgcacgaggcccaccgggactttggacctgccagccagcacttcctgagcacctctgtgcagggcccctgggagcgggccatcagccccaacaaggtgccctactacatcaaccacgagacccagaccacctgctgggaccaccccaagatgacagagctgtaccagagcctggccgacctgaacaacgtgcgcttcagcgcctacagaacagccatgaagctgcggcggctgcagaaggccctgtgcctggacctgctgagcctgtctgctgcctgtgatgccctggaccagcacaacctgaagcagaatgaccagcccatggacatcctgcagatcatcaactgcctgaccaccatctatgaccggctggagcaggagcacaacaacctggtgaatgtgcccctgtgtgtggacatgtgcctgaactggctgctgaatgtgtatgacaccggccgcacaggccgcatccgggtgctgtccttcaagacaggcatcatcagcctgtgcaaggcccacctggaggacaagtaccgctacctgttcaagcaggtggccagcagcacaggcttctgtgaccagaggcggctgggcctgctgctgcatgacagcatccagatcccccggcagctgggggaggtggccagctttggaggcagcaacatcgagcccagcgtgcgcagctgcttccagtttgccaacaacaagccagaaattgaagctgccctcttcctggactggatgaggctggagccccagagcatggtgtggctgcctgtgctgcaccgggtggccgctgctgagacagccaagcaccaggccaagtgcaacatctgcaaggaatgtcccatcatcggcttccgctaccgcagcctgaagcacttcaactatgacatctgccagagctgcttcttcagcggccgggtggccaagggccacaagatgcactaccccatggtggagtactgcacccccaccaccagcggggaggatgtgcgggactttgccaaggtgctgaagaacaagttccgcaccaagcgctactttgccaagcaccccaggatgggctacctgcctgtgcagacagtgctggagggggacaacatggagacccctgtgaccctcatcaacttctggcctgtggacagcgccccagccagcagcccccagctgagccatgatgacacccacagccgcatcgagcactacgccagccggctggccgagatggagaacagcaatggcagctacctgaatgacagcatcagccccaatgaaagcattgatgatgagcacctgctgatccagcactactgccagagcctgaaccaggacagccccctgagccagcccaggagccctgcccagatcctgatcagcctggagagcgaggagcggggggagctggagcgcatcctggccgacctggaggaggagaacagaaacctgcaggccgagtatgaccggctgaagcagcagcacgagcacaagggcctgagccccctgcccagccccccagagatgatgcccaccagcccccagagccccagagatgctgagctgattgctgaggccaagctgctgcggcagcacaagggccgcctggaggccaggatgcagatcctggaggaccacaacaagcagctggagagccagctgcaccggctgcggcagctgctggagcagccccaggccgaggccaaggtgaatggcaccaccgtgagcagccccagcaccagcctgcagaggagtgacagcagccagcccatgctgctgcgggtggtgggcagccagaccagtgacagcatgggagaggaggacctgctgagccccccccaggacaccagcacaggcctggaggaggtgatggagcagctgaacaacagcttccccagcagccggggcaggaacaccccaggcaagcccatgagggaggacaccccctag

SEQ ID NO: 150790 - DNA, 7026 bp, synthetic construct
  misc_feature 1..7026: note = Description of Artificial Sequence: Synthetic coding sequence
  source 1..7026: mol_type = other DNA
atgtctgccaggaagctgaggaacctgagctacaagaaggctgtgcggcggcagaagctgctggagcagagcatccagagcgcccaggagacagagaagagcctgcacctgatccaggagagcctgaccttcatcgacaagcagctggccgcctacatcgctgacaaggtggatgctgcccagatgccccaggaggcccagaagatccagagcgacctgaccagccatgagatcagcctggaggagatgaagaagcacaaccagggcaaggaggccgcccagagggtgctgagccagattgatgtggcccagaagaagctgcaggatgtgtccatgaagttccgcctcttccagaagccagccaactttgagcagaggctgcaggagagcaagatgatcctggatgaggtgaagatgcacctgcctgccctggagaccaagtctgtggagcaggaggtggtgcagagccagctgaaccactgtgtgaacctgtacaagagcctgtctgaggtgaagtctgaggtggagatggtgatcaagacaggccggcagatcgtgcagaagaagcagacagagaaccccaaggagctggatgagcgggtgacagccctgaagctgcactacaatgagctgggcgccaaggtgacagagaggaagcagcagctggagaagtgcctgaagctgagcaggaagatgaggaaggagatgaatgtgctgacagagtggctggccgccacagacatggagctgaccaagaggtctgctgtggagggcatgcccagcaacctggacagcgaggtggcctggggcaaggccacccagaaggagattgagaagcagaaggtgcacctgaagagcatcacagaggtgggggaggccctgaagacagtgctgggcaagaaggagaccctggtggaggacaagctgagcctgctgaacagcaactggattgctgtgaccagcagagctgaggagtggctgaacctgctgctggagtaccagaagcacatggagacctttgaccagaatgtggaccacatcaccaagtggatcatccaggccgacaccctgctggatgaaagtgagaagaagaagccccagcagaaggaggatgtgctgaagaggctgaaggccgagctgaatgacatccggcccaaggtggacagcacccgggaccaggccgccaacctgatggccaacagaggagaccactgcaggaagctggtggagccccagatcagcgagctgaaccacagatttgctgccatcagccaccgcatcaagacaggcaaggccagcatccccctgaaggagctggagcagttcaacagcgacatccagaagctgctggagcccctggaggccgagatccagcagggcgtgaacctgaaggaggaggacttcaacaaggacatgaatgaagataatgaaggaacagtgaaggagctgctgcagagaggagacaacctgcagcagaggatcacagatgagaggaagcgggaggagatcaagatcaagcagcagctgctgcagaccaagcacaatgccctgaaggacctgcggagccagaggaggaagaaggccctggagatcagccaccagtggtaccagtacaagaggcaggctgatgacctgctgaagtgcctggatgacatcgagaagaagctggccagcctgcctgagcccagagatgagaggaagatcaaggagattgaccgggagctgcagaagaagaaggaggagctgaatgctgtgcggcggcaggccgagggcctgtctgaagatggagctgccatggctgtggagcccacccagatccagctgagcaagcgctggagagaaattgagagcaagtttgcccagttccggcggctgaactttgcccagatccacacagtgcgggaggagaccatgatggtgatgacagaggacatgcccctggagatctcctatgtgcccagcacctacctgacagagatcacccacgtgtcccaggccctgctggaggtggagcagctgctgaatgccccagacctgtgtgccaaggactttgaagatctcttcaagcaggaggagagcctgaagaacatcaaggacagcctgcagcagagcagcggcagaattgacatcatccacagcaagaagacagctgccctgcagagcgccacccctgtggagcgggtgaagctgcaggaggccctgagccagctggacttccagtgggagaaggtgaacaagatgtacaaggaccggcagggccgctttgacagatctgtggagaagtggaggcgcttccactatgacatcaagatcttcaaccagtggctgacagaagctgagcagttcctgaggaagacccagatccctgagaactgggagcacgccaagtacaagtggtacctgaaggagctgcaggacggcatcggccagaggcagacagtggtgaggaccctgaatgccactggagaggagatcatccagcagagcagcaagacagatgccagcatcctgcaggagaagctgggcagcctgaacctgcgctggcaggaggtgtgcaagcagctgagtgacaggaagaagaggctggaggagcagaagaacatcctgtctgagttccagagggacctgaatgaatttgtgctgtggctggaggaggccgacaacatcgccagcatccccctggagcccgggaaggagcagcagctgaaggagaagctggagcaggtgaagctgctggtggaggagctgcccctgcggcagggcatcctgaagcagctgaatgaaacaggaggccctgtgctggtgtctgcccccatcagccctgaggagcaggacaagctggagaacaagctgaagcagaccaacctgcagtggatcaaggtgtcccgggccctgcctgagaagcagggcgagattgaggcccagatcaaggacctgggccagctggagaagaagctggaggacctggaggagcagctgaaccacctgctgctgtggctgagccccatccggaaccagctggagatctacaaccagcccaaccaggagggcccctttgatgtgaaggagacagaaattgctgtgcaggccaagcagccagatgtggaggagatcctgagcaagggccagcacctgtacaaggagaagccagccacccagcctgtgaagaggaagctggaggacctgagcagcgagtggaaggctgtgaaccggctgctgcaggagctgcgggccaagcagcctgacctggcccctggcctgaccaccatcggggccagccccacccagacagtgaccctggtgacccagcctgtggtgaccaaggagacagccatcagcaagctggagatgcccagcagcctgatgctggaggtgcctgccctggccgacttcaacagagcctggacagagctgacagactggctgagcctgctggaccaggtgatcaagagccagagggtgatggtgggggacctggaggacatcaatgagatgatcatcaagcagaaggccaccatgcaggacctggagcagaggcggccccagctggaggagctgatcacagctgcccagaacctgaagaacaagaccagcaaccaggaggcccggaccatcatcacagaccgcatcgagcgcatccagaaccagtgggatgaggtgcaggagcacctgcagaacagacggcagcagctgaatgagatgctgaaggacagcacccagtggctggaggccaaggaggaggccgagcaggtgctgggccaggcccgggccaagctggagagctggaaggagggcccctacacagtggatgccatccagaagaagatcacagagaccaagcagctggccaaggacctgcggcagtggcagaccaacgtggatgtggccaatgacctggccctgaagctgctgcgggactacagcgcagatgacaccaggaaggtgcacatgatcacagagaacatcaatgcctcctggaggagcatccacaagagggtgtctgagcgggaggccgccctggaggagacccaccggctgctgcagcagttccccctggacctggagaagttcctggcctggctgacagaggccgagaccacagccaacgtgctgcaggatgccaccaggaaggagcggctgctggaggacagcaaaggagtgaaggagctgatgaagcagtggcaggacctgcagggcgagattgaggcccacacagatgtgtaccacaacctggatgagaacagccagaagatcctgcggagcctggagggcagtgatgatgctgtgctgctgcagaggcggctggacaacatgaacttcaagtggagcgagctgaggaagaagagcctgaacatccgcagccacctggaggccagcagtgaccagtggaagaggctgcacctgagcctgcaggagctgctggtgtggctgcagctgaaggatgatgagctgagccggcaggcccccatcggcggggacttccctgctgtgcagaagcagaatgatgtgcaccgggccttcaagcgggagctgaagaccaaggagcccgtcatcatgagcaccctggagaccgtgcgcatcttcctgacagagcagcccctggagggcctggagaagctgtaccaggagccccgggagctgcccccagaggagcgggcccagaatgtgacccggctgctgaggaagcaggccgaggaggtgaacacagagtgggagaagctgaacctgcacagcgctgactggcagaggaagattgatgagaccctggagcggctgcgggagctgcaggaggccacagatgagctggacctgaagctgcggcaggccgaggtgatcaagggctcctggcagcctgtgggggacctgctgattgacagcctgcaggaccacctggagaaggtgaaggccctgcggggggagatcgcccccctgaaggaaaatgtgagccacgtgaatgacctggcccggcagctgaccaccctgggcatccagctgagcccctacaacctgagcaccctggaggacctgaacacccgctggaagctgctgcaggtggccgtggaggacagagtgcggcagctgcacgaggcccaccgggactttggacctgccagccagcacttcctgagcacctctgtgcagggcccctgggagcgggccatcagccccaacaaggtgccctactacatcaaccacgagacccagaccacctgctgggaccaccccaagatgacagagctgtaccagagcctggccgacctgaacaacgtgcgcttcagcgcctacagaacagccatgaagctgcggcggctgcagaaggccctgtgcctggacctgctgagcctgtctgctgcctgtgatgccctggaccagcacaacctgaagcagaatgaccagcccatggacatcctgcagatcatcaactgcctgaccaccatctatgaccggctggagcaggagcacaacaacctggtgaatgtgcccctgtgtgtggacatgtgcctgaactggctgctgaatgtgtatgacaccggccgcacaggccgcatccgggtgctgtccttcaagacaggcatcatcagcctgtgcaaggcccacctggaggacaagtaccgctacctgttcaagcaggtggccagcagcacaggcttctgtgaccagaggcggctgggcctgctgctgcatgacagcatccagatcccccggcagctgggggaggtggccagctttggaggcagcaacatcgagcccagcgtgcgcagctgcttccagtttgccaacaacaagccagaaattgaggccgccctcttcctggactggatgaggctggagccccagagcatggtgtggctgcctgtgctgcaccgggtggccgctgctgagacagccaagcaccaggccaagtgcaacatctgcaaggagtgccccatcatcggcttccgctaccgcagcctgaagcacttcaactatgacatctgccagagctgcttcttcagcggccgggtggccaagggccacaagatgcactaccccatggtggagtactgcacccccaccaccagcggagaagatgtgcgggactttgccaaggtgctgaagaacaagttccgcaccaagcgctactttgccaagcaccccaggatgggctacctgcctgtgcagacagtgctggagggggacaacatggagacccctgtgaccctcatcaacttctggcctgtggacagcgccccagccagcagcccccagctgagccatgatgacacccacagcagaattgagcactacgccagccggctggccgagatggagaacagcaatggcagctacctgaatgacagcatcagccccaatgaaagcattgatgatgagcacctgctgatccagcactactgccagagcctgaaccaggacagccccctgagccagcccaggagccctgcccagatcctgatcagcctggagagcgaggagcggggggagctggagcgcatcctggccgacctggaggaggagaacagaaacctgcaggccgagtatgaccggctgaagcagcagcacgagcacaagggcctgagccccctgcccagccccccagagatgatgcccaccagcccccagagccccagagatgctgagctgattgctgaggccaagctgctgcggcagcacaagggccgcctggaggccaggatgcagatcctggaggaccacaacaagcagctggagagccagctgcaccggctgcggcagctgctggagcagccccaggccgaggccaaggtgaatggcaccaccgtgagcagccccagcaccagcctgcagaggagtgacagcagccagcccatgctgctgcgggtggtgggcagccagaccagtgacagcatgggagaggaggacctgctgagccccccccaggacaccagcacaggcctggaggaggtgatggagcagctgaacaacagcttccccagcagccggggcaggaacacccctgggaagcccatgagggaggacaccccctag

SEQ ID NO: 150791 - DNA, 1854 bp, synthetic construct
  misc_feature 1..1854: note = Description of Artificial Sequence: Synthetic coding sequence
  source 1..1854: mol_type = other DNA
atgagggagcagctgaagggccacgagacccagaccacctgctgggaccaccccaagatgacagagctgtaccagagcctggccgacctgaacaacgtgcgcttcagcgcctacagaacagccatgaagctgcggcggctgcagaaggccctgtgcctggacctgctgagcctgtctgctgcctgtgatgccctggaccagcacaacctgaagcagaatgaccagcccatggacatcctgcagatcatcaactgcctgaccaccatctatgaccggctggagcaggagcacaacaacctggtgaatgtgcccctgtgtgtggacatgtgcctgaactggctgctgaatgtgtatgacaccggccgcacaggccgcatccgggtgctgtccttcaagacaggcatcatcagcctgtgcaaggcccacctggaggacaagtaccgctacctgttcaagcaggtggccagcagcacaggcttctgtgaccagaggcggctgggcctgctgctgcatgacagcatccagatcccccggcagctgggggaggtggccagctttggaggcagcaacatcgagcccagcgtgcgcagctgcttccagtttgccaacaacaagccagaaattgaggccgccctcttcctggactggatgaggctggagccccagagcatggtgtggctgcctgtgctgcaccgggtggccgctgctgagacagccaagcaccaggccaagtgcaacatctgcaaggagtgccccatcatcggcttccgctaccgcagcctgaagcacttcaactatgacatctgccagagctgcttcttcagcggccgggtggccaagggccacaagatgcactaccccatggtggagtactgcacccccaccaccagcggagaagatgtgcgggactttgccaaggtgctgaagaacaagttccgcaccaagcgctactttgccaagcaccccaggatgggctacctgcctgtgcagacagtgctggagggggacaacatggagacccctgtgaccctcatcaacttctggcctgtggacagcgccccagccagcagcccccagctgagccatgatgacacccacagcagaattgagcactacgccagccggctggccgagatggagaacagcaatggcagctacctgaatgacagcatcagccccaatgaaagcattgatgatgagcacctgctgatccagcactactgccagagcctgaaccaggacagccccctgagccagcccaggagccctgcccagatcctgatcagcctggagagcgaggagcggggggagctggagcgcatcctggccgacctggaggaggagaacagaaacctgcaggccgagtatgaccggctgaagcagcagcacgagcacaagggcctgagccccctgcccagccccccagagatgatgcccaccagcccccagagccccagagatgctgagctgattgctgaggccaagctgctgcggcagcacaagggccgcctggaggccaggatgcagatcctggaggaccacaacaagcagctggagagccagctgcaccggctgcggcagctgctggagcagccccaggccgaggccaaggtgaatggcaccaccgtgagcagccccagcaccagcctgcagaggagtgacagcagccagcccatgctgctgcgggtggtgggcagccagaccagtgacagcatgggagaggaggacctgctgagccccccccaggacaccagcacaggcctggaggaggtgatggagcagctgaacaacagcttccccagcagccggggcaggaacacccctgggaagcccatgagggaggacaccatgtag

SEQ ID NO: 150792 - DNA, 3678 bp, synthetic construct
  misc_feature 1..3678: note = Description of Artificial Sequence: Synthetic coding sequence
  source 1..3678: mol_type = other DNA
atgcccagcagcctgatgctggaggtgcctgccctggccgacttcaacagagcctggacagagctgacagactggctgagcctgctggaccaggtgatcaagagccagagggtgatggtgggggacctggaggacatcaatgagatgatcatcaagcagaaggccaccatgcaggacctggagcagaggcggccccagctggaggagctgatcacagctgcccagaacctgaagaacaagaccagcaaccaggaggcccggaccatcatcacagaccgcatcgagcgcatccagaaccagtgggatgaggtgcaggagcacctgcagaacagacggcagcagctgaatgagatgctgaaggacagcacccagtggctggaggccaaggaggaggccgagcaggtgctgggccaggcccgggccaagctggagagctggaaggagggcccctacacagtggatgccatccagaagaagatcacagagaccaagcagctggccaaggacctgcggcagtggcagaccaacgtggatgtggccaatgacctggccctgaagctgctgcgggactacagcgcagatgacaccaggaaggtgcacatgatcacagagaacatcaatgcctcctggaggagcatccacaagagggtgtctgagcgggaggccgccctggaggagacccaccggctgctgcagcagttccccctggacctggagaagttcctggcctggctgacagaggccgagaccacagccaacgtgctgcaggatgccaccaggaaggagcggctgctggaggacagcaaaggagtgaaggagctgatgaagcagtggcaggacctgcagggcgagattgaggcccacacagatgtgtaccacaacctggatgagaacagccagaagatcctgcggagcctggagggcagtgatgatgctgtgctgctgcagaggcggctggacaacatgaacttcaagtggagcgagctgaggaagaagagcctgaacatccgcagccacctggaggccagcagtgaccagtggaagaggctgcacctgagcctgcaggagctgctggtgtggctgcagctgaaggatgatgagctgagccggcaggcccccatcggcggggacttccctgctgtgcagaagcagaatgatgtgcaccgggccttcaagcgggagctgaagaccaaggagcccgtcatcatgagcaccctggagaccgtgcgcatcttcctgacagagcagcccctggagggcctggagaagctgtaccaggagccccgggagctgcccccagaggagcgggcccagaatgtgacccggctgctgaggaagcaggccgaggaggtgaacacagagtgggagaagctgaacctgcacagcgctgactggcagaggaagattgatgagaccctggagcggctgcgggagctgcaggaggccacagatgagctggacctgaagctgcggcaggccgaggtgatcaagggctcctggcagcctgtgggggacctgctgattgacagcctgcaggaccacctggagaaggtgaaggccctgcggggggagatcgcccccctgaaggaaaatgtgagccacgtgaatgacctggcccggcagctgaccaccctgggcatccagctgagcccctacaacctgagcaccctggaggacctgaacacccgctggaagctgctgcaggtggccgtggaggacagagtgcggcagctgcacgaggcccaccgggactttggacctgccagccagcacttcctgagcacctctgtgcagggcccctgggagcgggccatcagccccaacaaggtgccctactacatcaaccacgagacccagaccacctgctgggaccaccccaagatgacagagctgtaccagagcctggccgacctgaacaacgtgcgcttcagcgcctacagaacagccatgaagctgcggcggctgcagaaggccctgtgcctggacctgctgagcctgtctgctgcctgtgatgccctggaccagcacaacctgaagcagaatgaccagcccatggacatcctgcagatcatcaactgcctgaccaccatctatgaccggctggagcaggagcacaacaacctggtgaatgtgcccctgtgtgtggacatgtgcctgaactggctgctgaatgtgtatgacaccggccgcacaggccgcatccgggtgctgtccttcaagacaggcatcatcagcctgtgcaaggcccacctggaggacaagtaccgctacctgttcaagcaggtggccagcagcacaggcttctgtgaccagaggcggctgggcctgctgctgcatgacagcatccagatcccccggcagctgggggaggtggccagctttggaggcagcaacatcgagcccagcgtgcgcagctgcttccagtttgccaacaacaagccagaaattgaggccgccctcttcctggactggatgaggctggagccccagagcatggtgtggctgcctgtgctgcaccgggtggccgctgctgagacagccaagcaccaggccaagtgcaacatctgcaaggagtgccccatcatcggcttccgctaccgcagcctgaagcacttcaactatgacatctgccagagctgcttcttcagcggccgggtggccaagggccacaagatgcactaccccatggtggagtactgcacccccaccaccagcggagaagatgtgcgggactttgccaaggtgctgaagaacaagttccgcaccaagcgctactttgccaagcaccccaggatgggctacctgcctgtgcagacagtgctggagggggacaacatggagacccctgtgaccctcatcaacttctggcctgtggacagcgccccagccagcagcccccagctgagccatgatgacacccacagcagaattgagcactacgccagccggctggccgagatggagaacagcaatggcagctacctgaatgacagcatcagccccaatgaaagcattgatgatgagcacctgctgatccagcactactgccagagcctgaaccaggacagccccctgagccagcccaggagccctgcccagatcctgatcagcctggagagcgaggagcggggggagctggagcgcatcctggccgacctggaggaggagaacagaaacctgcaggccgagtatgaccggctgaagcagcagcacgagcacaagggcctgagccccctgcccagccccccagagatgatgcccaccagcccccagagccccagagatgctgagctgattgctgaggccaagctgctgcggcagcacaagggccgcctggaggccaggatgcagatcctggaggaccacaacaagcagctggagagccagctgcaccggctgcggcagctgctggagcagccccaggccgaggccaaggtgaatggcaccaccgtgagcagccccagcaccagcctgcagaggagtgacagcagccagcccatgctgctgcgggtggtgggcagccagaccagtgacagcatgggagaggaggacctgctgagccccccccaggacaccagcacaggcctggaggaggtgatggagcagctgaacaacagcttccccagcagccggggcaggaacacccctgggaagcccatgagggaggacaccatgtag

SEQ ID NO: 150793 - DNA, 1908 bp, synthetic construct
  misc_feature 1..1908: note = Description of Artificial Sequence: Synthetic coding sequence
  source 1..1908: mol_type = other DNA
atgagggagcagctgaagggccacgagacccagaccacctgctgggaccaccccaagatgacagagctgtaccagagcctggccgacctgaacaacgtgcgcttcagcgcctacagaacagccatgaagctgcggcggctgcagaaggccctgtgcctggacctgctgagcctgtctgctgcctgtgatgccctggaccagcacaacctgaagcagaatgaccagcccatggacatcctgcagatcatcaactgcctgaccaccatctatgaccggctggagcaggagcacaacaacctggtgaatgtgcccctgtgtgtggacatgtgcctgaactggctgctgaatgtgtatgacaccggccgcacaggccgcatccgggtgctgtccttcaagacaggcatcatcagcctgtgcaaggcccacctggaggacaagtaccgctacctgttcaagcaggtggccagcagcacaggcttctgtgaccagaggcggctgggcctgctgctgcatgacagcatccagatcccccggcagctgggggaggtggccagctttggaggcagcaacatcgagcccagcgtgcgcagctgcttccagtttgccaacaacaagccagaaattgaggccgccctcttcctggactggatgaggctggagccccagagcatggtgtggctgcctgtgctgcaccgggtggccgctgctgagacagccaagcaccaggccaagtgcaacatctgcaaggagtgccccatcatcggcttccgctaccgcagcctgaagcacttcaactatgacatctgccagagctgcttcttcagcggccgggtggccaagggccacaagatgcactaccccatggtggagtactgcacccccaccaccagcggagaagatgtgcgggactttgccaaggtgctgaagaacaagttccgcaccaagcgctactttgccaagcaccccaggatgggctacctgcctgtgcagacagtgctggagggggacaacatggagacccctgtgaccctcatcaacttctggcctgtggacagcgccccagccagcagcccccagctgagccatgatgacacccacagcagaattgagcactacgccagccggctggccgagatggagaacagcaatggcagctacctgaatgacagcatcagccccaatgaaagcattgatgatgagcacctgctgatccagcactactgccagagcctgaaccaggacagccccctgagccagcccaggagccctgcccagatcctgatcagcctggagagcgaggagcggggggagctggagcgcatcctggccgacctggaggaggagaacagaaacctgcaggccgagtatgaccggctgaagcagcagcacgagcacaagggcctgagccccctgcccagccccccagagatgatgcccaccagcccccagagccccagagatgctgagctgattgctgaggccaagctgctgcggcagcacaagggccgcctggaggccaggatgcagatcctggaggaccacaacaagcagctggagagccagctgcaccggctgcggcagctgctggagcagccccaggccgaggccaaggtgaatggcaccaccgtgagcagccccagcaccagcctgcagaggagtgacagcagccagcccatgctgctgcgggtggtgggcagccagaccagtgacagcatgggagaggaggacctgctgagccccccccaggacaccagcacaggcctggaggaggtgatggagcagctgaacaacagcttccccagcagccggggccacaacgtgggcagcctcttccacatggctgatgacctgggccgggccatggagagcctggtgtctgtgatgacagatgaggagggcgctgagtag

SEQ ID NO: 150794 - DNA, 3732 bp, synthetic construct
  misc_feature 1..3732: note = Description of Artificial Sequence: Synthetic coding sequence
  source 1..3732: mol_type = other DNA
atgcccagcagcctgatgctggaggtgcctgccctggccgacttcaacagagcctggacagagctgacagactggctgagcctgctggaccaggtgatcaagagccagagggtgatggtgggggacctggaggacatcaatgagatgatcatcaagcagaaggccaccatgcaggacctggagcagaggcggccccagctggaggagctgatcacagctgcccagaacctgaagaacaagaccagcaaccaggaggcccggaccatcatcacagaccgcatcgagcgcatccagaaccagtgggatgaggtgcaggagcacctgcagaacagacggcagcagctgaatgagatgctgaaggacagcacccagtggctggaggccaaggaggaggccgagcaggtgctgggccaggcccgggccaagctggagagctggaaggagggcccctacacagtggatgccatccagaagaagatcacagagaccaagcagctggccaaggacctgcggcagtggcagaccaacgtggatgtggccaatgacctggccctgaagctgctgcgggactacagcgcagatgacaccaggaaggtgcacatgatcacagagaacatcaatgcctcctggaggagcatccacaagagggtgtctgagcgggaggccgccctggaggagacccaccggctgctgcagcagttccccctggacctggagaagttcctggcctggctgacagaggccgagaccacagccaacgtgctgcaggatgccaccaggaaggagcggctgctggaggacagcaaaggagtgaaggagctgatgaagcagtggcaggacctgcagggcgagattgaggcccacacagatgtgtaccacaacctggatgagaacagccagaagatcctgcggagcctggagggcagtgatgatgctgtgctgctgcagaggcggctggacaacatgaacttcaagtggagcgagctgaggaagaagagcctgaacatccgcagccacctggaggccagcagtgaccagtggaagaggctgcacctgagcctgcaggagctgctggtgtggctgcagctgaaggatgatgagctgagccggcaggcccccatcggcggggacttccctgctgtgcagaagcagaatgatgtgcaccgggccttcaagcgggagctgaagaccaaggagcccgtcatcatgagcaccctggagaccgtgcgcatcttcctgacagagcagcccctggagggcctggagaagctgtaccaggagccccgggagctgcccccagaggagcgggcccagaatgtgacccggctgctgaggaagcaggccgaggaggtgaacacagagtgggagaagctgaacctgcacagcgctgactggcagaggaagattgatgagaccctggagcggctgcgggagctgcaggaggccacagatgagctggacctgaagctgcggcaggccgaggtgatcaagggctcctggcagcctgtgggggacctgctgattgacagcctgcaggaccacctggagaaggtgaaggccctgcggggggagatcgcccccctgaaggaaaatgtgagccacgtgaatgacctggcccggcagctgaccaccctgggcatccagctgagcccctacaacctgagcaccctggaggacctgaacacccgctggaagctgctgcaggtggccgtggaggacagagtgcggcagctgcacgaggcccaccgggactttggacctgccagccagcacttcctgagcacctctgtgcagggcccctgggagcgggccatcagccccaacaaggtgccctactacatcaaccacgagacccagaccacctgctgggaccaccccaagatgacagagctgtaccagagcctggccgacctgaacaacgtgcgcttcagcgcctacagaacagccatgaagctgcggcggctgcagaaggccctgtgcctggacctgctgagcctgtctgctgcctgtgatgccctggaccagcacaacctgaagcagaatgaccagcccatggacatcctgcagatcatcaactgcctgaccaccatctatgaccggctggagcaggagcacaacaacctggtgaatgtgcccctgtgtgtggacatgtgcctgaactggctgctgaatgtgtatgacaccggccgcacaggccgcatccgggtgctgtccttcaagacaggcatcatcagcctgtgcaaggcccacctggaggacaagtaccgctacctgttcaagcaggtggccagcagcacaggcttctgtgaccagaggcggctgggcctgctgctgcatgacagcatccagatcccccggcagctgggggaggtggccagctttggaggcagcaacatcgagcccagcgtgcgcagctgcttccagtttgccaacaacaagccagaaattgaggccgccctcttcctggactggatgaggctggagccccagagcatggtgtggctgcctgtgctgcaccgggtggccgctgctgagacagccaagcaccaggccaagtgcaacatctgcaaggagtgccccatcatcggcttccgctaccgcagcctgaagcacttcaactatgacatctgccagagctgcttcttcagcggccgggtggccaagggccacaagatgcactaccccatggtggagtactgcacccccaccaccagcggagaagatgtgcgggactttgccaaggtgctgaagaacaagttccgcaccaagcgctactttgccaagcaccccaggatgggctacctgcctgtgcagacagtgctggagggggacaacatggagacccctgtgaccctcatcaacttctggcctgtggacagcgccccagccagcagcccccagctgagccatgatgacacccacagcagaattgagcactacgccagccggctggccgagatggagaacagcaatggcagctacctgaatgacagcatcagccccaatgaaagcattgatgatgagcacctgctgatccagcactactgccagagcctgaaccaggacagccccctgagccagcccaggagccctgcccagatcctgatcagcctggagagcgaggagcggggggagctggagcgcatcctggccgacctggaggaggagaacagaaacctgcaggccgagtatgaccggctgaagcagcagcacgagcacaagggcctgagccccctgcccagccccccagagatgatgcccaccagcccccagagccccagagatgctgagctgattgctgaggccaagctgctgcggcagcacaagggccgcctggaggccaggatgcagatcctggaggaccacaacaagcagctggagagccagctgcaccggctgcggcagctgctggagcagccccaggccgaggccaaggtgaatggcaccaccgtgagcagccccagcaccagcctgcagaggagtgacagcagccagcccatgctgctgcgggtggtgggcagccagaccagtgacagcatgggagaggaggacctgctgagccccccccaggacaccagcacaggcctggaggaggtgatggagcagctgaacaacagcttccccagcagccggggccacaacgtgggcagcctcttccacatggctgatgacctgggccgggccatggagagcctggtgtctgtgatgacagatgaggagggcgctgagtag

SEQ ID NO: 150795 - DNA, 11034 bp, synthetic construct
  misc_feature 1..11034: note = Description of Artificial Sequence: Synthetic coding sequence
  source 1..11034: mol_type = other DNA
atcctggatgagcgggaggatgtgcagaagaagaccttcaccaagtgggtgaatgcccagttcagcaagtttgggaagcagcacatcgagaacctcttcagtgacctgcaggacggccggcggctgctggacctgctggagggcctgaccggccagaagctgcccaaggagaagggcagcaccagggtgcacgccctgaacaacgtgaacaaggccctgcgggtgctgcagaacaacaacgtggacctggtgaacatcggcagcacagacatcgtggatggcaaccacaagctgaccctgggcctcatctggaacatcatcctgcactggcaggtgaagaatgtgatgaagaacatcatggccggcctgcagcagaccaacagcgagaagatcctgctgtcctgggtgcggcagagcaccaggaactacccccaggtgaatgtcatcaacttcaccacctcctggagcgatggcctggccctgaatgccctgatccacagccacaggccagacctgtttgactggaacagcgtggtgtgccagcagagcgccacccagaggctggagcacgccttcaacatcgcccgctaccagctgggcatcgagaagctgctggaccctgaagatgtggacaccacctacccagacaagaagagcatcctgatgtacatcaccagcctcttccaggtgctgccccagcaggtgtccattgaggccatccaggaggtggagatgctgcccaggcctcccaaggtgaccaaggaggagcacttccagctgcaccaccagatgcactacagccagcagatcaccgtgtccctggcccagggctatgaaagaaccagcagccccaagccccgcttcaagagctatgcctacacccaggccgcctacgtgaccaccagtgaccccaccaggagccccttccccagccagcacctggaggcccctgaggacaagagctttggcagcagcctgatggagagcgaggtgaacctggaccgctaccagacagccctggaggaggtgctgtcctggctgctgtctgctgaggacaccctgcaggcccagggcgagatcagcaatgatgtggaggtggtgaaggaccagttccacacccatgagggctacatgatggacctgacagcccaccagggccgggtgggcaacatcctgcagctgggcagcaagctgattggaacaggcaagctgtctgaagatgaggagacagaggtgcaggagcagatgaacctgctgaacagccgctgggagtgcctgcgggtggcctccatggagaagcagagcaacctgcaccgggtgctgatggacctgcagaaccagaagctgaaggagctgaatgactggctgaccaagacagaggagaggaccaggaagatggaggaggagcccctgggccctgacctggaggacctgaagaggcaggtgcagcagcacaaggtgctgcaggaggacctggagcaggagcaggtgcgggtgaacagcctgacccacatggtggtggtggtggatgagagcagcggggaccacgccacagctgccctggaggagcagctgaaggtgctgggggaccgctgggccaacatctgccgctggacagaggaccgctgggtgctgctgcaggacatcctgctgaagtggcagaggctgacagaggagcagtgcctcttcagcgcctggctgtctgagaaggaggatgctgtgaacaagatccacaccaccggcttcaaggaccagaatgagatgctgagcagcctgcagaagctggccgtgctgaaggctgacctggagaagaagaagcagagcatgggcaagctgtacagcctgaagcaggacctgctgagcaccctgaagaacaagtctgtgacccagaagacagaggcctggctggacaactttgcccgctgctgggacaacctggtgcagaagctggagaagagcacagcccagatcagccaggccgtgaccaccacccagcccagcctgacccagaccaccgtgatggagaccgtgaccaccgtgaccacccgggagcagatcctggtgaagcacgcccaggaggagctgcccccacctccaccccagaagaagaggcagatcaccgtggacagcgagatcaggaagaggctggatgtggacatcacagagctgcacagctggatcaccaggtctgaggccgtgctgcagagccctgagtttgccatcttcaggaaggagggcaacttcagtgacctgaaggagaaggtgaatgccatcgagcgggagaaggccgagaagttcaggaagctgcaggatgccagccgcagcgcccaggccctggtggagcagatggtgaatgaaggagtgaatgctgacagcatcaagcaggccagcgagcagctgaacagccgctggattgagttctgccagctgctgtctgagcggctgaactggctggagtaccagaacaacatcatcgccttctacaaccagctgcagcagctggagcagatgaccaccacagctgagaactggctgaagatccagcccaccaccccatctgagcccacagccatcaagagccagctgaagatctgcaaggatgaggtgaaccggctgagtgacctgcagccccagatcgagcggctgaagatccagagcatcgccctgaaggagaagggccagggccccatgttcctggatgctgactttgtggccttcaccaaccacttcaagcaggtgttcagtgatgtgcaggcccgggagaaggagctgcagaccatctttgacaccctgccccccatgagataccaggagaccatgtctgccatccgcacctgggtgcagcagagcgagaccaagctgagcatcccccagctgtctgtgacagattatgagatcatggagcagaggctgggggagctgcaggccctgcagagcagcctgcaggagcagcagagcggcctgtactacctgagcaccaccgtgaaggagatgagcaagaaggcccccagcgagatcagcaggaagtaccagagcgagtttgaggagattgagggccgctggaagaagctgagcagccagctggtggagcactgccagaagctggaggagcagatgaacaagctgaggaagatccagaaccacatccagaccctgaagaagtggatggccgaggtggatgtgttcctgaaggaggagtggccagccctgggggacagcgagatcctgaagaagcagctgaagcagtgccgcctgctggtgtctgacatccagaccatccagcccagcctgaacagcgtgaatgaaggaggccagaagatcaagaatgaagctgagcctgagtttgccagccggctggagacagagctgaaggagctgaacacccagtgggaccacatgtgccagcaggtgtatgccaggaaggaggccctgaagggcggcctggagaagacagtgtccctgcagaaggacctgtctgagatgcatgagtggatgacccaggccgaggaggagtacctggagcgggactttgagtacaagaccccagatgagctgcagaaggctgtggaggagatgaagagggccaaggaggaggcccagcagaaggaggccaaggtgaagctgctgacagagagcgtgaacagcgtgattgcccaggcccctcctgtggcccaggaggccctgaagaaggagctggagaccctgaccaccaactaccagtggctgtgcacccggctgaatggcaagtgcaagaccctggaggaggtgtgggcctgctggcatgagctgctgagctacctggagaaggccaacaagtggctgaatgaggtggagttcaagctgaagaccacagagaacatccctgggggcgctgaggagatcagcgaggtgctggacagcctggagaacctgatgaggcacagcgaggacaaccccaaccagatccgcatcctggcccagaccctgacagatggcggcgtgatggatgagctgatcaatgaggagctggagaccttcaacagccgctggagggagctgcacgaggaggccgtgcggcggcagaagctgctggagcagagcatccagagcgcccaggagacagagaagagcctgcacctgatccaggagagcctgaccttcatcgacaagcagctggccgcctacatcgctgacaaggtggatgctgcccagatgccccaggaggcccagaagatccagagcgacctgaccagccatgagatcagcctggaggagatgaagaagcacaaccagggcaaggaggccgcccagagggtgctgagccagattgatgtggcccagaagaagctgcaggatgtgtccatgaagttccgcctcttccagaagccagccaactttgagcagaggctgcaggagagcaagatgatcctggatgaggtgaagatgcacctgcctgccctggagaccaagtctgtggagcaggaggtggtgcagagccagctgaaccactgtgtgaacctgtacaagagcctgtctgaggtgaagtctgaggtggagatggtgatcaagacaggccggcagatcgtgcagaagaagcagacagagaaccccaaggagctggatgagcgggtgacagccctgaagctgcactacaatgagctgggcgccaaggtgacagagaggaagcagcagctggagaagtgcctgaagctgagcaggaagatgaggaaggagatgaatgtgctgacagagtggctggccgccacagacatggagctgaccaagaggtctgctgtggagggcatgcccagcaacctggacagcgaggtggcctggggcaaggccacccagaaggagattgagaagcagaaggtgcacctgaagagcatcacagaggtgggggaggccctgaagacagtgctgggcaagaaggagaccctggtggaggacaagctgagcctgctgaacagcaactggattgctgtgaccagcagagctgaggagtggctgaacctgctgctggagtaccagaagcacatggagacctttgaccagaatgtggaccacatcaccaagtggatcatccaggccgacaccctgctggatgaaagtgagaagaagaagccccagcagaaggaggatgtgctgaagaggctgaaggccgagctgaatgacatccggcccaaggtggacagcacccgggaccaggccgccaacctgatggccaacagaggagaccactgcaggaagctggtggagccccagatcagcgagctgaaccacagatttgctgccatcagccaccgcatcaagacaggcaaggccagcatccccctgaaggagctggagcagttcaacagcgacatccagaagctgctggagcccctggaggccgagatccagcagggcgtgaacctgaaggaggaggacttcaacaaggacatgaatgaagataatgaaggaacagtgaaggagctgctgcagagaggagacaacctgcagcagaggatcacagatgagaggaagcgggaggagatcaagatcaagcagcagctgctgcagaccaagcacaatgccctgaaggacctgcggagccagaggaggaagaaggccctggagatcagccaccagtggtaccagtacaagaggcaggctgatgacctgctgaagtgcctggatgacatcgagaagaagctggccagcctgcctgagcccagagatgagaggaagatcaaggagattgaccgggagctgcagaagaagaaggaggagctgaatgctgtgcggcggcaggccgagggcctgtctgaagatggagctgccatggctgtggagcccacccagatccagctgagcaagcgctggagagaaattgagagcaagtttgcccagttccggcggctgaactttgcccagatccacacagtgcgggaggagaccatgatggtgatgacagaggacatgcccctggagatctcctatgtgcccagcacctacctgacagagatcacccacgtgtcccaggccctgctggaggtggagcagctgctgaatgccccagacctgtgtgccaaggactttgaagatctcttcaagcaggaggagagcctgaagaacatcaaggacagcctgcagcagagcagcggcagaattgacatcatccacagcaagaagacagctgccctgcagagcgccacccctgtggagcgggtgaagctgcaggaggccctgagccagctggacttccagtgggagaaggtgaacaagatgtacaaggaccggcagggccgctttgacagatctgtggagaagtggaggcgcttccactatgacatcaagatcttcaaccagtggctgacagaagctgagcagttcctgaggaagacccagatccctgagaactgggagcacgccaagtacaagtggtacctgaaggagctgcaggacggcatcggccagaggcagacagtggtgaggaccctgaatgccactggagaggagatcatccagcagagcagcaagacagatgccagcatcctgcaggagaagctgggcagcctgaacctgcgctggcaggaggtgtgcaagcagctgagtgacaggaagaagaggctggaggagcagaagaacatcctgtctgagttccagagggacctgaatgaatttgtgctgtggctggaggaggccgacaacatcgccagcatccccctggagcccgggaaggagcagcagctgaaggagaagctggagcaggtgaagctgctggtggaggagctgcccctgcggcagggcatcctgaagcagctgaatgaaacaggaggccctgtgctggtgtctgcccccatcagccctgaggagcaggacaagctggagaacaagctgaagcagaccaacctgcagtggatcaaggtgtcccgggccctgcctgagaagcagggcgagattgaggcccagatcaaggacctgggccagctggagaagaagctggaggacctggaggagcagctgaaccacctgctgctgtggctgagccccatccggaaccagctggagatctacaaccagcccaaccaggagggcccctttgatgtgaaggagacagaaattgctgtgcaggccaagcagccagatgtggaggagatcctgagcaagggccagcacctgtacaaggagaagccagccacccagcctgtgaagaggaagctggaggacctgagcagcgagtggaaggctgtgaaccggctgctgcaggagctgcgggccaagcagcctgacctggcccctggcctgaccaccatcggggccagccccacccagacagtgaccctggtgacccagcctgtggtgaccaaggagacagccatcagcaagctggagatgcccagcagcctgatgctggaggtgcctgccctggccgacttcaacagagcctggacagagctgacagactggctgagcctgctggaccaggtgatcaagagccagagggtgatggtgggggacctggaggacatcaatgagatgatcatcaagcagaaggccaccatgcaggacctggagcagaggcggccccagctggaggagctgatcacagctgcccagaacctgaagaacaagaccagcaaccaggaggcccggaccatcatcacagaccgcatcgagcgcatccagaaccagtgggatgaggtgcaggagcacctgcagaacagacggcagcagctgaatgagatgctgaaggacagcacccagtggctggaggccaaggaggaggccgagcaggtgctgggccaggcccgggccaagctggagagctggaaggagggcccctacacagtggatgccatccagaagaagatcacagagaccaagcagctggccaaggacctgcggcagtggcagaccaacgtggatgtggccaatgacctggccctgaagctgctgcgggactacagcgcagatgacaccaggaaggtgcacatgatcacagagaacatcaatgcctcctggaggagcatccacaagagggtgtctgagcgggaggccgccctggaggagacccaccggctgctgcagcagttccccctggacctggagaagttcctggcctggctgacagaggccgagaccacagccaacgtgctgcaggatgccaccaggaaggagcggctgctggaggacagcaaaggagtgaaggagctgatgaagcagtggcaggacctgcagggcgagattgaggcccacacagatgtgtaccacaacctggatgagaacagccagaagatcctgcggagcctggagggcagtgatgatgctgtgctgctgcagaggcggctggacaacatgaacttcaagtggagcgagctgaggaagaagagcctgaacatccgcagccacctggaggccagcagtgaccagtggaagaggctgcacctgagcctgcaggagctgctggtgtggctgcagctgaaggatgatgagctgagccggcaggcccccatcggcggggacttccctgctgtgcagaagcagaatgatgtgcaccgggccttcaagcgggagctgaagaccaaggagcccgtcatcatgagcaccctggagaccgtgcgcatcttcctgacagagcagcccctggagggcctggagaagctgtaccaggagccccgggagctgcccccagaggagcgggcccagaatgtgacccggctgctgaggaagcaggccgaggaggtgaacacagagtgggagaagctgaacctgcacagcgctgactggcagaggaagattgatgagaccctggagcggctgcgggagctgcaggaggccacagatgagctggacctgaagctgcggcaggccgaggtgatcaagggctcctggcagcctgtgggggacctgctgattgacagcctgcaggaccacctggagaaggtgaaggccctgcggggggagatcgcccccctgaaggaaaatgtgagccacgtgaatgacctggcccggcagctgaccaccctgggcatccagctgagcccctacaacctgagcaccctggaggacctgaacacccgctggaagctgctgcaggtggccgtggaggacagagtgcggcagctgcacgaggcccaccgggactttggacctgccagccagcacttcctgagcacctctgtgcagggcccctgggagcgggccatcagccccaacaaggtgccctactacatcaaccacgagacccagaccacctgctgggaccaccccaagatgacagagctgtaccagagcctggccgacctgaacaacgtgcgcttcagcgcctacagaacagccatgaagctgcggcggctgcagaaggccctgtgcctggacctgctgagcctgtctgctgcctgtgatgccctggaccagcacaacctgaagcagaatgaccagcccatggacatcctgcagatcatcaactgcctgaccaccatctatgaccggctggagcaggagcacaacaacctggtgaatgtgcccctgtgtgtggacatgtgcctgaactggctgctgaatgtgtatgacaccggccgcacaggccgcatccgggtgctgtccttcaagacaggcatcatcagcctgtgcaaggcccacctggaggacaagtaccgctacctgttcaagcaggtggccagcagcacaggcttctgtgaccagaggcggctgggcctgctgctgcatgacagcatccagatcccccggcagctgggggaggtggccagctttggaggcagcaacatcgagcccagcgtgcgcagctgcttccagtttgccaacaacaagccagaaattgaggccgccctcttcctggactggatgaggctggagccccagagcatggtgtggctgcctgtgctgcaccgggtggccgctgctgagacagccaagcaccaggccaagtgcaacatctgcaaggagtgccccatcatcggcttccgctaccgcagcctgaagcacttcaactatgacatctgccagagctgcttcttcagcggccgggtggccaagggccacaagatgcactaccccatggtggagtactgcacccccaccaccagcggagaagatgtgcgggactttgccaaggtgctgaagaacaagttccgcaccaagcgctactttgccaagcaccccaggatgggctacctgcctgtgcagacagtgctggagggggacaacatggagacccctgtgaccctcatcaacttctggcctgtggacagcgccccagccagcagcccccagctgagccatgatgacacccacagcagaattgagcactacgccagccggctggccgagatggagaacagcaatggcagctacctgaatgacagcatcagccccaatgaaagcattgatgatgagcacctgctgatccagcactactgccagagcctgaaccaggacagccccctgagccagcccaggagccctgcccagatcctgatcagcctggagagcgaggagcggggggagctggagcgcatcctggccgacctggaggaggagaacagaaacctgcaggccgagtatgaccggctgaagcagcagcacgagcacaagggcctgagccccctgcccagccccccagagatgatgcccaccagcccccagagccccagagatgctgagctgattgctgaggccaagctgctgcggcagcacaagggccgcctggaggccaggatgcagatcctggaggaccacaacaagcagctggagagccagctgcaccggctgcggcagctgctggagcagccccaggccgaggccaaggtgaatggcaccaccgtgagcagccccagcaccagcctgcagaggagtgacagcagccagcccatgctgctgcgggtggtgggcagccagaccagtgacagcatgggagaggaggacctgctgagccccccccaggacaccagcacaggcctggaggaggtgatggagcagctgaacaacagcttccccagcagccggggcaggaacacccctgggaagcccatgagggaggacaccccctag

SEQ ID NO: 150796 - DNA, 10689 bp, synthetic construct
  misc_feature 1..10689: note = Description of Artificial Sequence: Synthetic coding sequence
  source 1..10689: mol_type = other DNA
atgaagaacatcatggccggcctgcagcagaccaacagcgagaagatcctgctgtcctgggtgcggcagagcaccaggaactacccccaggtgaatgtcatcaacttcaccacctcctggagcgatggcctggccctgaatgccctgatccacagccacaggccagacctgtttgactggaacagcgtggtgtgccagcagagcgccacccagaggctggagcacgccttcaacatcgcccgctaccagctgggcatcgagaagctgctggaccctgaagatgtggacaccacctacccagacaagaagagcatcctgatgtacatcaccagcctcttccaggtgctgccccagcaggtgtccattgaggccatccaggaggtggagatgctgccccggccccccaaggtgaccaaggaggagcacttccagctgcaccaccagatgcactacagccagcagatcaccgtgtccctggcccagggctatgaaagaaccagcagccccaagccccgcttcaagagctatgcctacacccaggccgcctacgtgaccaccagtgaccccaccaggagccccttccccagccagcacctggaggcccctgaggacaagagctttggcagcagcctgatggagagcgaggtgaacctggaccgctaccagacagccctggaggaggtgctgtcctggctgctgtctgctgaggacaccctgcaggcccagggcgagatcagcaatgatgtggaggtggtgaaggaccagttccacacccatgagggctacatgatggacctgacagcccaccagggccgggtgggcaacatcctgcagctgggcagcaagctgattggcaccgggaagctgtctgaagatgaggagacagaggtgcaggagcagatgaacctgctgaacagccgctgggagtgcctgcgggtggcctccatggagaagcagagcaacctgcaccgggtgctgatggacctgcagaaccagaagctgaaggagctgaatgactggctgaccaagacagaggagaggaccaggaagatggaggaggagcccctgggccctgacctggaggacctgaagaggcaggtgcagcagcacaaggtgctgcaggaggacctggagcaggagcaggtgcgggtgaacagcctgacccacatggtggtggtggtggatgagagcagcggggaccacgccacagctgccctggaggagcagctgaaggtgctgggggaccgctgggccaacatctgccgctggacagaagatcgctgggtgctgctgcaggacatcctgctgaagtggcagaggctgacagaggagcagtgcctcttcagcgcctggctgtctgagaaggaggatgctgtgaacaagatccacaccaccggcttcaaggaccagaatgagatgctgagcagcctgcagaagctggccgtgctgaaggctgacctggagaagaagaagcagagcatgggcaagctgtacagcctgaagcaggacctgctgagcaccctgaagaacaagtctgtgacccagaagacagaggcctggctggacaactttgcccgctgctgggacaacctggtgcagaagctggagaagagcacagcccagatcagccaggccgtgaccaccacccagcccagcctgacccagaccaccgtgatggagaccgtgaccaccgtgaccacccgggagcagatcctggtgaagcacgcccaggaggagctgcccccacctccaccccagaagaagaggcagatcaccgtggacagcgagatcaggaagaggctggatgtggacatcacagagctgcacagctggatcaccaggtctgaggccgtgctgcagagccctgagtttgccatcttcaggaaggagggcaacttcagtgacctgaaggagaaggtgaatgccatcgagcgggagaaggccgagaagttcaggaagctgcaggatgccagccgcagcgcccaggccctggtggagcagatggtgaatgaaggagtgaatgctgacagcatcaagcaggccagcgagcagctgaacagccgctggattgagttctgccagctgctgtctgagcggctgaactggctggagtaccagaacaacatcatcgccttctacaaccagctgcagcagctggagcagatgaccaccacagctgagaactggctgaagatccagcccaccacccccagcgagcccacagccatcaagagccagctgaagatctgcaaggatgaggtgaaccggctgagtgacctgcagccccagatcgagcggctgaagatccagagcatcgccctgaaggagaagggccagggccccatgttcctggatgctgactttgtggccttcaccaaccacttcaagcaggtgttcagtgatgtgcaggcccgggagaaggagctgcagaccatctttgacaccctgccccccatgagataccaggagaccatgtctgccatccgcacctgggtgcagcagagcgagaccaagctgagcatcccccagctgtctgtgacagattatgagatcatggagcagaggctgggggagctgcaggccctgcagagcagcctgcaggagcagcagagcggcctgtactacctgagcaccaccgtgaaggagatgagcaagaaggcccccagcgagatcagcaggaagtaccagagcgagtttgaggagattgagggccgctggaagaagctgagcagccagctggtggagcactgccagaagctggaggagcagatgaacaagctgaggaagatccagaaccacatccagaccctgaagaagtggatggccgaggtggatgtgttcctgaaggaggagtggccagccctgggggacagcgagatcctgaagaagcagctgaagcagtgccgcctgctggtgtctgacatccagaccatccagcccagcctgaacagcgtgaatgaaggaggccagaagatcaagaatgaggccgagcctgagtttgccagccggctggagacagagctgaaggagctgaacacccagtgggaccacatgtgccagcaggtgtatgccaggaaggaggccctgaagggcggcctggagaagacagtgtccctgcagaaggacctgtctgagatgcatgagtggatgacccaggccgaggaggagtacctggagcgggactttgagtacaagaccccagatgagctgcagaaggctgtggaggagatgaagagggccaaggaggaggcccagcagaaggaggccaaggtgaagctgctgacagaatctgtgaacagcgtcatcgcccaggcccctcctgtggcccaggaggccctgaagaaggagctggagaccctgaccaccaactaccagtggctgtgcacccggctgaatggcaagtgcaagaccctggaggaggtgtgggcctgctggcatgagctgctgagctacctggagaaggccaacaagtggctgaatgaggtggagttcaagctgaagaccacagagaacatccctggaggagctgaggagatcagcgaggtgctggacagcctggagaacctgatgaggcacagcgaggacaaccccaaccagatccgcatcctggcccagaccctgacagatggaggagtgatggatgagctgatcaatgaggagctggagaccttcaacagccgctggagggagctgcacgaggaggccgtgcggcggcagaagctgctggagcagagcatccagagcgcccaggagacagagaagagcctgcacctgatccaggagagcctgaccttcatcgacaagcagctggccgcctacatcgctgacaaggtggatgctgcccagatgccccaggaggcccagaagatccagagcgacctgaccagccatgagatcagcctggaggagatgaagaagcacaaccagggcaaggaggccgcccagagggtgctgagccagattgatgtggcccagaagaagctgcaggatgtgtccatgaagttccgcctcttccagaagccagccaactttgagcagaggctgcaggagagcaagatgatcctggatgaggtgaagatgcacctgcctgccctggagaccaagtctgtggagcaggaggtggtgcagagccagctgaaccactgtgtgaacctgtacaagagcctgtctgaggtgaagtctgaggtggagatggtgatcaagacaggccggcagatcgtgcagaagaagcagacagagaaccccaaggagctggatgagcgggtgacagccctgaagctgcactacaatgagctgggcgccaaggtgacagagaggaagcagcagctggagaagtgcctgaagctgagcaggaagatgaggaaggagatgaatgtgctgacagagtggctggccgccacagacatggagctgaccaagaggtctgctgtggagggcatgcccagcaacctggacagcgaggtggcctggggcaaggccacccagaaggagattgagaagcagaaggtgcacctgaagagcatcacagaggtgggggaggccctgaagacagtgctgggcaagaaggagaccctggtggaggacaagctgagcctgctgaacagcaactggattgctgtgaccagcagagctgaggagtggctgaacctgctgctggagtaccagaagcacatggagacctttgaccagaatgtggaccacatcaccaagtggatcatccaggccgacaccctgctggatgagagcgagaagaagaagccccagcagaaggaggatgtgctgaagaggctgaaggccgagctgaatgacatccggcccaaggtggacagcacccgggaccaggccgccaacctgatggccaacagaggagaccactgcaggaagctggtggagccccagatcagcgagctgaaccacagatttgctgccatcagccaccgcatcaagacaggcaaggccagcatccccctgaaggagctggagcagttcaacagcgacatccagaagctgctggagcccctggaggccgagatccagcagggcgtgaacctgaaggaggaggacttcaacaaggacatgaatgaagataatgaaggcaccgtgaaggagctgctgcagagaggagacaacctgcagcagaggatcacagatgagaggaagcgggaggagatcaagatcaagcagcagctgctgcagaccaagcacaatgccctgaaggacctgcggagccagaggaggaagaaggccctggagatcagccaccagtggtaccagtacaagaggcaggctgatgacctgctgaagtgcctggatgacatcgagaagaagctggccagcctgcctgagcccagagatgagaggaagatcaaggagattgaccgggagctgcagaagaagaaggaggagctgaatgctgtgcggcggcaggccgagggcctgtctgaagatggagctgccatggctgtggagcccacccagatccagctgagcaagcgctggagagaaattgagagcaagtttgcccagttccggcggctgaactttgcccagatccacacagtgcgggaggagaccatgatggtgatgacagaggacatgcccctggagatctcctatgtgcccagcacctacctgacagagatcacccacgtgtcccaggccctgctggaggtggagcagctgctgaatgccccagacctgtgtgccaaggactttgaggacctcttcaagcaggaggagagcctgaagaacatcaaggacagcctgcagcagagcagcggcagaattgacatcatccacagcaagaagacagctgccctgcagagcgccacccctgtggagcgggtgaagctgcaggaggccctgagccagctggacttccagtgggagaaggtgaacaagatgtacaaggaccggcagggccgctttgacagatctgtggagaagtggaggcgcttccactatgacatcaagatcttcaaccagtggctgacagaggccgagcagttcctgaggaagacccagatccctgagaactgggagcacgccaagtacaagtggtacctgattgccctgaaggatggcatcggccagaggcagacagtggtgaggaccctgaatgccaccggggaggagatcatccagcagagcagcaagacagatgccagcatcctgcaggagaagctgggcagcctgaacctgcgctggcaggaggtgtgcaagcagctgagtgacaggaagaagaggctggaggagcagaagaacatcctgtctgagttccagagggacctgaatgaatttgtgctgtggctggaggaggccgacaacatcgccagcatccccctggagcccgggaaggagcagcagctgaaggagaagctggagcaggtgaagctgctggtggaggagctgcccctgcggcagggcatcctgaagcagctgaatgagaccggcggccctgtgctggtgtctgcccccatcagccctgaggagcaggacaagctggagaacaagctgaagcagaccaacctgcagtggatcaaggtgtcccgggccctgcctgagaagcagggcgagattgaggcccagatcaaggacctgggccagctggagaagaagctggaggacctggaggagcagctgaaccacctgctgctgtggctgagccccatccggaaccagctggagatctacaaccagcccaaccaggagggcccctttgatgtgaaggagacagaaattgctgtgcaggccaagcagccagatgtggaggagatcctgagcaagggccagcacctgtacaaggagaagccagccacccagcctgtgaagaggaagctggaggacctgagcagcgagtggaaggctgtgaaccggctgctgcaggagctgcgggccaagcagcctgacctggcccctggcctgaccaccatcggggccagccccacccagacagtgaccctggtgacccagcctgtggtgaccaaggagacagccatcagcaagctggagatgcccagcagcctgatgctggaggtgcctgccctggccgacttcaacagagcctggacagagctgacagactggctgagcctgctggaccaggtgatcaagagccagagggtgatggtgggggacctggaggacatcaatgagatgatcatcaagcagaaggccaccatgcaggacctggagcagaggcggccccagctggaggagctgatcacagctgcccagaacctgaagaacaagaccagcaaccaggaggcccggaccatcatcacagacagaattgagcgcatccagaaccagtgggatgaggtgcaggagcacctgcagaacagacggcagcagctgaatgagatgctgaaggacagcacccagtggctggaggccaaggaggaggccgagcaggtgctgggccaggcccgggccaagctggagagctggaaggagggcccctacacagtggatgccatccagaagaagatcacagagaccaagcagctggccaaggacctgcggcagtggcagaccaacgtggatgtggccaatgacctggccctgaagctgctgcgggactacagcgcagatgacaccaggaaggtgcacatgatcacagagaacatcaatgcctcctggaggagcatccacaagagggtgtctgagcgggaggccgccctggaggagacccaccggctgctgcagcagttccccctggacctggagaagttcctggcctggctgacagaagctgagaccacagccaacgtgctgcaggatgccaccaggaaggagcggctgctggaggacagcaagggcgtgaaggagctgatgaagcagtggcaggacctgcagggcgagattgaggcccacacagatgtgtaccacaacctggatgagaacagccagaagatcctgcggagcctggagggcagtgatgatgctgtgctgctgcagaggcggctggacaacatgaacttcaagtggagcgagctgaggaagaagagcctgaacatccgcagccacctggaggccagcagtgaccagtggaagaggctgcacctgagcctgcaggagctgctggtgtggctgcagctgaaggatgatgagctgagccggcaggcccccatcggcggggacttccctgctgtgcagaagcagaatgatgtgcaccgggccttcaagcgggagctgaagaccaaggagcctgtgatcatgagcaccctggagaccgtgcgcatcttcctgacagagcagcccctggagggcctggagaagctgtaccaggagccccgggagctgcccccagaggagcgggcccagaatgtgacccggctgctgaggaagcaggccgaggaggtgaacacagagtgggagaagctgaacctgcacagcgctgactggcagaggaagattgatgagaccctggagcggctgcgggagctgcaggaggccacagatgagctggacctgaagctgcggcaggccgaggtgatcaagggctcctggcagcctgtgggggacctgctgattgacagcctgcaggaccacctggagaaggtgaaggccctgcggggggagatcgcccccctgaaggaaaatgtgagccacgtgaatgacctggcccggcagctgaccaccctgggcatccagctgagcccctacaacctgagcaccctggaggacctgaacacccgctggaagctgctgcaggtggccgtggaggacagagtgcggcagctgcacgaggcccaccgggactttggacctgccagccagcacttcctgagcacctctgtgcagggcccctgggagcgggccatcagccccaacaaggtgccctactacatcaaccacgagacccagaccacctgctgggaccaccccaagatgacagagctgtaccagagcctggccgacctgaacaacgtgcgcttcagcgcctacagaacagccatgaagctgcggcggctgcagaaggccctgtgcctggacctgctgagcctgtctgctgcctgtgatgccctggaccagcacaacctgaagcagaatgaccagcccatggacatcctgcagatcatcaactgcctgaccaccatctatgaccggctggagcaggagcacaacaacctggtgaatgtgcccctgtgtgtggacatgtgcctgaactggctgctgaatgtgtatgacaccggccgcacaggccgcatccgggtgctgtccttcaagacaggcatcatcagcctgtgcaaggcccacctggaggacaagtaccgctacctgttcaagcaggtggccagcagcacaggcttctgtgaccagaggcggctgggcctgctgctgcatgacagcatccagatcccccggcagctgggggaggtggccagctttggaggcagcaacatcgagcccagcgtgcgcagctgcttccagtttgccaacaacaagccagaaattgaagctgccctcttcctggactggatgaggctggagccccagagcatggtgtggctgcctgtgctgcaccgggtggccgctgctgagacagccaagcaccaggccaagtgcaacatctgcaaggaatgtcccatcatcggcttccgctaccgcagcctgaagcacttcaactatgacatctgccagagctgcttcttcagcggccgggtggccaagggccacaagatgcactaccccatggtggagtactgcacccccaccaccagcggggaggatgtgcgggactttgccaaggtgctgaagaacaagttccgcaccaagcgctactttgccaagcaccccaggatgggctacctgcctgtgcagacagtgctggagggggacaacatggagacccctgtgaccctcatcaacttctggcctgtggacagcgccccagccagcagcccccagctgagccatgatgacacccacagccgcatcgagcactacgccagccggctggccgagatggagaacagcaatggcagctacctgaatgacagcatcagccccaatgaaagcattgatgatgagcacctgctgatccagcactactgccagagcctgaaccaggacagccccctgagccagcccaggagccctgcccagatcctgatcagcctggagagcgaggagcggggggagctggagcgcatcctggccgacctggaggaggagaacagaaacctgcaggccgagtatgaccggctgaagcagcagcacgagcacaagggcctgagccccctgcccagccccccagagatgatgcccaccagcccccagagccccagagatgctgagctgattgctgaggccaagctgctgcggcagcacaagggccgcctggaggccaggatgcagatcctggaggaccacaacaagcagctggagagccagctgcaccggctgcggcagctgctggagcagccccaggccgaggccaaggtgaatggcaccaccgtgagcagccccagcaccagcctgcagaggagtgacagcagccagcccatgctgctgcgggtggtgggcagccagaccagtgacagcatgggagaggaggacctgctgagccccccccaggacaccagcacaggcctggaggaggtgatggagcagctgaacaacagcttccccagcagccggggcaggaacaccccaggcaagcccatgagggaggacaccatgtag

SEQ ID NO: 150797 - DNA, 3348 bp, synthetic construct
  misc_feature 1..3348: note = Description of Artificial Sequence: Synthetic coding sequence
  source 1..3348: mol_type = other DNA
atgcccagcagcctgatgctggaggtgcctgccctggccgacttcaacagagcctggacagagctgacagactggctgagcctgctggaccaggtgatcaagagccagagggtgatggtgggggacctggaggacatcaatgagatgatcatcaagcagaaggccaccatgcaggacctggagcagaggcggccccagctggaggagctgatcacagctgcccagaacctgaagaacaagaccagcaaccaggaggcccggaccatcatcacagaccgcatcgagcgcatccagaaccagtgggatgaggtgcaggagcacctgcagaacagacggcagcagctgaatgagatgctgaaggacagcacccagtggctggaggccaaggaggaggccgagcaggtgctgggccaggcccgggccaagctggagagctggaaggagggcccctacacagtggatgccatccagaagaagatcacagagaccaagcagctggccaaggacctgcggcagtggcagaccaacgtggatgtggccaatgacctggccctgaagctgctgcgggactacagcgcagatgacaccaggaaggtgcacatgatcacagagaacatcaatgcctcctggaggagcatccacaagagggtgtctgagcgggaggccgccctggaggagacccaccggctgctgcagcagttccccctggacctggagaagttcctggcctggctgacagaggccgagaccacagccaacgtgctgcaggatgccaccaggaaggagcggctgctggaggacagcaaaggagtgaaggagctgatgaagcagtggcaggacctgcagggcgagattgaggcccacacagatgtgtaccacaacctggatgagaacagccagaagatcctgcggagcctggagggcagtgatgatgctgtgctgctgcagaggcggctggacaacatgaacttcaagtggagcgagctgaggaagaagagcctgaacatccgcagccacctggaggccagcagtgaccagtggaagaggctgcacctgagcctgcaggagctgctggtgtggctgcagctgaaggatgatgagctgagccggcaggcccccatcggcggggacttccctgctgtgcagaagcagaatgatgtgcaccgggccttcaagcgggagctgaagaccaaggagcccgtcatcatgagcaccctggagaccgtgcgcatcttcctgacagagcagcccctggagggcctggagaagctgtaccaggagccccgggagctgcccccagaggagcgggcccagaatgtgacccggctgctgaggaagcaggccgaggaggtgaacacagagtgggagaagctgaacctgcacagcgctgactggcagaggaagattgatgagaccctggagcggctgcgggagctgcaggaggccacagatgagctggacctgaagctgcggcaggccgaggtgatcaagggctcctggcagcctgtgggggacctgctgattgacagcctgcaggaccacctggagaaggtgaaggccctgcggggggagatcgcccccctgaaggaaaatgtgagccacgtgaatgacctggcccggcagctgaccaccctgggcatccagctgagcccctacaacctgagcaccctggaggacctgaacacccgctggaagctgctgcaggtggccgtggaggacagagtgcggcagctgcacgaggcccaccgggactttggacctgccagccagcacttcctgagcacctctgtgcagggcccctgggagcgggccatcagccccaacaaggtgccctactacatcaaccacgagacccagaccacctgctgggaccaccccaagatgacagagctgtaccagagcctggccgacctgaacaacgtgcgcttcagcgcctacagaacagccatgaagctgcggcggctgcagaaggccctgtgcctggacctgctgagcctgtctgctgcctgtgatgccctggaccagcacaacctgaagcagaatgaccagcccatggacatcctgcagatcatcaactgcctgaccaccatctatgaccggctggagcaggagcacaacaacctggtgaatgtgcccctgtgtgtggacatgtgcctgaactggctgctgaatgtgtatgacaccggccgcacaggccgcatccgggtgctgtccttcaagacaggcatcatcagcctgtgcaaggcccacctggaggacaagtaccgctacctgttcaagcaggtggccagcagcacaggcttctgtgaccagaggcggctgggcctgctgctgcatgacagcatccagatcccccggcagctgggggaggtggccagctttggaggcagcaacatcgagcccagcgtgcgcagctgcttccagtttgccaacaacaagccagaaattgaggccgccctcttcctggactggatgaggctggagccccagagcatggtgtggctgcctgtgctgcaccgggtggccgctgctgagacagccaagcaccaggccaagtgcaacatctgcaaggagtgccccatcatcggcttccgctaccgcagcctgaagcacttcaactatgacatctgccagagctgcttcttcagcggccgggtggccaagggccacaagatgcactaccccatggtggagtactgcacccccaccaccagcggagaagatgtgcgggactttgccaaggtgctgaagaacaagttccgcaccaagcgctactttgccaagcaccccaggatgggctacctgcctgtgcagacagtgctggagggggacaacatggagaccaacctgcaggccgagtatgaccggctgaagcagcagcacgagcacaagggcctgagccccctgcccagccccccagagatgatgcccaccagcccccagagccccagagatgctgagctgattgctgaggccaagctgctgcggcagcacaagggccgcctggaggccaggatgcagatcctggaggaccacaacaagcagctggagagccagctgcaccggctgcggcagctgctggagcagccccaggccgaggccaaggtgaatggcaccaccgtgagcagccccagcaccagcctgcagaggagtgacagcagccagcccatgctgctgcgggtggtgggcagccagaccagtgacagcatgggagaggaggacctgctgagccccccccaggacaccagcacaggcctggaggaggtgatggagcagctgaacaacagcttccccagcagccggggcaggaacacccctgggaagcccatgagggaggacaccatgtag

SEQ ID NO: 150798 - DNA, 11058 bp, synthetic construct
  misc_feature 1..11058: note = Description of Artificial Sequence: Synthetic coding sequence
  source 1..11058: mol_type = other DNA
atgctgtggtgggaggaggtggaggactgctatgagcgggaggatgtgcagaagaagaccttcaccaagtgggtgaatgcccagttcagcaagtttgggaagcagcacatcgagaacctcttcagtgacctgcaggacggccggcggctgctggacctgctggagggcctgaccggccagaagctgcccaaggagaagggcagcaccagggtgcacgccctgaacaacgtgaacaaggccctgcgggtgctgcagaacaacaacgtggacctggtgaacatcggcagcacagacatcgtggatggcaaccacaagctgaccctgggcctcatctggaacatcatcctgcactggcaggtgaagaatgtgatgaagaacatcatggccggcctgcagcagaccaacagcgagaagatcctgctgtcctgggtgcggcagagcaccaggaactacccccaggtgaatgtcatcaacttcaccacctcctggagcgatggcctggccctgaatgccctgatccacagccacaggccagacctgtttgactggaacagcgtggtgtgccagcagagcgccacccagaggctggagcacgccttcaacatcgcccgctaccagctgggcatcgagaagctgctggaccctgaagatgtggacaccacctacccagacaagaagagcatcctgatgtacatcaccagcctcttccaggtgctgccccagcaggtgtccattgaggccatccaggaggtggagatgctgcccaggcctcccaaggtgaccaaggaggagcacttccagctgcaccaccagatgcactacagccagcagatcaccgtgtccctggcccagggctatgaaagaaccagcagccccaagccccgcttcaagagctatgcctacacccaggccgcctacgtgaccaccagtgaccccaccaggagccccttccccagccagcacctggaggcccctgaggacaagagctttggcagcagcctgatggagagcgaggtgaacctggaccgctaccagacagccctggaggaggtgctgtcctggctgctgtctgctgaggacaccctgcaggcccagggcgagatcagcaatgatgtggaggtggtgaaggaccagttccacacccatgagggctacatgatggacctgacagcccaccagggccgggtgggcaacatcctgcagctgggcagcaagctgattggaacaggcaagctgtctgaagatgaggagacagaggtgcaggagcagatgaacctgctgaacagccgctgggagtgcctgcgggtggcctccatggagaagcagagcaacctgcaccgggtgctgatggacctgcagaaccagaagctgaaggagctgaatgactggctgaccaagacagaggagaggaccaggaagatggaggaggagcccctgggccctgacctggaggacctgaagaggcaggtgcagcagcacaaggtgctgcaggaggacctggagcaggagcaggtgcgggtgaacagcctgacccacatggtggtggtggtggatgagagcagcggggaccacgccacagctgccctggaggagcagctgaaggtgctgggggaccgctgggccaacatctgccgctggacagaggaccgctgggtgctgctgcaggacatcctgctgaagtggcagaggctgacagaggagcagtgcctcttcagcgcctggctgtctgagaaggaggatgctgtgaacaagatccacaccaccggcttcaaggaccagaatgagatgctgagcagcctgcagaagctggccgtgctgaaggctgacctggagaagaagaagcagagcatgggcaagctgtacagcctgaagcaggacctgctgagcaccctgaagaacaagtctgtgacccagaagacagaggcctggctggacaactttgcccgctgctgggacaacctggtgcagaagctggagaagagcacagcccagatcagccaggccgtgaccaccacccagcccagcctgacccagaccaccgtgatggagaccgtgaccaccgtgaccacccgggagcagatcctggtgaagcacgcccaggaggagctgcccccacctccaccccagaagaagaggcagatcaccgtggacagcgagatcaggaagaggctggatgtggacatcacagagctgcacagctggatcaccaggtctgaggccgtgctgcagagccctgagtttgccatcttcaggaaggagggcaacttcagtgacctgaaggagaaggtgaatgccatcgagcgggagaaggccgagaagttcaggaagctgcaggatgccagccgcagcgcccaggccctggtggagcagatggtgaatgaaggagtgaatgctgacagcatcaagcaggccagcgagcagctgaacagccgctggattgagttctgccagctgctgtctgagcggctgaactggctggagtaccagaacaacatcatcgccttctacaaccagctgcagcagctggagcagatgaccaccacagctgagaactggctgaagatccagcccaccaccccatctgagcccacagccatcaagagccagctgaagatctgcaaggatgaggtgaaccggctgagtgacctgcagccccagatcgagcggctgaagatccagagcatcgccctgaaggagaagggccagggccccatgttcctggatgctgactttgtggccttcaccaaccacttcaagcaggtgttcagtgatgtgcaggcccgggagaaggagctgcagaccatctttgacaccctgccccccatgagataccaggagaccatgtctgccatccgcacctgggtgcagcagagcgagaccaagctgagcatcccccagctgtctgtgacagattatgagatcatggagcagaggctgggggagctgcaggccctgcagagcagcctgcaggagcagcagagcggcctgtactacctgagcaccaccgtgaaggagatgagcaagaaggcccccagcgagatcagcaggaagtaccagagcgagtttgaggagattgagggccgctggaagaagctgagcagccagctggtggagcactgccagaagctggaggagcagatgaacaagctgaggaagatccagaaccacatccagaccctgaagaagtggatggccgaggtggatgtgttcctgaaggaggagtggccagccctgggggacagcgagatcctgaagaagcagctgaagcagtgccgcctgctggtgtctgacatccagaccatccagcccagcctgaacagcgtgaatgaaggaggccagaagatcaagaatgaagctgagcctgagtttgccagccggctggagacagagctgaaggagctgaacacccagtgggaccacatgtgccagcaggtgtatgccaggaaggaggccctgaagggcggcctggagaagacagtgtccctgcagaaggacctgtctgagatgcatgagtggatgacccaggccgaggaggagtacctggagcgggactttgagtacaagaccccagatgagctgcagaaggctgtggaggagatgaagagggccaaggaggaggcccagcagaaggaggccaaggtgaagctgctgacagagagcgtgaacagcgtgattgcccaggcccctcctgtggcccaggaggccctgaagaaggagctggagaccctgaccaccaactaccagtggctgtgcacccggctgaatggcaagtgcaagaccctggaggaggtgtgggcctgctggcatgagctgctgagctacctggagaaggccaacaagtggctgaatgaggtggagttcaagctgaagaccacagagaacatccctgggggcgctgaggagatcagcgaggtgctggacagcctggagaacctgatgaggcacagcgaggacaaccccaaccagatccgcatcctggcccagaccctgacagatggcggcgtgatggatgagctgatcaatgaggagctggagaccttcaacagccgctggagggagctgcacgaggaggccgtgcggcggcagaagctgctggagcagagcatccagagcgcccaggagacagagaagagcctgcacctgatccaggagagcctgaccttcatcgacaagcagctggccgcctacatcgctgacaaggtggatgctgcccagatgccccaggaggcccagaagatccagagcgacctgaccagccatgagatcagcctggaggagatgaagaagcacaaccagggcaaggaggccgcccagagggtgctgagccagattgatgtggcccagaagaagctgcaggatgtgtccatgaagttccgcctcttccagaagccagccaactttgagcagaggctgcaggagagcaagatgatcctggatgaggtgaagatgcacctgcctgccctggagaccaagtctgtggagcaggaggtggtgcagagccagctgaaccactgtgtgaacctgtacaagagcctgtctgaggtgaagtctgaggtggagatggtgatcaagacaggccggcagatcgtgcagaagaagcagacagagaaccccaaggagctggatgagcgggtgacagccctgaagctgcactacaatgagctgggcgccaaggtgacagagaggaagcagcagctggagaagtgcctgaagctgagcaggaagatgaggaaggagatgaatgtgctgacagagtggctggccgccacagacatggagctgaccaagaggtctgctgtggagggcatgcccagcaacctggacagcgaggtggcctggggcaaggccacccagaaggagattgagaagcagaaggtgcacctgaagagcatcacagaggtgggggaggccctgaagacagtgctgggcaagaaggagaccctggtggaggacaagctgagcctgctgaacagcaactggattgctgtgaccagcagagctgaggagtggctgaacctgctgctggagtaccagaagcacatggagacctttgaccagaatgtggaccacatcaccaagtggatcatccaggccgacaccctgctggatgaaagtgagaagaagaagccccagcagaaggaggatgtgctgaagaggctgaaggccgagctgaatgacatccggcccaaggtggacagcacccgggaccaggccgccaacctgatggccaacagaggagaccactgcaggaagctggtggagccccagatcagcgagctgaaccacagatttgctgccatcagccaccgcatcaagacaggcaaggccagcatccccctgaaggagctggagcagttcaacagcgacatccagaagctgctggagcccctggaggccgagatccagcagggcgtgaacctgaaggaggaggacttcaacaaggacatgaatgaagataatgaaggaacagtgaaggagctgctgcagagaggagacaacctgcagcagaggatcacagatgagaggaagcgggaggagatcaagatcaagcagcagctgctgcagaccaagcacaatgccctgaaggacctgcggagccagaggaggaagaaggccctggagatcagccaccagtggtaccagtacaagaggcaggctgatgacctgctgaagtgcctggatgacatcgagaagaagctggccagcctgcctgagcccagagatgagaggaagatcaaggagattgaccgggagctgcagaagaagaaggaggagctgaatgctgtgcggcggcaggccgagggcctgtctgaagatggagctgccatggctgtggagcccacccagatccagctgagcaagcgctggagagaaattgagagcaagtttgcccagttccggcggctgaactttgcccagatccacacagtgcgggaggagaccatgatggtgatgacagaggacatgcccctggagatctcctatgtgcccagcacctacctgacagagatcacccacgtgtcccaggccctgctggaggtggagcagctgctgaatgccccagacctgtgtgccaaggactttgaagatctcttcaagcaggaggagagcctgaagaacatcaaggacagcctgcagcagagcagcggcagaattgacatcatccacagcaagaagacagctgccctgcagagcgccacccctgtggagcgggtgaagctgcaggaggccctgagccagctggacttccagtgggagaaggtgaacaagatgtacaaggaccggcagggccgctttgacagatctgtggagaagtggaggcgcttccactatgacatcaagatcttcaaccagtggctgacagaagctgagcagttcctgaggaagacccagatccctgagaactgggagcacgccaagtacaagtggtacctgattgccctgaaggatggcatcggccagaggcagacagtggtgaggaccctgaatgccactggagaggagatcatccagcagagcagcaagacagatgccagcatcctgcaggagaagctgggcagcctgaacctgcgctggcaggaggtgtgcaagcagctgagtgacaggaagaagaggctggaggagcagaagaacatcctgtctgagttccagagggacctgaatgaatttgtgctgtggctggaggaggccgacaacatcgccagcatccccctggagcccgggaaggagcagcagctgaaggagaagctggagcaggtgaagctgctggtggaggagctgcccctgcggcagggcatcctgaagcagctgaatgaaacaggaggccctgtgctggtgtctgcccccatcagccctgaggagcaggacaagctggagaacaagctgaagcagaccaacctgcagtggatcaaggtgtcccgggccctgcctgagaagcagggcgagattgaggcccagatcaaggacctgggccagctggagaagaagctggaggacctggaggagcagctgaaccacctgctgctgtggctgagccccatccggaaccagctggagatctacaaccagcccaaccaggagggcccctttgatgtgaaggagacagaaattgctgtgcaggccaagcagccagatgtggaggagatcctgagcaagggccagcacctgtacaaggagaagccagccacccagcctgtgaagaggaagctggaggacctgagcagcgagtggaaggctgtgaaccggctgctgcaggagctgcgggccaagcagcctgacctggcccctggcctgaccaccatcggggccagccccacccagacagtgaccctggtgacccagcctgtggtgaccaaggagacagccatcagcaagctggagatgcccagcagcctgatgctggaggtgcctgccctggccgacttcaacagagcctggacagagctgacagactggctgagcctgctggaccaggtgatcaagagccagagggtgatggtgggggacctggaggacatcaatgagatgatcatcaagcagaaggccaccatgcaggacctggagcagaggcggccccagctggaggagctgatcacagctgcccagaacctgaagaacaagaccagcaaccaggaggcccggaccatcatcacagaccgcatcgagcgcatccagaaccagtgggatgaggtgcaggagcacctgcagaacagacggcagcagctgaatgagatgctgaaggacagcacccagtggctggaggccaaggaggaggccgagcaggtgctgggccaggcccgggccaagctggagagctggaaggagggcccctacacagtggatgccatccagaagaagatcacagagaccaagcagctggccaaggacctgcggcagtggcagaccaacgtggatgtggccaatgacctggccctgaagctgctgcgggactacagcgcagatgacaccaggaaggtgcacatgatcacagagaacatcaatgcctcctggaggagcatccacaagagggtgtctgagcgggaggccgccctggaggagacccaccggctgctgcagcagttccccctggacctggagaagttcctggcctggctgacagaggccgagaccacagccaacgtgctgcaggatgccaccaggaaggagcggctgctggaggacagcaaaggagtgaaggagctgatgaagcagtggcaggacctgcagggcgagattgaggcccacacagatgtgtaccacaacctggatgagaacagccagaagatcctgcggagcctggagggcagtgatgatgctgtgctgctgcagaggcggctggacaacatgaacttcaagtggagcgagctgaggaagaagagcctgaacatccgcagccacctggaggccagcagtgaccagtggaagaggctgcacctgagcctgcaggagctgctggtgtggctgcagctgaaggatgatgagctgagccggcaggcccccatcggcggggacttccctgctgtgcagaagcagaatgatgtgcaccgggccttcaagcgggagctgaagaccaaggagcccgtcatcatgagcaccctggagaccgtgcgcatcttcctgacagagcagcccctggagggcctggagaagctgtaccaggagccccgggagctgcccccagaggagcgggcccagaatgtgacccggctgctgaggaagcaggccgaggaggtgaacacagagtgggagaagctgaacctgcacagcgctgactggcagaggaagattgatgagaccctggagcggctgcgggagctgcaggaggccacagatgagctggacctgaagctgcggcaggccgaggtgatcaagggctcctggcagcctgtgggggacctgctgattgacagcctgcaggaccacctggagaaggtgaaggccctgcggggggagatcgcccccctgaaggaaaatgtgagccacgtgaatgacctggcccggcagctgaccaccctgggcatccagctgagcccctacaacctgagcaccctggaggacctgaacacccgctggaagctgctgcaggtggccgtggaggacagagtgcggcagctgcacgaggcccaccgggactttggacctgccagccagcacttcctgagcacctctgtgcagggcccctgggagcgggccatcagccccaacaaggtgccctactacatcaaccacgagacccagaccacctgctgggaccaccccaagatgacagagctgtaccagagcctggccgacctgaacaacgtgcgcttcagcgcctacagaacagccatgaagctgcggcggctgcagaaggccctgtgcctggacctgctgagcctgtctgctgcctgtgatgccctggaccagcacaacctgaagcagaatgaccagcccatggacatcctgcagatcatcaactgcctgaccaccatctatgaccggctggagcaggagcacaacaacctggtgaatgtgcccctgtgtgtggacatgtgcctgaactggctgctgaatgtgtatgacaccggccgcacaggccgcatccgggtgctgtccttcaagacaggcatcatcagcctgtgcaaggcccacctggaggacaagtaccgctacctgttcaagcaggtggccagcagcacaggcttctgtgaccagaggcggctgggcctgctgctgcatgacagcatccagatcccccggcagctgggggaggtggccagctttggaggcagcaacatcgagcccagcgtgcgcagctgcttccagtttgccaacaacaagccagaaattgaggccgccctcttcctggactggatgaggctggagccccagagcatggtgtggctgcctgtgctgcaccgggtggccgctgctgagacagccaagcaccaggccaagtgcaacatctgcaaggagtgccccatcatcggcttccgctaccgcagcctgaagcacttcaactatgacatctgccagagctgcttcttcagcggccgggtggccaagggccacaagatgcactaccccatggtggagtactgcacccccaccaccagcggagaagatgtgcgggactttgccaaggtgctgaagaacaagttccgcaccaagcgctactttgccaagcaccccaggatgggctacctgcctgtgcagacagtgctggagggggacaacatggagacccctgtgaccctcatcaacttctggcctgtggacagcgccccagccagcagcccccagctgagccatgatgacacccacagcagaattgagcactacgccagccggctggccgagatggagaacagcaatggcagctacctgaatgacagcatcagccccaatgaaagcattgatgatgagcacctgctgatccagcactactgccagagcctgaaccaggacagccccctgagccagcccaggagccctgcccagatcctgatcagcctggagagcgaggagcggggggagctggagcgcatcctggccgacctggaggaggagaacagaaacctgcaggccgagtatgaccggctgaagcagcagcacgagcacaagggcctgagccccctgcccagccccccagagatgatgcccaccagcccccagagccccagagatgctgagctgattgctgaggccaagctgctgcggcagcacaagggccgcctggaggccaggatgcagatcctggaggaccacaacaagcagctggagagccagctgcaccggctgcggcagctgctggagcagccccaggccgaggccaaggtgaatggcaccaccgtgagcagccccagcaccagcctgcagaggagtgacagcagccagcccatgctgctgcgggtggtgggcagccagaccagtgacagcatgggagaggaggacctgctgagccccccccaggacaccagcacaggcctggaggaggtgatggagcagctgaacaacagcttccccagcagccggggcaggaacacccctgggaagcccatgagggaggacaccatgtag

SEQ ID NO: 150799 - DNA, 2874 bp, synthetic construct
  misc_feature 1..2874: note = Description of Artificial Sequence: Synthetic coding sequence
  source 1..2874: mol_type = other DNA
atgcagcccatggtgatgcagggctgcccctacaccctgccccgctgccacgactggcaggccgctgaccagttccaccacagcagcagcctgcggagcacctgcccccacccccaggtgcgggctgctgtgaccagccctgccccaccccaggatggagctggggtgccctgcctgagcctgaagctgctgaatggatctgtgggcgccagcggccccctggagcccccagccatgaacctgtgctggaatgagatcaagaagaagagccacaacctgcgggcccggctggaggccttcagtgaccacagcggcaagctgcagctgcccctgcaggagatcatcgactggctgagccagaaggatgaggagctgagcgcccagctgcccctgcagggagatgtggccctggtgcagcaggagaaggagacccacgccgccttcatggaggaggtgaagagccggggcccctacatctacagcgtgctggagagcgcccaggccttcctgagccagcacccctttgaggagctggaggagccccacagcgagagcaaggacaccagccccaagcagaggatccagaacctgagcagatttgtgtggaagcaggccaccgtggccagcgagctgtgggagaagctgacagcccgctgtgtggaccagcaccgccacatcgagaggaccctggagcagctgctggagatccagggcgccatggaggagctgagcaccaccctgagccaggccgagggcgtgcgggccacctgggagcccatcggggacctcttcatcgacagcctgcctgagcacatccaggccatcaagctgttcaaggaggagttcagccccatgaaggatggagtgaagctggtgaatgacctggcccaccagctggccatcagtgatgtgcacctgtccatggagaacagccaggccctggagcagatcaacgtgcgctggaagcagctgcaggcctctgtgtctgagcggctgaagcagctgcaggatgcccaccgggactttggacctggcagccagcacttcctgagcagctctgtgcaggtgccctgggagcgggccatcagccccaacaaggtgccctactacatcaaccaccaggcccagaccacctgctgggaccaccccaagatgacagagctgtaccagaccctggccgacctgaacaacatcaagttcagcgcctacagaacagccatgaagctgcggcgggtgcagaaggccctgcggctggacctggtgaccctgaccacagccctggagatcttcaatgaacatgacctgcaggccagcgagcacgtgatggatgtggtggaggtgatccactgcctgacagccctgtatgagcggctggaggaggagcggggcatcctggtgaatgtgcccctgtgtgtggacatgagcctgaactggctgctgaatgtgtttgattctggccgcagcggcaagatgagggccctgtccttcaagacaggcatcgcctgcctgtgtggcacagaggtgaaggagaagctgcagtacctgttcagccaggtggccaacagcggcagccagtgtgaccagaggcacctgggcgtgctgctgcacgaggccatccaggtgccccggcagctgggggaggtggccgcctttggaggcagcaatgtggagcccagcgtgcgcagctgcttccgcttcagcacaggcaagcctgtgattgaggccagccagttcctggagtgggtgaacctggagccccagagcatggtgtggctggccgtgctgcaccgggtgaccatcgccgagcaggtgaagcaccagaccaagtgcagcatctgccggcagtgccccatcaagggcttccgctaccgcagcctgaagcagttcaacgtggacatctgccagacctgcttcctgaccggccgggccagcaaaggaaacaagctgcactaccccatcatggagtactacacccccaccaccagcagcgagaacatgagggactttgccaccaccctgaagaacaagttccgcagcaagcactacttcagcaagcacccccagaggggctacctgcctgtgcagagcgtgctggaggccgactacagcgagaccccagccagcagccccatgtggccccatgctgacacccacagcagaattgagcactttgccagccggctggccgagatggagagccagaactgcagcttcttcaatgacagcctgagcccagatgacagcattgatgaggaccagtacctgctgcggcacagcagccccatcacagaccgggagcccgccttcggccagcaggccccctgcagcgtggccacagagagcaagggggagctgcagaagatcctggcccacctggaggatgaaaatcgcatcctgcagggcgagctgcggcggctgaagtggcagcacgaggaggccgctgaggcccccagcctggctgatggcagcacagaggccgccacagaccacagaaatgaggagctgctggccgaggcccgcatcctgcggcagcacaagagccggctggagaccaggatgcagatcctggaggaccacaacaagcagctggagagccagctgcagaggctgcgggagctgctgctgcagcccccaacagaaagtgatggcagcggcagcgctggcagcagcctggccagcagcccccagcagagcgagggcagccacccccgggagaagggccagaccaccccagacacagaagctgctgatgatgtgggcagcaagagccaggatgtgtccctgtgcctggaggacatcatggagaagctgcggcatgccttccccagcgtgcgcagcagtgatgtgacagccaacaccctgctggccagctag

SEQ ID NO: 150800 - DNA, 2874 bp, synthetic construct; identical to SEQ ID NO: 150799
  misc_feature 1..2874: note = Description of Artificial Sequence: Synthetic coding sequence
  source 1..2874: mol_type = other DNA

SEQ ID NO: 150801 - DNA, 2874 bp, synthetic construct; identical to SEQ ID NO: 150799
  misc_feature 1..2874: note = Description of Artificial Sequence: Synthetic coding sequence
  source 1..2874: mol_type = other DNA

SEQ ID NO: 150802 - DNA, 2640 bp, synthetic construct
  misc_feature 1..2640: note = Description of Artificial Sequence: Synthetic coding sequence
  source 1..2640: mol_type = other DNA
atgaacctgtgctggaatgagatcaagaagaagagccacaacctgcgggcccggctggaggccttcagtgaccacagcggcaagctgcagctgcccctgcaggagatcatcgactggctgagccagaaggatgaggagctgagcgcccagctgcccctgcagggagatgtggccctggtgcagcaggagaaggagacccacgccgccttcatggaggaggtgaagagccggggcccctacatctacagcgtgctggagagcgcccaggccttcctgagccagcacccctttgaggagctggaggagccccacagcgagagcaaggacaccagccccaagcagaggatccagaacctgagcagatttgtgtggaagcaggccaccgtggccagcgagctgtgggagaagctgacagcccgctgtgtggaccagcaccgccacatcgagaggaccctggagcagctgctggagatccagggcgccatggaggagctgagcaccaccctgagccaggccgagggcgtgcgggccacctgggagcccatcggggacctcttcatcgacagcctgcctgagcacatccaggccatcaagctgttcaaggaggagttcagccccatgaaggatggagtgaagctggtgaatgacctggcccaccagctggccatcagtgatgtgcacctgtccatggagaacagccaggccctggagcagatcaacgtgcgctggaagcagctgcaggcctctgtgtctgagcggctgaagcagctgcaggatgcccaccgggactttggacctggcagccagcacttcctgagcagctctgtgcaggtgccctgggagcgggccatcagccccaacaaggtgccctactacatcaaccaccaggcccagaccacctgctgggaccaccccaagatgacagagctgtaccagaccctggccgacctgaacaacatcaagttcagcgcctacagaacagccatgaagctgcggcgggtgcagaaggccctgcggctggacctggtgaccctgaccacagccctggagatcttcaatgaacatgacctgcaggccagcgagcacgtgatggatgtggtggaggtgatccactgcctgacagccctgtatgagcggctggaggaggagcggggcatcctggtgaatgtgcccctgtgtgtggacatgagcctgaactggctgctgaatgtgtttgattctggccgcagcggcaagatgagggccctgtccttcaagacaggcatcgcctgcctgtgtggcacagaggtgaaggagaagctgcagtacctgttcagccaggtggccaacagcggcagccagtgtgaccagaggcacctgggcgtgctgctgcacgaggccatccaggtgccccggcagctgggggaggtggccgcctttggaggcagcaatgtggagcccagcgtgcgcagctgcttccgcttcagcacaggcaagcctgtgattgaggccagccagttcctggagtgggtgaacctggagccccagagcatggtgtggctggccgtgctgcaccgggtgaccatcgccgagcaggtgaagcaccagaccaagtgcagcatctgccggcagtgccccatcaagggcttccgctaccgcagcctgaagcagttcaacgtggacatctgccagacctgcttcctgaccggccgggccagcaaaggaaacaagctgcactaccccatcatggagtactacacccccaccaccagcagcgagaacatgagggactttgccaccaccctgaagaacaagttccgcagcaagcactacttcagcaagcacccccagaggggctacctgcctgtgcagagcgtgctggaggccgactacagcgagaccccagccagcagccccatgtggccccatgctgacacccacagcagaattgagcactttgccagccggctggccgagatggagagccagaactgcagcttcttcaatgacagcctgagcccagatgacagcattgatgaggaccagtacctgctgcggcacagcagccccatcacagaccgggagcccgccttcggccagcaggccccctgcagcgtggccacagagagcaagggggagctgcagaagatcctggcccacctggaggatgaaaatcgcatcctgcagggcgagctgcggcggctgaagtggcagcacgaggaggccgctgaggcccccagcctggctgatggcagcacagaggccgccacagaccacagaaatgaggagctgctggccgaggcccgcatcctgcggcagcacaagagccggctggagaccaggatgcagatcctggaggaccacaacaagcagctggagagccagctgcagaggctgcgggagctgctgctgcagcccccaacagaaagtgatggcagcggcagcgctggcagcagcctggccagcagcccccagcagagcgagggcagccacccccgggagaagggccagaccaccccagacacagaagctgctgatgatgtgggcagcaagagccaggatgtgtccctgtgcctggaggacatcatggagaagctgcggcatgccttccccagcgtgcgcagcagtgatgtgacagccaacaccctgctggccagctag

SEQ ID NO: 150803 - DNA, 9129 bp, synthetic construct
  misc_feature 1..9129: note = Description of Artificial Sequence: Synthetic coding sequence
  source 1..9129: mol_type = other DNA
atgcaccacggcaccggcccccagaatgtgcagcaccagctgcagaggagccgggcctgccccggcagcgagggggaggagcagcctgcccaccccaaccccccacccagccctgctgccccctttgcccccagcgccagccccagcgccccccagagccccagctaccagatccagcagctgatgaacagaagccctgccaccggccagaatgtgaacatcaccctgcagagcgtgggccctgtggtgggcggcaaccagcagatcaccctggcccccctgcccctgcccagccccaccagccctggcttccagttcagcgcccagcccaggagatttgaacatggcagccccagctacatccaggtgaccagccccctgagccagcaggtgcagacccagagccccacccagcccagccctggccctggccaggccctgcagaatgtgcgggccggggcccctggccctggcctgggcctgtgcagcagcagccccactggaggctttgtggatgcctctgtgctggtgcggcagatcagcctgagccccagcagcggcggccactttgtgttccaggacggcagcggcctgacccagatcgcccagggcgcccaggtgcagctgcagcaccctggcacccccatcaccgtgcgggagcggcggcccagccagccccacacccagagcggcggcaccatccaccacctgggcccccagagccctgctgctgctggaggagctggcctgcagcccctggccagccccagccacatcaccacagccaacctgcccccccagatcagcagcatcatccagggccagctggtgcagcagcagcaggtgctgcagggcccccccctgccccggcccctgggctttgagaggaccccaggagtgctgctgcctggagctggaggagctgctggcttcggcatgaccagccccccaccacccaccagccccagcaggacagctgtgcccccaggcctgagcagcctgcccctgacctctgtgggcaacacaggcatgaagaaggtgcccaagaagctggaggagatccccccagccagccctgagatggcccagatgaggaagcagtgcctggactaccactaccaggagatgcaggccctgaaggaggtgttcaaggagtacctgattgagctgttcttcctgcagcacttccagggcaacatgatggacttcctggccttcaagaagaagcactacgcccccctgcaggcctacctgcggcagaatgacctggacatcgaggaggaggaggaggaggaggaggaggaggaggagaagtctgaggtgatcaatgatgagcagcaggccctggccggcagcctggtggccggggccggcagcacagtggagacagacctcttcaagaggcagcaggccatgcccagcacaggcatggccgagcagagcaagaggccccggctggaggtgggccaccagggcgtggtgttccagcaccctggagcagatgctggggtgcccctgcagcagctgatgcccacagcccagggcggcatgccacccaccccccaggccgcccagctggccggccagaggcagagccagcagcagtatgaccccagcacaggcccccctgtgcagaatgctgccagcctgcacacccccctgccccagctgcccggccgcctgcccccagctggggtgcccacagctgccctgagcagcgccctgcagtttgcccagcagccccaggtggtggaggcccagacccagctgcagatccctgtgaagacccagcagcccaacgtgcccatcccagccccacccagcagccagctgcccatcccccccagccagcctgcccagctggccctgcacgtgcccacccctgggaaggtgcaggtgcaggccagccagctgagcagcctgccccagatggtggccagcacccggctgcctgtggaccctgccccaccctgcccccggcccctgcccaccagcagcaccagcagcctggcccctgtgtctggcagcggccctggccccagccctgcccggagcagccctgtgaaccggcccagcagcgccaccaacaaggccctgagccctgtgaccagcaggaccccaggagtggtggccagcgcccccaccaagccccagagccctgcccagaatgccaccagcagccaggacagcagccaggacaccctgacagagcagatcaccctggagaaccaggtgcaccagagaattgctgagctgaggaaggccggcctgtggagccagaggcggctgcccaagctgcaggaggccccccggcccaagagccactgggactacctgctggaggagatgcagtggatggccacagactttgcccaggagcggcgctggaaggtggccgccgccaagaagctggtgaggacagtggtgcgccaccacgaggagaagcagctgcgggaggagcggggcaagaaggaggagcagagccggctgcggagaattgctgccagcacagcccgggagattgagtgcttctggagcaacatcgagcaggtggtggagatcaagctgcgggtggagctggaggagaagaggaagaaggccctgaacctgcagaaggtgtccagaagaggcaaggagctgcggcccaagggctttgatgccctgcaggagagcagcctggacagcggcatgagcggcaggaagaggaaggccagcatcagcctgacagatgatgaggtggatgatgaggaggagaccatcgaggaggaggaggccaatgaaggagtggtggaccaccagacagagctgagcaacctggccaaggaggccgagctgcccctgctggacctgatgaagctgtatgagggcgccttcctgcccagcagccagtggccccggcccaagccagatggagaggacaccagcggggaggaggatgctgatgactgccctggggaccgggagagcaggaaggacctggtgctgattgacagcctcttcatcatggaccagttcaaggctgctgagaggatgaacatcggcaagcccaatgccaaggacattgctgatgtgacagctgtggccgaggccatcctgcccaagggcagcgcccgggtgaccacctctgtgaagttcaatgcccccagcctgctgtatggagccctgcgggactaccagaagattggcctggactggctggccaagctgtacaggaagaacctgaatggcatcctggctgatgaggccggcctgggcaagacagtgcagatcatcgccttctttgcccacctggcctgcaatgaaggcaactggggcccccacctggtggtggtgcgcagctgcaacatcctgaagtgggagctggagctgaagcgctggtgccccggcctgaagatcctgagctacatcggcagccaccgggagctgaaggccaagaggcaggagtgggccgagcccaacagcttccacgtgtgcatcaccagctacacccagttcttccggggcctgacagccttcaccagggtgcgctggaagtgcctggtgattgatgagatgcagagggtgaagggcatgacagagcggcactgggaggccgtgttcaccctgcagagccagcagaggctgctgctgattgacagccccctgcacaacaccttcctggagctgtggaccatggtgcacttcctggtgcccggcatcagccggccctacctgagcagccccctgcgggcccccagcgaggagagccaggactactaccacaaggtggtgatccggctgcaccgggtgacccagcccttcatcctgcggaggaccaagagagatgtggagaagcagctgaccaagaagtatgagcacgtgctgaagtgccgcctgagcaaccggcagaaggccctgtatgaagatgtgatcctgcagcccggcacccaggaggccctgaagagcggccactttgtgaatgtgctgagcatcctggtgcggctgcagaggatctgcaaccaccctggcctggtggagcccaggcaccctggcagcagctatgtggccggccccctggagtaccccagcgccagcctcatcctgaaggccctggagcgggacttctggaaggaggccgacctgtccatgtttgacctgattggcctggagaacaagatcaccaggcatgaagctgagctgctgagcaagaagaagatccccaggaagctgatggaggagatcagcaccagcgctgccccagctgcccggcctgctgctgccaagctgaaggccagccgcctcttccagcctgtgcagtatggccagaagccagagggccgcacagtggccttccccagcacccacccccccaggacagctgcccccaccacagccagcgctgccccccagggccccctgcggggccggccccccatcgccaccttcagcgccaaccctgaggccaagggcggggaggtggtgaagatcgcccagctggccagcatcaccggcccccagagccgggtggcccagcctgagacccctgtgaccctgcagttccagggcagcaagttcaccctgagccacagccagctgcggcagctgacagctggccagcccctgcagctgcagggctctgtgctgcagatcgtgtctgcccctggccagccctacctgcgggcccctggccctgtggtgatgcagacagtgtcccaggccggggctgtgcacggggccctgggcagcaagcccccagctgggggccccagccctgcccccctgaccccccaggtgggcgtgcccggccgggtggccgtgaatgccctggccgtgggggagcctggaacagccagcaagccagccagccccatcggcggccccacccaggaggagaagacccggctgctgaaggagcggctggaccagatctacctggtgaatgaaagacgctgcagccaggcccctgtgtatggccgggacctgctgcgcatctgtgccctgcccagccacggccgggtgcagtggaggggcagcctggatggaagaagaggcaaggaggccggccctgcccacagctacaccagcagcagcgagagccccagcgagctgatgctgaccctgtgccgctgtggggagagcctgcaggatgtgattgacagagtggccttcgtcatcccccctgtggtggccgccccacccagcctgcgggtgccccggcccccacccctgtacagccacaggatgaggatcctgcggcagggcctgcgggagcacgccgccccctacttccagcagctgcggcagaccacagccccccggctgctgcagtttcctgagctgcggctggtgcagtttgacagcggcaagctggaggccctggccatcctgctgcagaagctgaagtctgagggccggcgggtgctgatcctgagccagatgatcctgatgctggacatcctggagatgttcctgaacttccactacctgacctacgtgagaattgatgaaaatgccagcagcgagcagaggcaggagctgatgaggagcttcaacagagaccggcgcatcttctgtgccatcctgagcacccacagcaggaccaccggcatcaacctggtggaggccgacacagtggtgttctatgacaatgacctgaaccctgtgatggatgccaaggcccaggagtggtgtgacagaattggccgctgcaaggacatccacatctaccgcctggtgtctggcaacagcattgaggagaagctgctgaagaatggcaccaaggacctgatccgggaggtggccgcccagggcaatgactacagcatggccttcctgacccagaggaccatccaggagctgtttgaggtgtacagccccatggatgatgctggcttccctgtgaaggccgaggagtttgtggtgctgagccaggagcccagcgtgacagagaccatcgcccccaagatcgcccggcccttcatcgaggccctgaagagcattgagtacctggaggaggatgcccagaagagcgcccaggagggcgtgctgggcccccacacagatgccctgagcagtgacagcgagaacatgccctgtgatgaggagcccagccagctggaggagctggccgacttcatggagcagctgacccccatcgagaagtatgccctgaactacctggagctgttccacaccagcattgagcaggagaaggagaggaacagtgaagatgctgtgatgacagctgtgcgggcctgggagttctggaacctgaagaccctgcaggagcgggaggcccggctgcggctggagcaggaggaggccgagctgctgacctacaccagagaagatgcctacagcatggagtatgtgtatgaagatgtggatggccagacagaggtgatgcccctgtggaccccacccaccccaccccaggatgacagcgacatctacctggacagcgtgatgtgcctgatgtatgaggccacccccatccctgaggccaagctgccccctgtgtatgtgaggaaggagaggaagaggcacaagacagaccccagcgctgctggcaggaagaagaagcagagacatggagaggccgtggtgccccccaggagcctgtttgaccgggccaccccaggcctgctgaagatccggcgggagggcaaggagcagaagaagaacatcctgctgaagcagcaggtgccctttgccaagcccctgcccacctttgccaagcccacagctgagcccggccaggacaaccctgagtggctgatcagcgaggactgggccctgctgcaggccgtgaagcagctgctggagctgcccctgaacctgaccatcgtgtccccagcccacacccccaactgggacctggtgtctgatgtggtgaacagctgcagccgcatctaccgcagcagcaagcagtgcaggaacagatatgaaaatgtcatcatcccccgggaggagggcaagagcaagaacaaccggcccctgcggaccagccagatctatgcccaggatgaaaatgccacccacacccagctgtacaccagccactttgacctgatgaagatgacagctgggaagaggagcccccccatcaagcccctgctgggcatgaaccccttccagaagaaccccaagcacgcctctgtgctggccgagagcggcatcaactatgacaagcccctgccccccatccaggtggccagcctgcgggcagagagaattgccaaggagaagaaggccctggccgaccagcagaaggcccagcagcctgctgtggcccagcccccaccaccccagccccagcccccacctccaccccagcagcccccaccacccctgccccagccccaggccgccggcagccagcccccagctggccccccagctgtgcagccccagccccagccccagccccagacccagccccagcctgtgcaggccccagccaaggcccagcctgccatcaccaccggcggcagcgctgctgtgctggccggcaccatcaagacctctgtgacaggcacctccatgcccaccggggctgtgtctggaaatgtcatcgtgaacaccatcgccggcgtgcctgctgccaccttccagagcatcaacaagaggctggccagccctgtggcccctggggccctgaccaccccaggcggcagcgccccagcccaggtggtgcacacccagcccccacccagggctgtgggcagccctgccacagccaccccagacctggtgtccatggccaccacccagggcgtgcgggctgtgacctctgtgacagccagcgctgtggtgaccaccaacctgacccctgtgcagaccccagcccggagcctggtgccccaggtgtcccaggccaccggggtgcagctgcccgggaagaccatcaccccagcccacttccagctgctgcggcagcagcagcagcagcagcagcagcagcagcagcagcagcagcagcagcagcagcagcagcagcagcagcagcagcagcagcagcagaccaccaccaccagccaggtgcaggtgccccagatccagggccaggcccagagccctgcccagatcaaggctgtgggcaagctgaccccagagcacctgatcaagatgcagaagcagaagctgcagatgccaccccagcccccaccaccccaggcccagagcgccccaccccagcccacagcccaggtgcaggtgcagaccagccagcccccccagcagcagagcccccagctgaccaccgtgacagcccccaggcctggggccctgctgaccggcaccaccgtggccaacctgcaggtggcccggctgaccagggtgcccaccagccagctgcaggcccagggccagatgcagacccaggccccccagcctgcccaggtggccctggccaagccccctgtggtgtctgtgcctgctgctgtggtgagcagccctggggtgaccaccctgcccatgaatgtggccggcatctctgtggccatcggccagccccagaaggctgctggccagacagtggtggcccagcctgtgcacatgcagcagctgctgaagctgaagcagcaggccgtgcagcagcagaaggccatccagccccaggccgcccagggccctgctgctgtgcagcagaagatcacagcccagcagatcaccacccctggggcccagcagaaggtggcctatgctgcccagcctgccctgaagacccagttcctgaccacccccatcagccaggcccagaagctggccggggcccagcaggtgcagacccagatccaggtggccaagctgccccaggtggtgcagcagcagacccctgtggccagcatccagcaggtggccagcgccagccagcaggccagcccccagacagtggccctgacccaggccacagctgctggccagcaggtgcagatgatcccagctgtgacagccacagcccaggtggtgcagcagaagctgatccagcagcaggtggtgaccacagccagcgcccccctgcagacccctggggcccccaacccagcccaggtgcctgccagcagtgacagccccagccagcagcccaagctgcagatgagggtgcctgctgtgcggctgaagacccccaccaagccaccctgccagtag

SEQ ID NO: 150804 - DNA, 9261 bp, synthetic construct
  misc_feature 1..9261: note = Description of Artificial Sequence: Synthetic coding sequence
  source 1..9261: mol_type = other DNA
atgcaccacggcaccggcccccagaatgtgcagcaccagctgcagaggagccgggcctgccccggcagcgagggggaggagcagcctgcccaccccaaccccccacccagccctgctgccccctttgcccccagcgccagccccagcgccccccagagccccagctaccagatccagcagctgatgaacagaagccctgccaccggccagaatgtgaacatcaccctgcagagcgtgggccctgtggtgggcggcaaccagcagatcaccctggcccccctgcccctgcccagccccaccagccctggcttccagttcagcgcccagcccaggagatttgaacatggcagccccagctacatccaggtgaccagccccctgagccagcaggtgcagacccagagccccacccagcccagccctggccctggccaggccctgcagaatgtgcgggccggggcccctggccctggcctgggcctgtgcagcagcagccccactggaggctttgtggatgcctctgtgctggtgcggcagatcagcctgagccccagcagcggcggccactttgtgttccaggacggcagcggcctgacccagatcgcccagggcgcccaggtgcagctgcagcaccctggcacccccatcaccgtgcgggagcggcggcccagccagccccacacccagagcggcggcaccatccaccacctgggcccccagagccctgctgctgctggaggagctggcctgcagcccctggccagccccagccacatcaccacagccaacctgcccccccagatcagcagcatcatccagggccagctggtgcagcagcagcaggtgctgcagggcccccccctgccccggcccctgggctttgagaggaccccaggagtgctgctgcctggagctggaggagctgctggcttcggcatgaccagccccccaccacccaccagccccagcaggacagctgtgcccccaggcctgagcagcctgcccctgacctctgtgggcaacacaggcatgaagaaggtgcccaagaagctggaggagatccccccagccagccctgagatggcccagatgaggaagcagtgcctggactaccactaccaggagatgcaggccctgaaggaggtgttcaaggagtacctgattgagctgttcttcctgcagcacttccagggcaacatgatggacttcctggccttcaagaagaagcactacgcccccctgcaggcctacctgcggcagaatgacctggacatcgaggaggaggaggaggaggaggaggaggaggaggagaagtctgaggtgatcaatgatgagcaggccctggccggcagcctggtggccggggccggcagcacagtggagacagacctcttcaagaggcagcaggccatgcccagcacaggcatggccggcggcatgccacccaccccccaggccgcccagctggccggccagaggcagagccagcagcagtatgaccccagcactggacctcctgtgcagaatgctgccagcctgcacacccccctgccccagctgcccggccgcctgcccccagctggggtgcccacagctgccctgagcagcgccctgcagtttgcccagcagccccaggtggtggaggcccagacccagctgcagatccctgtgaagacccagcagcccaacgtgcccatcccagccccacccagcagccagctgcccatcccccccagccagcctgcccagctggccctgcacgtgcccaccccaggcaaggtgcaggtgcaggccagccagctgagcagcctgccccagatggtggccagcacccggctgcctgtggaccctgccccaccctgcccccggcccctgcccaccagcagcaccagcagcctggcccctgtgtctggcagcggccctggccccagccctgcccggagcagccctgtgaaccggcccagcagcgccaccaacaaggccctgagccctgtgaccagcaggaccccaggagtggtggccagcgcccccaccaagccccagagccctgcccagaatgccaccagcagccaggacagcagccaggacaccctgacagagcagatcaccctggagaaccaggtgcaccagagaattgctgagctgaggaaggccggcctgtggagccagaggcggctgcccaagctgcaggaggccccccggcccaagagccactgggactacctgctggaggagatgcagtggatggccacagactttgcccaggagcggcgctggaaggtggccgccgccaagaagctggtgaggacagtggtgcgccaccacgaggagaagcagctgcgggaggagcggggcaagaaggaggagcagagccggctgcggagaattgctgccagcacagcccgggagattgagtgcttctggagcaacatcgagcaggtggtggagatcaagctgcgggtggagctggaggagaagaggaagaaggccctgaacctgcagaaggtgtcccggcggggcaaggagctgcggcccaagggctttgatgccctgcaggagagcagcctggacagcggcatgagcggcaggaagaggaaggccagcatcagcctgacagatgatgaggtggatgatgaggaggagaccatcgaggaggaggaggccaatgaaggagtggtggaccaccagacagagctgagcaacctggccaaggaggccgagctgcccctgctggacctgatgaagctgtatgaaggagccttcctgcccagcagccagtggccccggcccaagccagatggagaggacaccagcggggaggaggatgctgatgactgccctggggaccgggagagcaggaaggacctggtgctgattgacagcctcttcatcatggaccagttcaaggctgctgagaggatgaacatcggcaagcccaatgccaaggacattgctgatgtgacagctgtggccgaggccatcctgcccaagggcagcgcccgggtgaccacctctgtgaagttcaatgcccccagcctgctgtatggagccctgcgggactaccagaagattggcctggactggctggccaagctgtacaggaagaacctgaatggcatcctggctgatgaagctggcctgggcaagacagtgcagatcatcgccttctttgcccacctggcctgcaatgaaggcaactggggcccccacctggtggtggtgcgcagctgcaacatcctgaagtgggagctggagctgaagcgctggtgccccggcctgaagatcctgagctacatcggcagccaccgggagctgaaggccaagaggcaggagtgggccgagcccaacagcttccacgtgtgcatcaccagctacacccagttcttccggggcctgacagccttcaccagggtgcgctggaagtgcctggtgattgatgagatgcagagggtgaagggcatgacagagcggcactgggaggccgtgttcaccctgcagagccagcagaggctgctgctgattgacagccccctgcacaacaccttcctggagctgtggaccatggtgcacttcctggtgcccggcatcagccggccctacctgagcagccccctgcgggcccccagcgaggagagccaggactactaccacaaggtggtgatccggctgcaccgggtgacccagcccttcatcctgcggaggaccaagagagatgtggagaagcagctgaccaagaagtatgaacatgtgctgaagtgccgcctgagcaaccggcagaaggccctgtatgaagatgtgatcctgcagcccggcacccaggaggccctgaagagcggccactttgtgaatgtgctgagcatcctggtgcggctgcagaggatctgcaaccaccctggcctggtggagcccaggcaccctggcagcagctatgtggccggccccctggagtaccccagcgccagcctcatcctgaaggccctggagcgggacttctggaaggaggccgacctgtccatgtttgacctgattggcctggagaacaagatcaccaggcatgaggccgagctgctgagcaagaagaagatccccaggaagctgatggaggagatcagcaccagcgctgccccagctgcccggcctgctgctgccaagctgaaggccagccgcctcttccagcctgtgcagtatggccagaagccagagggccgcacagtggccttccccagcacccacccccccaggacagctgcccccaccacagccagcgctgccccccagggccccctgcggggccggccccccatcgccaccttcagcgccaaccctgaggccaaggctgctgctgcccccttccagaccagccaggccagcgccagcgcccccaggcaccagcctgccagcgccagcagcacagctgccagccctgcccacccagccaagctgcgggcccagaccacagcccaggccagcaccccaggccagcccccaccccagccccaggcccccagccatgctgctggccagagcgccctgccccagaggctggtgctgcccagccaggcccaggcccggctgcccagcggggaggtggtgaagatcgcccagctggccagcatcaccggcccccagagccgggtggcccagcctgagacccctgtgaccctgcagttccagggcagcaagttcaccctgagccacagccagctgcggcagctgacagctggccagcccctgcagctgcagggctctgtgctgcagatcgtgtctgcccctggccagccctacctgcgggcccctggccctgtggtgatgcagacagtgtcccaggccggggctgtgcacggggccctgggcagcaagcccccagctgggggccccagccctgcccccctgaccccccaggtgggcgtgcccggccgggtggccgtgaatgccctggccgtgggggagcctggaacagccagcaagccagccagccccatcggcggccccacccaggaggagaagacccggctgctgaaggagcggctggaccagatctacctggtgaatgaaagacgctgcagccaggcccctgtgtatggccgggacctgctgcgcatctgtgccctgcccagccacggccgggtgcagtggaggggcagcctggatggaagaagaggcaaggaggccggccctgcccacagctacaccagcagcagcgagagccccagcgagctgatgctgaccctgtgccgctgtggggagagcctgcaggatgtgattgacagagtggccttcgtcatcccccctgtggtggccgccccacccagcctgcgggtgccccggcccccacccctgtacagccacaggatgaggatcctgcggcagggcctgcgggagcacgccgccccctacttccagcagctgcggcagaccacagccccccggctgctgcagtttcctgagctgcggctggtgcagtttgacagcggcaagctggaggccctggccatcctgctgcagaagctgaagtctgagggccggcgggtgctgatcctgagccagatgatcctgatgctggacatcctggagatgttcctgaacttccactacctgacctacgtgagaattgatgaaaatgccagcagcgagcagaggcaggagctgatgaggagcttcaacagagaccggcgcatcttctgtgccatcctgagcacccacagcaggaccaccggcatcaacctggtggaggccgacacagtggtgttctatgacaatgacctgaaccctgtgatggatgccaaggcccaggagtggtgtgacagaattggccgctgcaaggacatccacatctaccgcctggtgtctggcaacagcattgaggagaagctgctgaagaatggcaccaaggacctgatccgggaggtggccgcccagggcaatgactacagcatggccttcctgacccagaggaccatccaggagctgtttgaggtgtacagccccatggatgatgctggcttccctgtgaaggccgaggagtttgtggtgctgagccaggagcccagcgtgacagagaccatcgcccccaagatcgcccggcccttcatcgaggccctgaagagcattgagtacctggaggaggatgcccagaagagcgcccaggagggcgtgctgggcccccacacagatgccctgagcagtgacagcgagaacatgccctgtgatgaggagcccagccagctggaggagctggccgacttcatggagcagctgacccccatcgagaagtatgccctgaactacctggagctgttccacaccagcattgagcaggagaaggagaggaacagtgaagatgctgtgatgacagctgtgcgggcctgggagttctggaacctgaagaccctgcaggagcgggaggcccggctgcggctggagcaggaggaggccgagctgctgacctacaccagagaagatgcctacagcatggagtatgtgtatgaagatgtggatggccagacagaggtgatgcccctgtggaccccacccaccccaccccaggatgacagcgacatctacctggacagcgtgatgtgcctgatgtatgaggccacccccatccctgaggccaagctgccccctgtgtatgtgaggaaggagaggaagaggcacaagacagaccccagcgctgctggcaggaagaagaagcagagacatggagaggccgtggtgccccccaggagcctgtttgaccgggccaccccaggcctgctgaagatccggcgggagggcaaggagcagaagaagaacatcctgctgaagcagcaggtgccctttgccaagcccctgcccacctttgccaagcccacagctgagcccggccaggacaaccctgagtggctgatcagcgaggactgggccctgctgcaggccgtgaagcagctgctggagctgcccctgaacctgaccatcgtgtccccagcccacacccccaactgggacctggtgtctgatgtggtgaacagctgcagccgcatctaccgcagcagcaagcagtgcaggaacagatatgaaaatgtcatcatcccccgggaggagggcaagagcaagaacaaccggcccctgcggaccagccagatctatgcccaggatgaaaatgccacccacacccagctgtacaccagccactttgacctgatgaagatgacagctgggaagaggagcccccccatcaagcccctgctgggcatgaaccccttccagaagaaccccaagcacgcctctgtgctggccgagagcggcatcaactatgacaagcccctgccccccatccaggtggccagcctgcgggcagagagaattgccaaggagaagaaggccctggccgaccagcagaaggcccagcagcctgctgtggcccagcccccaccaccccagccccagcccccacctccaccccagcagcccccaccacccctgccccagccccaggccgccggcagccagcccccagctggccccccagctgtgcagccccagccccagccccagccccagacccagccccagcctgtgcaggccccagccaaggcccagcctgccatcaccaccggcggcagcgctgctgtgctggccggcaccatcaagacctctgtgacaggcacctccatgcccaccggggctgtgtctggaaatgtcatcgtgaacaccatcgccggcgtgcctgctgccaccttccagagcatcaacaagaggctggccagccctgtggcccctggggccctgaccaccccaggcggcagcgccccagcccaggtggtgcacacccagcccccacccagggctgtgggcagccctgccacagccaccccagacctggtgtccatggccaccacccagggcgtgcgggctgtgacctctgtgacagccagcgctgtggtgaccaccaacctgacccctgtgcagaccccagcccggagcctggtgccccaggtgtcccaggccaccggggtgcagctgcccgggaagaccatcaccccagcccacttccagctgctgcggcagcagcagcagcagcagcagcagcagcagcagcagcagcagcagcagcagcagcagcagcagcagcagcagcagcagcagcagcagaccaccaccaccagccaggtgcaggtgccccagatccagggccaggcccagagccctgcccagatcaaggctgtgggcaagctgaccccagagcacctgatcaagatgcagaagcagaagctgcagatgccaccccagcccccaccaccccaggcccagagcgccccaccccagcccacagcccaggtgcaggtgcagaccagccagcccccccagcagcagagcccccagctgaccaccgtgacagcccccaggcctggggccctgctgaccggcaccaccgtggccaacctgcaggtggcccggctgaccagggtgcccaccagccagctgcaggcccagggccagatgcagacccaggccccccagcctgcccaggtggccctggccaagccccctgtggtgtctgtgcctgctgctgtggtgagcagccctggggtgaccaccctgcccatgaatgtggccggcatctctgtggccatcggccagccccagaaggctgctggccagacagtggtggcccagcctgtgcacatgcagcagctgctgaagctgaagcagcaggccgtgcagcagcagaaggccatccagccccaggccgcccagggccctgctgctgtgcagcagaagatcacagcccagcagatcaccacccctggggcccagcagaaggtggcctatgctgcccagcctgccctgaagacccagttcctgaccacccccatcagccaggcccagaagctggccggggcccagcaggtgcagacccagatccaggtggccaagctgccccaggtggtgcagcagcagacccctgtggccagcatccagcaggtggccagcgccagccagcaggccagcccccagacagtggccctgacccaggccacagctgctggccagcaggtgcagatgatcccagctgtgacagccacagcccaggtggtgcagcagaagctgatccagcagcaggtggtgaccacagccagcgcccccctgcagacccctggggcccccaacccagcccaggtgcctgccagcagtgacagccccagccagcagcccaagctgcagatgagggtgcctgctgtgcggctgaagacccccaccaagccaccctgccagtag

SEQ ID NO: 150805 - DNA, 9480 bp, synthetic construct
  misc_feature 1..9480: note = Description of Artificial Sequence: Synthetic coding sequence
  source 1..9480: mol_type = other DNA
atgcaccacggcaccggcccccagaatgtgcagcaccagctgcagaggagccgggcctgccccggcagcgagggggaggagcagcctgcccaccccaaccccccacccagccctgctgccccctttgcccccagcgccagccccagcgccccccagagccccagctaccagatccagcagctgatgaacagaagccctgccaccggccagaatgtgaacatcaccctgcagagcgtgggccctgtggtgggcggcaaccagcagatcaccctggcccccctgcccctgcccagccccaccagccctggcttccagttcagcgcccagcccaggagatttgaacatggcagccccagctacatccaggtgaccagccccctgagccagcaggtgcagacccagagccccacccagcccagccctggccctggccaggccctgcagaatgtgcgggccggggcccctggccctggcctgggcctgtgcagcagcagccccactggaggctttgtggatgcctctgtgctggtgcggcagatcagcctgagccccagcagcggcggccactttgtgttccaggacggcagcggcctgacccagatcgcccagggcgcccaggtgcagctgcagcaccctggcacccccatcaccgtgcgggagcggcggcccagccagccccacacccagagcggcggcaccatccaccacctgggcccccagagccctgctgctgctggaggagctggcctgcagcccctggccagccccagccacatcaccacagccaacctgcccccccagatcagcagcatcatccagggccagctggtgcagcagcagcaggtgctgcagggcccccccctgccccggcccctgggctttgagaggaccccaggagtgctgctgcctggagctggaggagctgctggcttcggcatgaccagccccccaccacccaccagccccagcaggacagctgtgcccccaggcctgagcagcctgcccctgacctctgtgggcaacacaggcatgaagaaggtgcccaagaagctggaggagatccccccagccagccctgagatggcccagatgaggaagcagtgcctggactaccactaccaggagatgcaggccctgaaggaggtgttcaaggagtacctgattgagctgttcttcctgcagcacttccagggcaacatgatggacttcctggccttcaagaagaagcactacgcccccctgcaggcctacctgcggcagaatgacctggacatcgaggaggaggaggaggaggaggaggaggaggaggagaagtctgaggtgatcaatgatgaggtgaaggtggtgacaggcaaggatggccagacaggcacccctgtggccatcgccacccagctgccccccaaggtgtctgctgccttcagcagccagcagcagcccttccagcaggccctggccggcagcctggtggccggggccggcagcacagtggagacagacctcttcaagaggcagcaggccatgcccagcacaggcatggccgagcagagcaagaggccccggctggaggtgggccaccagggcgtggtgttccagcaccctggagcagatgctggggtgcccctgcagcagctgatgcccacagcccagggcggcatgccacccaccccccaggccgcccagctggccggccagaggcagagccagcagcagtatgaccccagcacaggcccccctgtgcagaatgctgccagcctgcacacccccctgccccagctgcccggccgcctgcccccagctggggtgcccacagctgccctgagcagcgccctgcagtttgcccagcagccccaggtggtggaggcccagacccagctgcagatccctgtgaagacccagcagcccaacgtgcccatcccagccccacccagcagccagctgcccatcccccccagccagcctgcccagctggccctgcacgtgcccacccctgggaaggtgcaggtgcaggccagccagctgagcagcctgccccagatggtggccagcacccggctgcctgtggaccctgccccaccctgcccccggcccctgcccaccagcagcaccagcagcctggcccctgtgtctggcagcggccctggccccagccctgcccggagcagccctgtgaaccggcccagcagcgccaccaacaaggccctgagccctgtgaccagcaggaccccaggagtggtggccagcgcccccaccaagccccagagccctgcccagaatgccaccagcagccaggacagcagccaggacaccctgacagagcagatcaccctggagaaccaggtgcaccagagaattgctgagctgaggaaggccggcctgtggagccagaggcggctgcccaagctgcaggaggccccccggcccaagagccactgggactacctgctggaggagatgcagtggatggccacagactttgcccaggagcggcgctggaaggtggccgccgccaagaagctggtgaggacagtggtgcgccaccacgaggagaagcagctgcgggaggagcggggcaagaaggaggagcagagccggctgcggagaattgctgccagcacagcccgggagattgagtgcttctggagcaacatcgagcaggtggtggagatcaagctgcgggtggagctggaggagaagaggaagaaggccctgaacctgcagaaggtgtccagaagaggcaaggagctgcggcccaagggctttgatgccctgcaggagagcagcctggacagcggcatgagcggcaggaagaggaaggccagcatcagcctgacagatgatgaggtggatgatgaggaggagaccatcgaggaggaggaggccaatgaaggagtggtggaccaccagacagagctgagcaacctggccaaggaggccgagctgcccctgctggacctgatgaagctgtatgagggcgccttcctgcccagcagccagtggccccggcccaagccagatggagaggacaccagcggggaggaggatgctgatgactgccctggggaccgggagagcaggaaggacctggtgctgattgacagcctcttcatcatggaccagttcaaggctgctgagaggatgaacatcggcaagcccaatgccaaggacattgctgatgtgacagctgtggccgaggccatcctgcccaagggcagcgcccgggtgaccacctctgtgaagttcaatgcccccagcctgctgtatggagccctgcgggactaccagaagattggcctggactggctggccaagctgtacaggaagaacctgaatggcatcctggctgatgaggccggcctgggcaagacagtgcagatcatcgccttctttgcccacctggcctgcaatgaaggcaactggggcccccacctggtggtggtgcgcagctgcaacatcctgaagtgggagctggagctgaagcgctggtgccccggcctgaagatcctgagctacatcggcagccaccgggagctgaaggccaagaggcaggagtgggccgagcccaacagcttccacgtgtgcatcaccagctacacccagttcttccggggcctgacagccttcaccagggtgcgctggaagtgcctggtgattgatgagatgcagagggtgaagggcatgacagagcggcactgggaggccgtgttcaccctgcagagccagcagaggctgctgctgattgacagccccctgcacaacaccttcctggagctgtggaccatggtgcacttcctggtgcccggcatcagccggccctacctgagcagccccctgcgggcccccagcgaggagagccaggactactaccacaaggtggtgatccggctgcaccgggtgacccagcccttcatcctgcggaggaccaagagagatgtggagaagcagctgaccaagaagtatgagcacgtgctgaagtgccgcctgagcaaccggcagaaggccctgtatgaagatgtgatcctgcagcccggcacccaggaggccctgaagagcggccactttgtgaatgtgctgagcatcctggtgcggctgcagaggatctgcaaccaccctggcctggtggagcccaggcaccctggcagcagctatgtggccggccccctggagtaccccagcgccagcctcatcctgaaggccctggagcgggacttctggaaggaggccgacctgtccatgtttgacctgattggcctggagaacaagatcaccaggcatgaagctgagctgctgagcaagaagaagatccccaggaagctgatggaggagatcagcaccagcgctgccccagctgcccggcctgctgctgccaagctgaaggccagccgcctcttccagcctgtgcagtatggccagaagccagagggccgcacagtggccttccccagcacccacccccccaggacagctgcccccaccacagccagcgctgccccccagggccccctgcggggccggccccccatcgccaccttcagcgccaaccctgaggccaaggctgctgctgcccccttccagaccagccaggccagcgccagcgcccccaggcaccagcctgccagcgccagcagcacagctgccagccctgcccacccagccaagctgcgggcccagaccacagcccaggccagcaccccaggccagcccccaccccagccccaggcccccagccacgccgccggccagagcgccctgccccagaggctggtgctgcccagccaggcccaggcccggctgcccagcggggaggtggtgaagatcgcccagctggccagcatcaccggcccccagagccgggtggcccagcctgagacccctgtgaccctgcagttccagggcagcaagttcaccctgagccacagccagctgcggcagctgacagctggccagcccctgcagctgcagggctctgtgctgcagatcgtgtctgcccctggccagccctacctgcgggcccctggccctgtggtgatgcagacagtgtcccaggccggggctgtgcatggagccctgggcagcaagcccccagctgggggccccagccctgcccccctgaccccccaggtgggcgtgcccggccgggtggccgtgaatgccctggccgtgggggagcccggcacagccagcaagccagccagccccatcggcggccccacccaggaggagaagacccggctgctgaaggagcggctggaccagatctacctggtgaatgaaagacgctgcagccaggcccctgtgtatggccgggacctgctgcgcatctgtgccctgcccagccacggccgggtgcagtggaggggcagcctggatggccggcggggcaaggaggccggccctgcccacagctacaccagcagcagcgagagccccagcgagctgatgctgaccctgtgccgctgtggggagagcctgcaggacgtcatcgacagagtggcctttgtgatcccccctgtggtggccgccccacccagcctgcgggtgccccggcccccacccctgtacagccacaggatgaggatcctgcggcagggcctgcgggagcacgccgccccctacttccagcagctgcggcagaccacagccccccggctgctgcagtttcctgagctgcggctggtgcagtttgattctgggaagctggaggccctggccatcctgctgcagaagctgaagtctgagggcagaagagtgctgatcctgagccagatgatcctgatgctggacatcctggagatgttcctgaacttccactacctgacctacgtgagaattgatgaaaatgccagcagcgagcagaggcaggagctgatgaggagcttcaacagagaccggcgcatcttctgtgccatcctgagcacccacagcaggaccaccggcatcaacctggtggaggccgacacagtggtgttctatgacaatgacctgaaccctgtgatggatgccaaggcccaggagtggtgtgaccgcatcggccgctgcaaggacatccacatctaccgcctggtgtctggcaacagcattgaggagaagctgctgaagaatggcaccaaggacctgatccgggaggtggccgcccagggcaatgactacagcatggccttcctgacccagaggaccatccaggagctgtttgaggtgtacagccccatggatgatgctggcttccctgtgaaggccgaggagtttgtggtgctgagccaggagcccagcgtgacagagaccatcgcccccaagatcgcccggcccttcatcgaggccctgaagagcattgagtacctggaggaggatgcccagaagagcgcccaggagggcgtgctgggcccccacacagatgccctgagcagtgacagcgagaacatgccctgtgatgaggagcccagccagctggaggagctggccgacttcatggagcagctgacccccatcgagaagtatgccctgaactacctggagctgttccacaccagcattgagcaggagaaggagagaaattctgaagatgctgtgatgacagctgtgcgggcctgggagttctggaacctgaagaccctgcaggagcgggaggcccggctgcggctggagcaggaggaggccgagctgctgacctacacccgggaggatgcctacagcatggagtatgtgtatgaagatgtggatggccagacagaggtgatgcccctgtggaccccacccaccccaccccaggatgacagcgacatctacctggacagcgtgatgtgcctgatgtatgaggccacccccatccctgaggccaagctgccccctgtgtatgtgaggaaggagaggaagaggcacaagacagaccccagcgctgctggcaggaagaagaagcagagacatggagaggccgtggtgcccccaagaagcctgtttgaccgggccaccccaggcctgctgaagatcagaagagagggcaaggagcagaagaagaacatcctgctgaagcagcaggtgccctttgccaagcccctgcccacctttgccaagcccacagctgagcccggccaggacaaccctgagtggctgatcagcgaggactgggccctgctgcaggccgtgaagcagctgctggagctgcccctgaacctgaccatcgtgtccccagcccacacccccaactgggacctggtgtctgatgtggtgaacagctgcagccgcatctaccgcagcagcaagcagtgcaggaacagatatgaaaatgtcatcatcccccgggaggagggcaagagcaagaacaaccggcccctgcggaccagccagatctatgcccaggatgaaaatgccacccacacccagctgtacaccagccactttgacctgatgaagatgacagctgggaagaggagcccccccatcaagcccctgctgggcatgaaccccttccagaagaaccccaagcacgcctctgtgctggccgagagcggcatcaactatgacaagcccctgccccccatccaggtggccagcctgcgggcagagcgcatcgccaaggagaagaaggccctggccgaccagcagaaggcccagcagcctgctgtggcccagcccccaccaccccagccccagcccccacctccaccccagcagcccccaccacccctgccccagccccaggccgccggcagccagcccccagctggccccccagctgtgcagccccagccccagccccagccccagacccagccccagcctgtgcaggccccagccaaggcccagcctgccatcaccactggaggcagcgctgctgtgctggccggcaccatcaagacctctgtgacaggcacctccatgcccactggagctgtgtctggaaatgtgattgtgaacaccatcgccggcgtgcctgctgccaccttccagagcatcaacaagaggctggccagccctgtggcccctggggccctgaccacccctgggggcagcgccccagcccaggtggtgcacacccagcccccacccagggctgtgggcagccctgccacagccaccccagacctggtgtccatggccaccacccagggcgtgcgggctgtgacctctgtgacagccagcgctgtggtgaccaccaacctgacccctgtgcagaccccagcccggagcctggtgccccaggtgtcccaggccactggagtgcagctgcccgggaagaccatcaccccagcccacttccagctgctgcggcagcagcagcagcagcagcagcagcagcagcagcagcagcagcagcagcagcagcagcagcagcagcagcagcagcagcagcagcagaccaccaccaccagccaggtgcaggtgccccagatccagggccaggcccagagccctgcccagatcaaggctgtgggcaagctgaccccagagcacctgatcaagatgcagaagcagaagctgcagatgccaccccagcccccaccaccccaggcccagagcgccccaccccagcccacagcccaggtgcaggtgcagaccagccagcccccccagcagcagagcccccagctgaccaccgtgacagcccccaggcctggggccctgctgaccggcaccaccgtggccaacctgcaggtggcccggctgaccagggtgcccaccagccagctgcaggcccagggccagatgcagacccaggccccccagcctgcccaggtggccctggccaagccccctgtggtgtctgtgcctgctgctgtggtgagcagccctggggtgaccaccctgcccatgaatgtggccggcatctctgtggccatcggccagccccagaaggccgccggccagacagtggtggcccagcctgtgcacatgcagcagctgctgaagctgaagcagcaggccgtgcagcagcagaaggccatccagccccaggccgcccagggccctgctgctgtgcagcagaagatcacagcccagcagatcaccacccctggggcccagcagaaggtggcctatgctgcccagcctgccctgaagacccagttcctgaccacccccatcagccaggcccagaagctggccggggcccagcaggtgcagacccagatccaggtggccaagctgccccaggtggtgcagcagcagacccctgtggccagcatccagcaggtggccagcgccagccagcaggccagcccccagacagtggccctgacccaggccacagctgctggccagcaggtgcagatgatcccagctgtgacagccacagcccaggtggtgcagcagaagctgatccagcagcaggtggtgaccacagccagcgcccccctgcagacccctggggcccccaacccagcccaggtgcctgccagcagtgacagccccagccagcagcccaagctgcagatgagggtgcctgctgtgcggctgaagacccccaccaagccaccctgccagtag

SEQ ID NO: 150806 - DNA, 9372 bp, synthetic construct
  misc_feature 1..9372: note = Description of Artificial Sequence: Synthetic coding sequence
  source 1..9372: mol_type = other DNA
atgcaccacggcaccggcccccagaatgtgcagcaccagctgcagaggagccgggcctgccccggcagcgagggggaggagcagcctgcccaccccaaccccccacccagccctgctgccccctttgcccccagcgccagccccagcgccccccagagccccagctaccagatccagcagctgatgaacagaagccctgccaccggccagaatgtgaacatcaccctgcagagcgtgggccctgtggtgggcggcaaccagcagatcaccctggcccccctgcccctgcccagccccaccagccctggcttccagttcagcgcccagcccaggagatttgaacatggcagccccagctacatccaggtgaccagccccctgagccagcaggtgcagacccagagccccacccagcccagccctggccctggccaggccctgcagaatgtgcgggccggggcccctggccctggcctgggcctgtgcagcagcagccccactggaggctttgtggatgcctctgtgctggtgcggcagatcagcctgagccccagcagcggcggccactttgtgttccaggacggcagcggcctgacccagatcgcccagggcgcccaggtgcagctgcagcaccctggcacccccatcaccgtgcgggagcggcggcccagccagccccacacccagagcggcggcaccatccaccacctgggcccccagagccctgctgctgctggaggagctggcctgcagcccctggccagccccagccacatcaccacagccaacctgcccccccagatcagcagcatcatccagggccagctggtgcagcagcagcaggtgctgcagggcccccccctgccccggcccctgggctttgagaggaccccaggagtgctgctgcctggagctggaggagctgctggcttcggcatgaccagccccccaccacccaccagccccagcaggacagctgtgcccccaggcctgagcagcctgcccctgacctctgtgggcaacacaggcatgaagaaggtgcccaagaagctggaggagatccccccagccagccctgagatggcccagatgaggaagcagtgcctggactaccactaccaggagatgcaggccctgaaggaggtgttcaaggagtacctgattgagctgttcttcctgcagcacttccagggcaacatgatggacttcctggccttcaagaagaagcactacgcccccctgcaggcctacctgcggcagaatgacctggacatcgaggaggaggaggaggaggaggaggaggaggaggagaagtctgaggtgatcaatgatgagcagcaggccctggccggcagcctggtggccggggccggcagcacagtggagacagacctcttcaagaggcagcaggccatgcccagcacaggcatggccgagcagagcaagaggccccggctggaggtgggccaccagggcgtggtgttccagcaccctggagcagatgctggggtgcccctgcagcagctgatgcccacagcccagggcggcatgccacccaccccccaggccgcccagctggccggccagaggcagagccagcagcagtatgaccccagcacaggcccccctgtgcagaatgctgccagcctgcacacccccctgccccagctgcccggccgcctgcccccagctggggtgcccacagctgccctgagcagcgccctgcagtttgcccagcagccccaggtggtggaggcccagacccagctgcagatccctgtgaagacccagcagcccaacgtgcccatcccagccccacccagcagccagctgcccatcccccccagccagcctgcccagctggccctgcacgtgcccacccctgggaaggtgcaggtgcaggccagccagctgagcagcctgccccagatggtggccagcacccggctgcctgtggaccctgccccaccctgcccccggcccctgcccaccagcagcaccagcagcctggcccctgtgtctggcagcggccctggccccagccctgcccggagcagccctgtgaaccggcccagcagcgccaccaacaaggccctgagccctgtgaccagcaggaccccaggagtggtggccagcgcccccaccaagccccagagccctgcccagaatgccaccagcagccaggacagcagccaggacaccctgacagagcagatcaccctggagaaccaggtgcaccagagaattgctgagctgaggaaggccggcctgtggagccagaggcggctgcccaagctgcaggaggccccccggcccaagagccactgggactacctgctggaggagatgcagtggatggccacagactttgcccaggagcggcgctggaaggtggccgccgccaagaagctggtgaggacagtggtgcgccaccacgaggagaagcagctgcgggaggagcggggcaagaaggaggagcagagccggctgcggagaattgctgccagcacagcccgggagattgagtgcttctggagcaacatcgagcaggtggtggagatcaagctgcgggtggagctggaggagaagaggaagaaggccctgaacctgcagaaggtgtccagaagaggcaaggagctgcggcccaagggctttgatgccctgcaggagagcagcctggacagcggcatgagcggcaggaagaggaaggccagcatcagcctgacagatgatgaggtggatgatgaggaggagaccatcgaggaggaggaggccaatgaaggagtggtggaccaccagacagagctgagcaacctggccaaggaggccgagctgcccctgctggacctgatgaagctgtatgagggcgccttcctgcccagcagccagtggccccggcccaagccagatggagaggacaccagcggggaggaggatgctgatgactgccctggggaccgggagagcaggaaggacctggtgctgattgacagcctcttcatcatggaccagttcaaggctgctgagaggatgaacatcggcaagcccaatgccaaggacattgctgatgtgacagctgtggccgaggccatcctgcccaagggcagcgcccgggtgaccacctctgtgaagttcaatgcccccagcctgctgtatggagccctgcgggactaccagaagattggcctggactggctggccaagctgtacaggaagaacctgaatggcatcctggctgatgaggccggcctgggcaagacagtgcagatcatcgccttctttgcccacctggcctgcaatgaaggcaactggggcccccacctggtggtggtgcgcagctgcaacatcctgaagtgggagctggagctgaagcgctggtgccccggcctgaagatcctgagctacatcggcagccaccgggagctgaaggccaagaggcaggagtgggccgagcccaacagcttccacgtgtgcatcaccagctacacccagttcttccggggcctgacagccttcaccagggtgcgctggaagtgcctggtgattgatgagatgcagagggtgaagggcatgacagagcggcactgggaggccgtgttcaccctgcagagccagcagaggctgctgctgattgacagccccctgcacaacaccttcctggagctgtggaccatggtgcacttcctggtgcccggcatcagccggccctacctgagcagccccctgcgggcccccagcgaggagagccaggactactaccacaaggtggtgatccggctgcaccgggtgacccagcccttcatcctgcggaggaccaagagagatgtggagaagcagctgaccaagaagtatgagcacgtgctgaagtgccgcctgagcaaccggcagaaggccctgtatgaagatgtgatcctgcagcccggcacccaggaggccctgaagagcggccactttgtgaatgtgctgagcatcctggtgcggctgcagaggatctgcaaccaccctggcctggtggagcccaggcaccctggcagcagctatgtggccggccccctggagtaccccagcgccagcctcatcctgaaggccctggagcgggacttctggaaggaggccgacctgtccatgtttgacctgattggcctggagaacaagatcaccaggcatgaagctgagctgctgagcaagaagaagatccccaggaagctgatggaggagatcagcaccagcgctgccccagctgcccggcctgctgctgccaagctgaaggccagccgcctcttccagcctgtgcagtatggccagaagccagagggccgcacagtggccttccccagcacccacccccccaggacagctgcccccaccacagccagcgctgccccccagggccccctgcggggccggccccccatcgccaccttcagcgccaaccctgaggccaaggctgctgctgcccccttccagaccagccaggccagcgccagcgcccccaggcaccagcctgccagcgccagcagcacagctgccagccctgcccacccagccaagctgcgggcccagaccacagcccaggccagcaccccaggccagcccccaccccagccccaggcccccagccacgccgccggccagagcgccctgccccagaggctggtgctgcccagccaggcccaggcccggctgcccagcggggaggtggtgaagatcgcccagctggccagcatcaccggcccccagagccgggtggcccagcctgagacccctgtgaccctgcagttccagggcagcaagttcaccctgagccacagccagctgcggcagctgacagctggccagcccctgcagctgcagggctctgtgctgcagatcgtgtctgcccctggccagccctacctgcgggcccctggccctgtggtgatgcagacagtgtcccaggccggggctgtgcatggagccctgggcagcaagcccccagctgggggccccagccctgcccccctgaccccccaggtgggcgtgcccggccgggtggccgtgaatgccctggccgtgggggagcccggcacagccagcaagccagccagccccatcggcggccccacccaggaggagaagacccggctgctgaaggagcggctggaccagatctacctggtgaatgaaagacgctgcagccaggcccctgtgtatggccgggacctgctgcgcatctgtgccctgcccagccacggccgggtgcagtggaggggcagcctggatggccggcggggcaaggaggccggccctgcccacagctacaccagcagcagcgagagccccagcgagctgatgctgaccctgtgccgctgtggggagagcctgcaggacgtcatcgacagagtggcctttgtgatcccccctgtggtggccgccccacccagcctgcgggtgccccggcccccacccctgtacagccacaggatgaggatcctgcggcagggcctgcgggagcacgccgccccctacttccagcagctgcggcagaccacagccccccggctgctgcagtttcctgagctgcggctggtgcagtttgattctgggaagctggaggccctggccatcctgctgcagaagctgaagtctgagggcagaagagtgctgatcctgagccagatgatcctgatgctggacatcctggagatgttcctgaacttccactacctgacctacgtgagaattgatgaaaatgccagcagcgagcagaggcaggagctgatgaggagcttcaacagagaccggcgcatcttctgtgccatcctgagcacccacagcaggaccaccggcatcaacctggtggaggccgacacagtggtgttctatgacaatgacctgaaccctgtgatggatgccaaggcccaggagtggtgtgaccgcatcggccgctgcaaggacatccacatctaccgcctggtgtctggcaacagcattgaggagaagctgctgaagaatggcaccaaggacctgatccgggaggtggccgcccagggcaatgactacagcatggccttcctgacccagaggaccatccaggagctgtttgaggtgtacagccccatggatgatgctggcttccctgtgaaggccgaggagtttgtggtgctgagccaggagcccagcgtgacagagaccatcgcccccaagatcgcccggcccttcatcgaggccctgaagagcattgagtacctggaggaggatgcccagaagagcgcccaggagggcgtgctgggcccccacacagatgccctgagcagtgacagcgagaacatgccctgtgatgaggagcccagccagctggaggagctggccgacttcatggagcagctgacccccatcgagaagtatgccctgaactacctggagctgttccacaccagcattgagcaggagaaggagagaaattctgaagatgctgtgatgacagctgtgcgggcctgggagttctggaacctgaagaccctgcaggagcgggaggcccggctgcggctggagcaggaggaggccgagctgctgacctacacccgggaggatgcctacagcatggagtatgtgtatgaagatgtggatggccagacagaggtgatgcccctgtggaccccacccaccccaccccaggatgacagcgacatctacctggacagcgtgatgtgcctgatgtatgaggccacccccatccctgaggccaagctgccccctgtgtatgtgaggaaggagaggaagaggcacaagacagaccccagcgctgctggcaggaagaagaagcagagacatggagaggccgtggtgcccccaagaagcctgtttgaccgggccaccccaggcctgctgaagatcagaagagagggcaaggagcagaagaagaacatcctgctgaagcagcaggtgccctttgccaagcccctgcccacctttgccaagcccacagctgagcccggccaggacaaccctgagtggctgatcagcgaggactgggccctgctgcaggccgtgaagcagctgctggagctgcccctgaacctgaccatcgtgtccccagcccacacccccaactgggacctggtgtctgatgtggtgaacagctgcagccgcatctaccgcagcagcaagcagtgcaggaacagatatgaaaatgtcatcatcccccgggaggagggcaagagcaagaacaaccggcccctgcggaccagccagatctatgcccaggatgaaaatgccacccacacccagctgtacaccagccactttgacctgatgaagatgacagctgggaagaggagcccccccatcaagcccctgctgggcatgaaccccttccagaagaaccccaagcacgcctctgtgctggccgagagcggcatcaactatgacaagcccctgccccccatccaggtggccagcctgcgggcagagcgcatcgccaaggagaagaaggccctggccgaccagcagaaggcccagcagcctgctgtggcccagcccccaccaccccagccccagcccccacctccaccccagcagcccccaccacccctgccccagccccaggccgccggcagccagcccccagctggccccccagctgtgcagccccagccccagccccagccccagacccagccccagcctgtgcaggccccagccaaggcccagcctgccatcaccactggaggcagcgctgctgtgctggccggcaccatcaagacctctgtgacaggcacctccatgcccactggagctgtgtctggaaatgtgattgtgaacaccatcgccggcgtgcctgctgccaccttccagagcatcaacaagaggctggccagccctgtggcccctggggccctgaccacccctgggggcagcgccccagcccaggtggtgcacacccagcccccacccagggctgtgggcagccctgccacagccaccccagacctggtgtccatggccaccacccagggcgtgcgggctgtgacctctgtgacagccagcgctgtggtgaccaccaacctgacccctgtgcagaccccagcccggagcctggtgccccaggtgtcccaggccactggagtgcagctgcccgggaagaccatcaccccagcccacttccagctgctgcggcagcagcagcagcagcagcagcagcagcagcagcagcagcagcagcagcagcagcagcagcagcagcagcagcagcagcagcagcagaccaccaccaccagccaggtgcaggtgccccagatccagggccaggcccagagccctgcccagatcaaggctgtgggcaagctgaccccagagcacctgatcaagatgcagaagcagaagctgcagatgccaccccagcccccaccaccccaggcccagagcgccccaccccagcccacagcccaggtgcaggtgcagaccagccagcccccccagcagcagagcccccagctgaccaccgtgacagcccccaggcctggggccctgctgaccggcaccaccgtggccaacctgcaggtggcccggctgaccagggtgcccaccagccagctgcaggcccagggccagatgcagacccaggccccccagcctgcccaggtggccctggccaagccccctgtggtgtctgtgcctgctgctgtggtgagcagccctggggtgaccaccctgcccatgaatgtggccggcatctctgtggccatcggccagccccagaaggccgccggccagacagtggtggcccagcctgtgcacatgcagcagctgctgaagctgaagcagcaggccgtgcagcagcagaaggccatccagccccaggccgcccagggccctgctgctgtgcagcagaagatcacagcccagcagatcaccacccctggggcccagcagaaggtggcctatgctgcccagcctgccctgaagacccagttcctgaccacccccatcagccaggcccagaagctggccggggcccagcaggtgcagacccagatccaggtggccaagctgccccaggtggtgcagcagcagacccctgtggccagcatccagcaggtggccagcgccagccagcaggccagcccccagacagtggccctgacccaggccacagctgctggccagcaggtgcagatgatcccagctgtgacagccacagcccaggtggtgcagcagaagctgatccagcagcaggtggtgaccacagccagcgcccccctgcagacccctggggcccccaacccagcccaggtgcctgccagcagtgacagccccagccagcagcccaagctgcagatgagggtgcctgctgtgcggctgaagacccccaccaagccaccctgccagtag

SEQ ID NO: 150807 - DNA, 9369 bp, synthetic construct
  misc_feature 1..9369: note = Description of Artificial Sequence: Synthetic coding sequence
  source 1..9369: mol_type = other DNA
atgcaccacggcaccggcccccagaatgtgcagcaccagctgcagaggagccgggcctgccccggcagcgagggggaggagcagcctgcccaccccaaccccccacccagccctgctgccccctttgcccccagcgccagccccagcgccccccagagccccagctaccagatccagcagctgatgaacagaagccctgccaccggccagaatgtgaacatcaccctgcagagcgtgggccctgtggtgggcggcaaccagcagatcaccctggcccccctgcccctgcccagccccaccagccctggcttccagttcagcgcccagcccaggagatttgaacatggcagccccagctacatccaggtgaccagccccctgagccagcaggtgcagacccagagccccacccagcccagccctggccctggccaggccctgcagaatgtgcgggccggggcccctggccctggcctgggcctgtgcagcagcagccccactggaggctttgtggatgcctctgtgctggtgcggcagatcagcctgagccccagcagcggcggccactttgtgttccaggacggcagcggcctgacccagatcgcccagggcgcccaggtgcagctgcagcaccctggcacccccatcaccgtgcgggagcggcggcccagccagccccacacccagagcggcggcaccatccaccacctgggcccccagagccctgctgctgctggaggagctggcctgcagcccctggccagccccagccacatcaccacagccaacctgcccccccagatcagcagcatcatccagggccagctggtgcagcagcagcaggtgctgcagggcccccccctgccccggcccctgggctttgagaggaccccaggagtgctgctgcctggagctggaggagctgctggcttcggcatgaccagccccccaccacccaccagccccagcaggacagctgtgcccccaggcctgagcagcctgcccctgacctctgtgggcaacacaggcatgaagaaggtgcccaagaagctggaggagatccccccagccagccctgagatggcccagatgaggaagcagtgcctggactaccactaccaggagatgcaggccctgaaggaggtgttcaaggagtacctgattgagctgttcttcctgcagcacttccagggcaacatgatggacttcctggccttcaagaagaagcactacgcccccctgcaggcctacctgcggcagaatgacctggacatcgaggaggaggaggaggaggaggaggaggaggaggagaagtctgaggtgatcaatgatgagcaggccctggccggcagcctggtggccggggccggcagcacagtggagacagacctcttcaagaggcagcaggccatgcccagcacaggcatggccgagcagagcaagaggccccggctggaggtgggccaccagggcgtggtgttccagcaccctggagcagatgctggggtgcccctgcagcagctgatgcccacagcccagggcggcatgccacccaccccccaggccgcccagctggccggccagaggcagagccagcagcagtatgaccccagcactggacctcctgtgcagaatgctgccagcctgcacacccccctgccccagctgcccggccgcctgcccccagctggggtgcccacagctgccctgagcagcgccctgcagtttgcccagcagccccaggtggtggaggcccagacccagctgcagatccctgtgaagacccagcagcccaacgtgcccatcccagccccacccagcagccagctgcccatcccccccagccagcctgcccagctggccctgcacgtgcccaccccaggcaaggtgcaggtgcaggccagccagctgagcagcctgccccagatggtggccagcacccggctgcctgtggaccctgccccaccctgcccccggcccctgcccaccagcagcaccagcagcctggcccctgtgtctggcagcggccctggccccagccctgcccggagcagccctgtgaaccggcccagcagcgccaccaacaaggccctgagccctgtgaccagcaggaccccaggagtggtggccagcgcccccaccaagccccagagccctgcccagaatgccaccagcagccaggacagcagccaggacaccctgacagagcagatcaccctggagaaccaggtgcaccagagaattgctgagctgaggaaggccggcctgtggagccagaggcggctgcccaagctgcaggaggccccccggcccaagagccactgggactacctgctggaggagatgcagtggatggccacagactttgcccaggagcggcgctggaaggtggccgccgccaagaagctggtgaggacagtggtgcgccaccacgaggagaagcagctgcgggaggagcggggcaagaaggaggagcagagccggctgcggagaattgctgccagcacagcccgggagattgagtgcttctggagcaacatcgagcaggtggtggagatcaagctgcgggtggagctggaggagaagaggaagaaggccctgaacctgcagaaggtgtcccggcggggcaaggagctgcggcccaagggctttgatgccctgcaggagagcagcctggacagcggcatgagcggcaggaagaggaaggccagcatcagcctgacagatgatgaggtggatgatgaggaggagaccatcgaggaggaggaggccaatgaaggagtggtggaccaccagacagagctgagcaacctggccaaggaggccgagctgcccctgctggacctgatgaagctgtatgaaggagccttcctgcccagcagccagtggccccggcccaagccagatggagaggacaccagcggggaggaggatgctgatgactgccctggggaccgggagagcaggaaggacctggtgctgattgacagcctcttcatcatggaccagttcaaggctgctgagaggatgaacatcggcaagcccaatgccaaggacattgctgatgtgacagctgtggccgaggccatcctgcccaagggcagcgcccgggtgaccacctctgtgaagttcaatgcccccagcctgctgtatggagccctgcgggactaccagaagattggcctggactggctggccaagctgtacaggaagaacctgaatggcatcctggctgatgaagctggcctgggcaagacagtgcagatcatcgccttctttgcccacctggcctgcaatgaaggcaactggggcccccacctggtggtggtgcgcagctgcaacatcctgaagtgggagctggagctgaagcgctggtgccccggcctgaagatcctgagctacatcggcagccaccgggagctgaaggccaagaggcaggagtgggccgagcccaacagcttccacgtgtgcatcaccagctacacccagttcttccggggcctgacagccttcaccagggtgcgctggaagtgcctggtgattgatgagatgcagagggtgaagggcatgacagagcggcactgggaggccgtgttcaccctgcagagccagcagaggctgctgctgattgacagccccctgcacaacaccttcctggagctgtggaccatggtgcacttcctggtgcccggcatcagccggccctacctgagcagccccctgcgggcccccagcgaggagagccaggactactaccacaaggtggtgatccggctgcaccgggtgacccagcccttcatcctgcggaggaccaagagagatgtggagaagcagctgaccaagaagtatgaacatgtgctgaagtgccgcctgagcaaccggcagaaggccctgtatgaagatgtgatcctgcagcccggcacccaggaggccctgaagagcggccactttgtgaatgtgctgagcatcctggtgcggctgcagaggatctgcaaccaccctggcctggtggagcccaggcaccctggcagcagctatgtggccggccccctggagtaccccagcgccagcctcatcctgaaggccctggagcgggacttctggaaggaggccgacctgtccatgtttgacctgattggcctggagaacaagatcaccaggcatgaggccgagctgctgagcaagaagaagatccccaggaagctgatggaggagatcagcaccagcgctgccccagctgcccggcctgctgctgccaagctgaaggccagccgcctcttccagcctgtgcagtatggccagaagccagagggccgcacagtggccttccccagcacccacccccccaggacagctgcccccaccacagccagcgctgccccccagggccccctgcggggccggccccccatcgccaccttcagcgccaaccctgaggccaaggctgctgctgcccccttccagaccagccaggccagcgccagcgcccccaggcaccagcctgccagcgccagcagcacagctgccagccctgcccacccagccaagctgcgggcccagaccacagcccaggccagcaccccaggccagcccccaccccagccccaggcccccagccatgctgctggccagagcgccctgccccagaggctggtgctgcccagccaggcccaggcccggctgcccagcggggaggtggtgaagatcgcccagctggccagcatcaccggcccccagagccgggtggcccagcctgagacccctgtgaccctgcagttccagggcagcaagttcaccctgagccacagccagctgcggcagctgacagctggccagcccctgcagctgcagggctctgtgctgcagatcgtgtctgcccctggccagccctacctgcgggcccctggccctgtggtgatgcagacagtgtcccaggccggggctgtgcacggggccctgggcagcaagcccccagctgggggccccagccctgcccccctgaccccccaggtgggcgtgcccggccgggtggccgtgaatgccctggccgtgggggagcctggaacagccagcaagccagccagccccatcggcggccccacccaggaggagaagacccggctgctgaaggagcggctggaccagatctacctggtgaatgaaagacgctgcagccaggcccctgtgtatggccgggacctgctgcgcatctgtgccctgcccagccacggccgggtgcagtggaggggcagcctggatggaagaagaggcaaggaggccggccctgcccacagctacaccagcagcagcgagagccccagcgagctgatgctgaccctgtgccgctgtggggagagcctgcaggatgtgattgacagagtggccttcgtcatcccccctgtggtggccgccccacccagcctgcgggtgccccggcccccacccctgtacagccacaggatgaggatcctgcggcagggcctgcgggagcacgccgccccctacttccagcagctgcggcagaccacagccccccggctgctgcagtttcctgagctgcggctggtgcagtttgacagcggcaagctggaggccctggccatcctgctgcagaagctgaagtctgagggccggcgggtgctgatcctgagccagatgatcctgatgctggacatcctggagatgttcctgaacttccactacctgacctacgtgagaattgatgaaaatgccagcagcgagcagaggcaggagctgatgaggagcttcaacagagaccggcgcatcttctgtgccatcctgagcacccacagcaggaccaccggcatcaacctggtggaggccgacacagtggtgttctatgacaatgacctgaaccctgtgatggatgccaaggcccaggagtggtgtgacagaattggccgctgcaaggacatccacatctaccgcctggtgtctggcaacagcattgaggagaagctgctgaagaatggcaccaaggacctgatccgggaggtggccgcccagggcaatgactacagcatggccttcctgacccagaggaccatccaggagctgtttgaggtgtacagccccatggatgatgctggcttccctgtgaaggccgaggagtttgtggtgctgagccaggagcccagcgtgacagagaccatcgcccccaagatcgcccggcccttcatcgaggccctgaagagcattgagtacctggaggaggatgcccagaagagcgcccaggagggcgtgctgggcccccacacagatgccctgagcagtgacagcgagaacatgccctgtgatgaggagcccagccagctggaggagctggccgacttcatggagcagctgacccccatcgagaagtatgccctgaactacctggagctgttccacaccagcattgagcaggagaaggagaggaacagtgaagatgctgtgatgacagctgtgcgggcctgggagttctggaacctgaagaccctgcaggagcgggaggcccggctgcggctggagcaggaggaggccgagctgctgacctacaccagagaagatgcctacagcatggagtatgtgtatgaagatgtggatggccagacagaggtgatgcccctgtggaccccacccaccccaccccaggatgacagcgacatctacctggacagcgtgatgtgcctgatgtatgaggccacccccatccctgaggccaagctgccccctgtgtatgtgaggaaggagaggaagaggcacaagacagaccccagcgctgctggcaggaagaagaagcagagacatggagaggccgtggtgccccccaggagcctgtttgaccgggccaccccaggcctgctgaagatccggcgggagggcaaggagcagaagaagaacatcctgctgaagcagcaggtgccctttgccaagcccctgcccacctttgccaagcccacagctgagcccggccaggacaaccctgagtggctgatcagcgaggactgggccctgctgcaggccgtgaagcagctgctggagctgcccctgaacctgaccatcgtgtccccagcccacacccccaactgggacctggtgtctgatgtggtgaacagctgcagccgcatctaccgcagcagcaagcagtgcaggaacagatatgaaaatgtcatcatcccccgggaggagggcaagagcaagaacaaccggcccctgcggaccagccagatctatgcccaggatgaaaatgccacccacacccagctgtacaccagccactttgacctgatgaagatgacagctgggaagaggagcccccccatcaagcccctgctgggcatgaaccccttccagaagaaccccaagcacgcctctgtgctggccgagagcggcatcaactatgacaagcccctgccccccatccaggtggccagcctgcgggcagagagaattgccaaggagaagaaggccctggccgaccagcagaaggcccagcagcctgctgtggcccagcccccaccaccccagccccagcccccacctccaccccagcagcccccaccacccctgccccagccccaggccgccggcagccagcccccagctggccccccagctgtgcagccccagccccagccccagccccagacccagccccagcctgtgcaggccccagccaaggcccagcctgccatcaccaccggcggcagcgctgctgtgctggccggcaccatcaagacctctgtgacaggcacctccatgcccaccggggctgtgtctggaaatgtcatcgtgaacaccatcgccggcgtgcctgctgccaccttccagagcatcaacaagaggctggccagccctgtggcccctggggccctgaccaccccaggcggcagcgccccagcccaggtggtgcacacccagcccccacccagggctgtgggcagccctgccacagccaccccagacctggtgtccatggccaccacccagggcgtgcgggctgtgacctctgtgacagccagcgctgtggtgaccaccaacctgacccctgtgcagaccccagcccggagcctggtgccccaggtgtcccaggccaccggggtgcagctgcccgggaagaccatcaccccagcccacttccagctgctgcggcagcagcagcagcagcagcagcagcagcagcagcagcagcagcagcagcagcagcagcagcagcagcagcagcagcagcagcagcagaccaccaccaccagccaggtgcaggtgccccagatccagggccaggcccagagccctgcccagatcaaggctgtgggcaagctgaccccagagcacctgatcaagatgcagaagcagaagctgcagatgccaccccagcccccaccaccccaggcccagagcgccccaccccagcccacagcccaggtgcaggtgcagaccagccagcccccccagcagcagagcccccagctgaccaccgtgacagcccccaggcctggggccctgctgaccggcaccaccgtggccaacctgcaggtggcccggctgaccagggtgcccaccagccagctgcaggcccagggccagatgcagacccaggccccccagcctgcccaggtggccctggccaagccccctgtggtgtctgtgcctgctgctgtggtgagcagccctggggtgaccaccctgcccatgaatgtggccggcatctctgtggccatcggccagccccagaaggctgctggccagacagtggtggcccagcctgtgcacatgcagcagctgctgaagctgaagcagcaggccgtgcagcagcagaaggccatccagccccaggccgcccagggccctgctgctgtgcagcagaagatcacagcccagcagatcaccacccctggggcccagcagaaggtggcctatgctgcccagcctgccctgaagacccagttcctgaccacccccatcagccaggcccagaagctggccggggcccagcaggtgcagacccagatccaggtggccaagctgccccaggtggtgcagcagcagacccctgtggccagcatccagcaggtggccagcgccagccagcaggccagcccccagacagtggccctgacccaggccacagctgctggccagcaggtgcagatgatcccagctgtgacagccacagcccaggtggtgcagcagaagctgatccagcagcaggtggtgaccacagccagcgcccccctgcagacccctggggcccccaacccagcccaggtgcctgccagcagtgacagccccagccagcagcccaagctgcagatgagggtgcctgctgtgcggctgaagacccccaccaagccaccctgccagtag

SEQ ID NO: 150808 - DNA, 2475 bp, synthetic construct
  misc_feature 1..2475: note = Description of Artificial Sequence: Synthetic coding sequence
  source 1..2475: mol_type = other DNA
atgcaccacggcaccggcccccagaatgtgcagcaccagctgcagaggagccgggcctgccccggcagcgagggggaggagcagcctgcccaccccaaccccccacccagccctgctgccccctttgcccccagcgccagccccagcgccccccagagccccagctaccagatccagcagctgatgaacagaagccctgccaccggccagaatgtgaacatcaccctgcagagcgtgggccctgtggtgggcggcaaccagcagatcaccctggcccccctgcccctgcccagccccaccagccctggcttccagttcagcgcccagcccaggagatttgaacatggcagccccagctacatccaggtgaccagccccctgagccagcaggtgcagacccagagccccacccagcccagccctggccctggccaggccctgcagaatgtgcgggccggggcccctggccctggcctgggcctgtgcagcagcagccccactggaggctttgtggatgcctctgtgctggtgcggcagatcagcctgagccccagcagcggcggccactttgtgttccaggacggcagcggcctgacccagatcgcccagggcgcccaggtgcagctgcagcaccctggcacccccatcaccgtgcgggagcggcggcccagccagccccacacccagagcggcggcaccatccaccacctgggcccccagagccctgctgctgctggaggagctggcctgcagcccctggccagccccagccacatcaccacagccaacctgcccccccagatcagcagcatcatccagggccagctggtgcagcagcagcaggtgctgcagggcccccccctgccccggcccctgggctttgagaggaccccaggagtgctgctgcctggagctggaggagctgctggcttcggcatgaccagccccccaccacccaccagccccagcaggacagctgtgcccccaggcctgagcagcctgcccctgacctctgtgggcaacacaggcatgaagaaggtgcccaagaagctggaggagatccccccagccagccctgagatggcccagatgaggaagcagtgcctggactaccactaccaggagatgcaggccctgaaggaggtgttcaaggagtacctgattgagctgttcttcctgcagcacttccagggcaacatgatggacttcctggccttcaagaagaagcactacgcccccctgcaggcctacctgcggcagaatgacctggacatcgaggaggaggaggaggaggaggaggaggaggaggagaagtctgaggtgatcaatgatgagcaggccctggccggcagcctggtggccggggccggcagcacagtggagacagacctcttcaagaggcagcaggccatgcccagcacaggcatggccggcggcatgccacccaccccccaggccgcccagctggccggccagaggcagagccagcagcagtatgaccccagcactggacctcctgtgcagaatgctgccagcctgcacacccccctgccccagctgcccggccgcctgcccccagctggggtgcccacagctgccctgagcagcgccctgcagtttgcccagcagccccaggtggtggaggcccagacccagctgcagatccctgtgaagacccagcagcccaacgtgcccatcccagccccacccagcagccagctgcccatcccccccagccagcctgcccagctggccctgcacgtgcccaccccaggcaaggtgcaggtgcaggccagccagctgagcagcctgccccagatggtggccagcacccggctgcctgtggaccctgccccaccctgcccccggcccctgcccaccagcagcaccagcagcctggcccctgtgtctggcagcggccctggccccagccctgcccggagcagccctgtgaaccggcccagcagcgccaccaacaaggccctgagccctgtgaccagcaggaccccaggagtggtggccagcgcccccaccaagccccagagccctgcccagaatgccaccagcagccaggacagcagccaggacaccctgacagagcagatcaccctggagaaccaggtgcaccagagaattgctgagctgaggaaggccggcctgtggagccagaggcggctgcccaagctgcaggaggccccccggcccaagagccactgggactacctgctggaggagatgcagtggatggccacagactttgcccaggagcggcgctggaaggtggccgccgccaagaagctggtgaggacagtggtgcgccaccacgaggagaagcagctgcgggaggagcggggcaagaaggaggagcagagccggctgcggagaattgctgccagcacagcccgggagattgagtgcttctggagcaacatcgagcaggtggtggagatcaagctgcgggtggagctggagtag

SEQ ID NO: 150809 - DNA, 9372 bp, synthetic construct; identical to SEQ ID NO: 150806
  misc_feature 1..9372: note = Description of Artificial Sequence: Synthetic coding sequence
  source 1..9372: mol_type = other DNA

SEQ ID NO: 150810 - DNA, 1314 bp, synthetic construct
  misc_feature 1..1314: note = Description of Artificial Sequence: Synthetic coding sequence
  source 1..1314: mol_type = other DNA
atgctgcagggcccccgggccctggccagcgctgctggccagacccccaaggtggtgcctgccatgagccccacagagctgtggcccagcggcctgagcagcccccagctgtgcccagccacagccacctactacacccccctgtacccccagacagcccccccagctgctgcccctggcacctgcctggatgccaccccccacggccctgagggccaggtggtgcgctgcctgcctgctggccgcctgcctgccaagaggaagctggacctggagggcatcggccggcctgtggtgcctgagttccccacccccaagggcaagtgcatccgggtggatggcctgcccagccccaagacccccaagagccctggagagaagaccaggtatgacaccagcctgggcctgctgaccaagaagttcatctacctgctgtctgagagtgaagatggagtgctggacctgaactgggccgctgaggtgctggatgtgcagaagaggcgcatctatgacatcaccaacgtgctggagggcatccagctgatcaggaagaaggccaagaacaacatccagtgggtgggccggggcatgtttgaggaccccaccaggcctgggaagcagcagcagctgggccaggagctgaaggagctgatgaacacagagcaggccctggaccagctgatccagagctgcagcctgtccttcaagcacctgacagaggacaaggccaacaagaggctggcctacgtgacctaccaggacatccgggctgtgggcaacttcaaggagcagacagtgattgctgtgaaggccccaccccagacccggctggaggtgcctgacagaacagaggacaacctgcagatctacctgaagagcacccagggccccatcgaggtgtacctgtgcccagaggaggtgcaggagccagacagccccagcgaggagcccctgcccagcaccagcaccctgtgccccagcccagacagcgcccagcccagcagcagcacagaccccagcatcatggagcccacagccagctctgtgcctgccccagcccccaccccccagcaggcccctcctccacccagcctggtgcccctggaggccacagacagcctgctggagctgccccaccccctgctgcagcagacagaggaccagttcctgagccccaccctggcctgcagcagccccctcatctccttcagccccagcctggaccaggatgactacctgtggggcctggaggccggggagggcatcagtgacctgtttgacagctatgacctgggggacctgctgatcaactag

SEQ ID NO: 150811 - DNA, 1398 bp, synthetic construct
  misc_feature 1..1398: note = Description of Artificial Sequence: Synthetic coding sequence
  source 1..1398: mol_type = other DNA
atgaggaagggcatccagcctgccctggagcagtacctggtgacagctgggggcggggagggcgctgctgtggtggccgctgctgctgctgcctccatggacaagagggccctgctggccagccctggctttgctgctgctgctgctgctgctgctgcccctggggcctacatccagatcctgaccaccaacaccagcaccaccagctgcagcagcagcctgcagagcggggctgtggccgccggccccctgctgcccagcgcccctggagctgagcagacagctggcagcctgctgtacaccaccccccacggccccagcagccgggccggcctgctgcagcagcccccagccctgggccggggcggcagcggcggcggcggcggccccccagccaagaggcggctggagctgggggagagcggccaccagtacctgagtgatggcctgaagacccccaagggcaagggccgggccgccctgcggagcccagacagccccaagacccccaagagccccagcgagaagaccaggtatgacaccagcctgggcctgctgaccaagaagttcatccagctgctgagccagagcccagatggagtgctggacctgaacaaggctgctgaggtgctgaaggtgcagaagaggcgcatctatgacatcaccaacgtgctggagggcatccacctgatcaagaagaagagcaagaacaacgtgcagtggatgggctgcagcctgtctgaagatggcggcatgctggcccagtgccagggcctgagcaaggaggtgacagagctgagccaggaggagaagaagctggatgagctgatccagagctgcaccctggacctgaagctgctgacagaagattctgagaaccagaggctggcctacgtgacctaccaggacatcaggaagatcagcggcctgaaggaccagaccgtcatcgtggtgaaggcccctcctgagacccggctggaggtgcctgacagcattgagagcctgcagatccacctggccagcacccagggccccatcgaggtgtacctgtgcccagaggagacagagacccacagccccatgaagaccaacaaccaggaccacaatggaaacatccccaagccagccagcaaggacctggccagcaccaacagcggccacagcgactgcagcgtgtccatgggcaacctgagccccctggccagccctgccaacctgctgcagcagacagaggaccagatccccagcaacctggagggcccctttgtgaacctgctgccccccctgctgcaggaggactacctgctgagcctgggggaggaggagggcatcagtgacctgtttgatgcctatgacctggagaagctgcccctggtggaggacttcatgtgcagctag

SEQ ID NO: 150812 - DNA, 387 bp, synthetic construct
  misc_feature 1..387: note = Description of Artificial Sequence: Synthetic coding sequence
  source 1..387: mol_type = other DNA
atggacaagagggccctgctggccagcggcggcggcggcggccccccagccaagaggcggctggagctgggggagagcggccaccagtacctgagtgatggcctgaagacccccaagggcaagggccgggccgccctgcggagcccagacagccccaagaagaagaccaggtatgacaccagcctgggcctgctgaccaagaagttcatccagctgctgagccagagcccagatggagtgctggacctgaacaaggctgctgaggtgctgaaggtgcagaagaggcgcatctatgacatcaccaacgtgctggagggcatcagtgacctgtttgatgcctatgacctggagaagctgcccctggtggaggacttcatgtgcagctag

SEQ ID NO: 150813 - DNA, 1005 bp, synthetic construct
  misc_feature 1..1005: note = Description of Artificial Sequence: Synthetic coding sequence
  source 1..1005: mol_type = other DNA
atgcccctgcagcagcaggccaagaggcggctggagctgggggagagcggccaccagtacctgagtgatggcctgaagacccccaagggcaagggccgggccgccctgcggagcccagacagccccaagaagaagaccaggtatgacaccagcctgggcctgctgaccaagaagttcatccagctgctgagccagagcccagatggagtgctggacctgaacaaggctgctgaggtgctgaaggtgcagaagaggcgcatctatgacatcaccaacgtgctggagggcatccacctgatcaagaagaagagcaagaacaacgtgcagtggatgggctgcagcctgtctgaagatggcggcatgctggcccagtgccagggcctgagcaaggaggtgacagagctgagccaggaggagaagaagctggatgagctgatccagagctgcaccctggacctgaagctgctgacagaggacagcgagaaccagaggctggcctacgtgacctaccaggacatcaggaagatcagcggcctgaaggaccagacagtgattgtggtgaaggcccctcctgagacccggctggaggtgcctgacagcattgagagcctgcagatccacctggccagcacccagggccccatcgaggtgtacctgtgcccagaggagacagagacccacagccccatgaagaccaacaaccaggaccacaacggcaacatccccaagccagccagcaaggacctggccagcaccaacagcggccacagcgactgcagcgtgtccatgggcaacctgagccccctggccagccctgccaacctgctgcagcagacagaggaccagatccccagcaacctggagggcccctttgtgaacctgctgccccccctgctgcaggaggactacctgctgagcctgggggaggaggagggcatcagtgacctgtttgatgcctatgacctggagaagctgcccctggtggaggacttcatgtgcagctag

SEQ ID NO: 150814 - DNA, 2736 bp, synthetic construct
  misc_feature 1..2736: note = Description of Artificial Sequence: Synthetic coding sequence
  source 1..2736: mol_type = other DNA
atggaggtgaactgcctgaccctgaaggacctgatcagcccccggcagccccggctggactttgctgtggaggatggagaaaatgcccagaaggagaacatctttgtggacaggagcaggatggcccccaagacccccatcaagaatgagcccatcgacctgagcaagcagaagaagttcaccccagagaggaaccccatcacccctgtgaagtttgtggaccggcagcaggccgagccctggacccccacagccaacctgaagatgctgatctctgctgccagcccagacatccgggaccgggagaagaagaagggcctcttccggcccatcgagaacaaggatgatgccttcacagacagcctgcagctggatgtggtgggggacagcgctgtggatgaatttgagaagcagaggcccagcaggaagcagaagagcctgggcctgctgtgccagaagttcctggcccgctaccccagctaccccctgagcacagagaagaccaccatcagcctggatgaggtggccgtgtccctgggcgtggagcggcggcgcatctatgacatcgtgaatgtgctggagagcctgcacctggtgtcccgggtggccaagaaccagtatggctggcacggccgccacagcctgcccaagaccctgaggaacctgcagaggctgggggaggagcagaagtatgaggagcagatggcctacctgcagcagaaggagctggacctgattgactacaagtttggagagaggaagaaggatggagaccctgacagccaggagcagcagctgctggacttcagcgagccagactgccccagcagcagcgccaacagcaggaaggacaagagcctgcgcatcatgagccagaagtttgtgatgctgttcctggtgtccaagaccaagatcgtgaccctggatgtggccgccaagatcctgattgaggagagccaggatgccccagaccacagcaagttcaagaccaaggtgcggcggctgtatgacatcgccaacgtgctgaccagcctggccctgatcaagaaggtgcacgtgacagaggagcggggcaggaagccagccttcaagtggattggccctgtggacttcagcagcagtgatgaggagctggtggatgtgtctgcctctgtgctgcctgagctgaagcgggagacctacggccagatccaggtgtgtgccaagcagaagctggcccggcacggcagcttcaacacagtgcaggccagcgagcgcatccagaggaaggtgaacagcgagcccagcagcccctaccgggaggagcagggcagcggcggctacagcctggagatcggcagcctggccgctgtgtaccggcagaagattgaggacaacagccagggcaaggcctttgccagcaagagggtggtgccccccagcagcagcctggaccctgtggcccccttccctgtgctgtctgtggaccctgagtactgtgtgaaccccctggcccaccctgtgttttctgtggcccagacagacctgcaggccttctccatgcagaatggcctgaatggccaggtggatgtgtccctggccagcgctgccagcgctgtggagagcctgaagccagccctgctggccggccagcccctggtgtatgtgcccagcgccagcctcttcatgctgtatggcagcctgcaggagggccctgccagcggcagcggcagcgagagagatgacaggagcagcgaggccccagccaccgtggagctgagcagcgcccccagcgcccagaagaggctgtgtgaggagaggaagccccaggaggaggatgagcccgccaccaagaggcagagccgggagtatgaagatggccccctgagcctggtgatgcccaagaagcccagcgacagcacagacctggccagccccaagaccatgggcaacagagccagcatccccctgaaggacatccacgtgaatggccagctgcctgctgctgaggagatcagcggcaaggccacagccaacagcctggtgtcctctgagtggggcaaccccagcaggaacacagatgtggagaagcccagcaaagaaaatgaaagcaccaaggagcccagcctgctgcagtacctgtgtgtgcagagccctgctggcctgaatggcttcaacgtgctgctgagcggcagccagaccccacccaccgtgggccccagcagcggccagctgcccagcttctctgtgccctgcatggtgctgcccagcccccccctgggccccttccctgtgctgtacagccctgccatgcctggccctgtgagcagcaccctgggcgccctgcccaacacaggccctgtgaacttcagcctgcccggcctgggcagcatcgcccagctgctggtgggccccacagctgtggtgaaccccaagagcagcaccctgcccagcgctgacccccagctgcagagccagcccagcctgaacctgagccctgtgatgagccgcagccacagcgtggtgcagcagcctgagagccctgtgtatgtgggccaccctgtgtctgtggtgaagctgcaccagagccctgtgcctgtgacccccaagagcatccagaggacccaccgggagaccttcttcaagaccccaggcagcctgggggaccctgtgctgaagagaagagagaggaaccagagcaggaacaccagcagcgcccagaggcggctggagatccccagcggcggcgctgactag

SEQ ID NO: 150815 - DNA, 1149 bp, synthetic construct
  misc_feature 1..1149: note = Description of Artificial Sequence: Synthetic coding sequence
  source 1..1149: mol_type = other DNA
atgcagaatggcctgaatggccaggtggatgtgtccctggccagcgctgccagcgctgtggagagcctgaagccagccctgctggccggccagcccctggtgtatgtgcccagcgccagcctcttcatgctgtatggcagcctgcaggagggccctgccagcggcagcggcagcgagagagatgacaggagcagcgaggccccagccaccgtggagctgagcagcgcccccagcgcccagaagaggctgtgtgaggagaggaagccccaggaggaggatgagcccgccaccaagaggcagagccgggagtatgaagatggccccctgagcctggtgatgcccaagaagcccagcgacagcacagacctggccagccccaagaccatgggcaacagagccagcatccccctgaaggacatccacgtgaatggccagctgcctgctgctgaggagatcagcggcaaggccacagccaacagcctggtgagcagcgagtggggcaaccccagcaggaacacagatgtggagaagcccagcaaagaaaatgaaagcaccaaggagcccagcctgctgcagtacctgtgtgtgcagagccctgctggcctgaatggcttcaacgtgctgctgagcggcagccagaccccacccaccgtgggccccagcagcggccagctgcccagcttctctgtgccctgcatggtgctgcccagcccccccctgggccccttccctgtgctgtacagccctgccatgcctggccctgtgagcagcaccctgggcagcatcgcccagctgctggtgggccccacagctgtggtgaaccccaagagcagcaccctgcccagcgctgacccccagctgcagagccagcccagcctgaacctgagccctgtgatgagccgcagccacagcgtggtgcagcagcctgagagccctgtgtatgtgggccaccctgtgtctgtggtgaagctgcaccagagccctgtgcctgtgacccccaagagcatccagaggacccaccgggagaccttcttcaagaccccaggcagcctgggggaccctgtgctgaagaggcgggagaggaaccagagcaggaacaccagcagcgcccagaggcggctggagatccccagcggcggcgctgactag

SEQ ID NO: 150816 - DNA, 2187 bp, synthetic construct
  misc_feature 1..2187: note = Description of Artificial Sequence: Synthetic coding sequence
  source 1..2187: mol_type = other DNA
atggaggtgaactgcctgaccctgaaggacctgatcagcccccggcagccccggctggactttgctgtggaggatggagaaaatgcccagaaggagaacatctttgtggacaggagcaggatggcccccaagacccccatcaagaatgagcccatcgacctgagcaagcagaagaagttcaccccagagaggaaccccatcacccctgtgaagtttgtggaccggcagcaggccgagccctggacccccacagccaacctgaagatgctgatctctgctgccagcccagacatccgggaccgggagaagaagaagggcctcttccggcccatcgagaacaaggatgatgccttcacagacagcctgcagctggatgtggtgggggacagcgctgtggatgaatttgagaagcagaggcccagcaggaagcagaagagcctgggcctgctgtgccagaagttcctggcccgctaccccagctaccccctgagcacagagaagaccaccatcagcctggatgaggtggccgtgtccctgggcgtggagcggcggcgcatctatgacatcgtgaatgtgctggagagcctgcacctggtgtcccgggtggccaagaaccagtatggctggcacggccgccacagcctgcccaagaccctgaggaacctgcagaggctgggggaggagcagaagtatgaggagcagatggcctacctgcagcagaaggagctggacctgattgactacaagtttggagagaggaagaaggatggagaccctgacagccaggagcagcagctgctggacttcagcgagccagactgccccagcagcagcgccaacagcaggaaggacaagagcctgcgcatcatgagccagaagtttgtgatgctgttcctggtgtccaagaccaagatcgtgaccctggatgtggccgccaagatcctgattgaggagagccaggatgccccagaccacagcaagttcaagaccaaggtgcggcggctgtatgacatcgccaacgtgctgaccagcctggccctgatcaagaaggtgcacgtgacagaggagcggggcaggaagccagccttcaagtggattggccctgtggacttcagcagcagtgatgaggagctggtggatgtgtctgcctctgtgctgcctgagctgaagcgggagacctacggccagatccaggtgtgtgccaagcagaagctggcccggcacggcagcttcaacacagtgcaggccagcgagcgcatccagaggaaggtgaacagcgagcccagcagcccctaccgggaggagcagggcagcggcggctacagcctggagatcggcagcctggccgctgtgtaccggcagaagattgaggacaacagccagggcaaggcctttgccagcaagagggtggtgccccccagcagcagcctggaccctgtggcccccttccctgtgctgtctgtggaccctgagtactgtgtgaaccccctggcccaccctgtgttttctgtggcccagacagacctgcaggccttctccatgcagaatggcctgaatggccaggtggatgtgtccctggccagcgctgccagcgctgtggagagcctgaagccagccctgctggccggccagcccctggtgtatgtgcccagcgccagcctcttcatgctgtatggcagcctgcaggagggccctgccagcggcagcggcagcgagagagatgacaggagcagcgaggccccagccaccgtggagctgagcagcgcccccagcgcccagaagaggctgtgtgaggagaggaagccccaggaggaggatgagcccgccaccaagaggcagagccgggagtatgaagatggccccctgagcctggtgatgcccaagaagcccagcgacagcacagacctggccagccccaagaccatgggcaacagagccagcatccccctgaaggacatccacgtgaatggccagctgcctgctgctgaggagatcagcggcaaggccacagccaacagcctggtgtcctctgagtggggcaaccccagcaggaacacagatgtggagaagcccagcaaagaaaatgaaagcaccaaggagcccagcctgctgcagtacctgtgtgtgcagagccctgctgtgaccagcagcagtgacccccaggagcaccccacccacaccagctag

SEQ ID NO: 150817 - DNA, 348 bp, synthetic construct
  misc_feature 1..348: note = Description of Artificial Sequence: Synthetic coding sequence
  source 1..348: mol_type = other DNA
atggaggtgaactgcctgaccctgaaggacctgatcagcccccggcagccccggctggactttgctgtggaggatggagaaaatgcccagaaggagaacatctttgtggacaggagcaggatggcccccaagacccccatcaagaatgagcccatcgacctgagcaagcagaagaagttcaccccagagaggaaccccatcacccctgtgaagtttgtggaccggcagcaggccgagccctggacccccacagccaacctgaagatgctgatctctgctgccagcccagacatccgggaccgggagaagaagaagggcctcttccggcccatcgagaacaaggactag

SEQ ID NO: 150818 - DNA, 2604 bp, synthetic construct
  misc_feature 1..2604: note = Description of Artificial Sequence: Synthetic coding sequence
  source 1..2604: mol_type = other DNA
atggagaatgagaaggagaacctcttctgtgagccccacaagaggggcctgatgaagacccccctgaaggagagcaccacagccaacatcgtgctggccgagatccagcctgactttggccccctgaccacccccaccaagcccaaggagggcagccagggcgagccctggacccccacagccaacctgaagatgctgatctctgctgtgtccccagagatccggaacagagaccagaagaggggcctgtttgacaacagaagtggcctgcctgaggccaaggactgcatccacgagcacctgtctggagatgaatttgagaagagccagcccagcaggaaggagaagagcctgggcctgctgtgccacaagttcctggcccgctaccccaactaccccaacccagctgtgaacaatgacatctgcctggatgaggtggccgaggagctgaatgtggagcggcggcgcatctatgacatcgtgaatgtgctggagagcctgcacatggtgtcccggctggccaagaaccgctacacctggcacggccgccacaacctgaacaagaccctgggcaccctgaagagcatcggggaggagaacaagtatgcagagcagatcatgatgatcaagaagaaggagtatgagcaggagtttgacttcatcaagagctacagcattgaggaccacatcatcaagagcaacacaggccccaacggccacccagacatgtgctttgtggagctgcccggggtggagttccgggccgcctctgtgaacagcaggaaggacaagagcctgcgggtgatgagccagaagtttgtgatgctgttcctggtgtccaccccccagatcgtgtccctggaggtggccgccaagatcctgattggagaagatcatgtggaggacctggacaagagcaagttcaagaccaagatccggcggctgtatgacatcgccaacgtgctgagcagcctggacctgatcaagaaggtgcacgtgacagaggagcggggcaggaagccagccttcaagtggacaggccctgagatcagccccaacaccagcggcagcagccctgtgatccacttcacccccagcgacctggaggtgagaagaagcagcaaggagaactgtgccaagaacctcttcagcacccggggcaagcccaacttcaccaggcaccccagcctcatcaagctggtgaagagcattgaaagtgacaggaggaagatcaacagcgcccccagcagccccatcaagaccaacaaggccgagagcagccagaacagcgcccccttccccagcaagatggcccagctggccgccatctgcaagatgcagctggaggagcagagcagcgagagccggcagaaggtgaaggtgcagctggcccggagcggcccctgcaagcctgtggcccccctggacccccctgtgaatgctgagatggagctgacagcccccagcctcatccagcccctgggcatggtgcccctcatccccagccccctgagcagcgctgtgcccctcatcctgccccaggcccccagcggccccagctatgccatctacctgcagcccacccaggcccaccagagcgtgaccccaccccagggcctgagccccaccgtgtgcaccacccacagcagcaaggccaccggcagcaaggacagcacagatgccaccacagagaaggccgccaatgacaccagcaaggccagcgccagcaccaggcctggcagcctgctgcctgcccctgagcggcagggcgccaagagcaggacccgggagcctgctggggagcggggcagcaagagggcctccatgctggaggacagcggcagcaagaagaagttcaaggaggacctgaagggcctggagaatgtgtctgccaccctcttccccagcggctacctgatccccctgacccagtgcagcagcctgggcgctgagagcatcctgagcggcaaggagaacagcagcgccctgagccccaaccaccgcatctacagcagccccatcgccggggtcatccctgtgaccagcagcgagctgacagctgtgaacttccccagcttccacgtgacccccctgaagctgatggtgagccccacctctgtggccgctgtgcctgtgggcaacagccctgccctggccagcagccaccctgtgcccatccagaaccccagcagcgccatcgtgaacttcaccctgcagcacctgggcctcatcagccccaacgtgcagctgagcgccagccctggcagcggcatcgtgcctgtgagccccagaattgaatctgtgaatgtggccccagaaaatgccggcacccagcagggccgggccaccaactatgacagccctgtgcccggccagagccagcccaacggccagagcgtggccgtgactggagcccagcagcctgtgcctgtgacccccaagggcagccagctggtggccgagagcttcttccgcaccccaggcggccccaccaagcccaccagcagcagctgcatggactttgaaggagccaacaagaccagcctgggcaccctgtttgtgccccagaggaagctggaggtgtccacagaagatgtgcactag

SEQ ID NO: 150819 - DNA, 2604 bp, synthetic construct
  misc_feature 1..2604: note = Description of Artificial Sequence: Synthetic coding sequence
  source 1..2604: mol_type = other DNA
atgcagaagaagaaggagaacctcttctgtgagccccacaagaggggcctgatgaagacccccctgaaggagagcaccacagccaacatcgtgctggccgagatccagcctgactttggccccctgaccacccccaccaagcccaaggagggcagccagggcgagccctggacccccacagccaacctgaagatgctgatctctgctgtgtccccagagatccggaacagagaccagaagaggggcctgtttgacaacagaagtggcctgcctgaggccaaggactgcatccacgagcacctgtctggagatgaatttgagaagagccagcccagcaggaaggagaagagcctgggcctgctgtgccacaagttcctggcccgctaccccaactaccccaacccagctgtgaacaatgacatctgcctggatgaggtggccgaggagctgaatgtggagcggcggcgcatctatgacatcgtgaatgtgctggagagcctgcacatggtgtcccggctggccaagaaccgctacacctggcacggccgccacaacctgaacaagaccctgggcaccctgaagagcatcggggaggagaacaagtatgcagagcagatcatgatgatcaagaagaaggagtatgagcaggagtttgacttcatcaagagctacagcattgaggaccacatcatcaagagcaacacaggccccaacggccacccagacatgtgctttgtggagctgcccggggtggagttccgggccgcctctgtgaacagcaggaaggacaagagcctgcgggtgatgagccagaagtttgtgatgctgttcctggtgtccaccccccagatcgtgtccctggaggtggccgccaagatcctgattggagaagatcatgtggaggacctggacaagagcaagttcaagaccaagatccggcggctgtatgacatcgccaacgtgctgagcagcctggacctgatcaagaaggtgcacgtgacagaggagcggggcaggaagccagccttcaagtggacaggccctgagatcagccccaacaccagcggcagcagccctgtgatccacttcacccccagcgacctggaggtgagaagaagcagcaaggagaactgtgccaagaacctcttcagcacccggggcaagcccaacttcaccaggcaccccagcctcatcaagctggtgaagagcattgaaagtgacaggaggaagatcaacagcgcccccagcagccccatcaagaccaacaaggccgagagcagccagaacagcgcccccttccccagcaagatggcccagctggccgccatctgcaagatgcagctggaggagcagagcagcgagagccggcagaaggtgaaggtgcagctggcccggagcggcccctgcaagcctgtggcccccctggacccccctgtgaatgctgagatggagctgacagcccccagcctcatccagcccctgggcatggtgcccctcatccccagccccctgagcagcgctgtgcccctcatcctgccccaggcccccagcggccccagctatgccatctacctgcagcccacccaggcccaccagagcgtgaccccaccccagggcctgagccccaccgtgtgcaccacccacagcagcaaggccaccggcagcaaggacagcacagatgccaccacagagaaggccgccaatgacaccagcaaggccagcgccagcaccaggcctggcagcctgctgcctgcccctgagcggcagggcgccaagagcaggacccgggagcctgctggggagcggggcagcaagagggcctccatgctggaggacagcggcagcaagaagaagttcaaggaggacctgaagggcctggagaatgtgtctgccaccctcttccccagcggctacctgatccccctgacccagtgcagcagcctgggcgctgagagcatcctgagcggcaaggagaacagcagcgccctgagccccaaccaccgcatctacagcagccccatcgccggggtcatccctgtgaccagcagcgagctgacagctgtgaacttccccagcttccacgtgacccccctgaagctgatggtgagccccacctctgtggccgctgtgcctgtgggcaacagccctgccctggccagcagccaccctgtgcccatccagaaccccagcagcgccatcgtgaacttcaccctgcagcacctgggcctcatcagccccaacgtgcagctgagcgccagccctggcagcggcatcgtgcctgtgagccccagaattgaatctgtgaatgtggccccagaaaatgccggcacccagcagggccgggccaccaactatgacagccctgtgcccggccagagccagcccaacggccagagcgtggccgtgactggagcccagcagcctgtgcctgtgacccccaagggcagccagctggtggccgagagcttcttccgcaccccaggcggccccaccaagcccaccagcagcagctgcatggactttgaaggagccaacaagaccagcctgggcaccctgtttgtgccccagaggaagctggaggtgtccacagaagatgtgcactag

SEQ ID NO: 150820 - DNA, 2604 bp, synthetic construct; identical to SEQ ID NO: 150818
  misc_feature 1..2604: note = Description of Artificial Sequence: Synthetic coding sequence
  source 1..2604: mol_type = other DNA

SEQ ID NO: 150821 - DNA, 2355 bp, synthetic construct
  misc_feature 1..2355: note = Description of Artificial Sequence: Synthetic coding sequence
  source 1..2355: mol_type = other DNA
atggagggcgccatggctgtgcgggtgacagctgcccacacagctgaggcccaggccgaggccggccgggaggccggggagggcgctgtggccgctgtggccgccgccctggcccccagcggcttcctgggcctgcctgcccccttcagcgaggaggatgaagatgatgtgcaccgctgtggccgctgccaggccgagttcaccgccctggaggactttgtgcagcacaagatccagaaggcctgccagagggcccctcctgaggccctgcctgccaccccagccaccacagccctgctgggccaggaggtggtgcctgctgcccctggccctgaggagcccatcaccgtggcccacatcgtggtggaggccgccagcctggccgctgacatcagccacgccagtgacctggtgggcggcggccacatcaaggaggtgattgtggccgctgaggccgagctgggagatggagagatggccgaggcccctggcagcccccggcagcagggcctgggcctggccggggagggggagcaggcccaggtgaagctgctggtgaacaaggatggccgctacgtgtgtgccctgtgccacaagaccttcaagacaggcagcatcctgaaggcccacatggtgacccacagcagcaggaaggaccacgagtgcaagctgtgtggggccagcttccgcaccaagggcagcctcatccgccaccaccggcggcacacagatgagcggccctacaagtgcagcaaatgtgggaagagcttccgggagagcggggccctgaccaggcacctgaagagcctgaccccctgcacagagaagatccgcttctctgtgtccaaggatgtggtggtgtccaaggaggatgcccgggccggcagcggggccggggctgctggcctgggcacagccaccagctctgtgactggagagcccatcgagaccagccctgtgatccacctggtgacagatgccaagggcaccgtcatccacgaggtgcacgtgcagatgcaggagctgagcctgggcatgaaggccctggcccctgagccccctgtgtcccaggagctgccctgcagcagcgagggcagccgggagaacctgctgcaccaggccatgcagaacagcggcatcgtgctggagagagctgctggggaggagggcgccctggagcccgccccagctgctggcagcagcccccagcccctggccgtggccgccccccagctgcctgtgctggaggtgcagcccctggagacccaggtggccagcgaggccagcgctgtgcccaggacccacccctgcccccagtgcagcgagaccttccccacagctgccaccctggaggcccacaagaggggccacacaggcccccggccctttgcctgtgcccagtgtgggaaggccttccccaaggcctacctgctgaagaagcaccaggaggtgcacgtgcgggagcggcgcttccgctgtggggactgtgggaagctgtacaagaccatcgcccacgtgcggggccaccggcgggtgcacagtgatgagcggccctacccctgccccaagtgtgggaagcgctacaagaccaagaatgcccagcaggtgcacttccgcacccacctggaggagaagccccacgtgtgccagttctgcagccggggcttccgggagaagggcagcctggtgagacatgtgcgccaccacactggagagaagcccttcaagtgctacaagtgtggccggggctttgctgagcacggcaccctgaacagacacctgcggaccaagggcggctgcctgctggaggtggaggagctgctggtgtctgaggacagccctgctgctgccaccaccgtgctgacagaggacccccacacagtgctggtggagttcagctctgtggtggccgacacccaggagtacatcatcgaggccacagcagatgatgctgagaccagcgaggccacagagatcatcgagggcacccagacagaggtggacagccacatcatgaaggtggtgcagcagatcgtgcaccaggccagcgctggccaccagatcatcgtgcagaatgtgaccatggatgaggagacagccctgggccctgaggccgctgctgctgacaccatcaccatcgccaccccagagagcctgacagagcaggtggccatgaccctggccagcgccatcagcgagggcaccgtgctggccgcccgggccggcaccagcggcacagagcaggccaccgtgaccatggtgtccagtgaagatattgagatcctggagcacgccggggagctggtgattgccagccctgagggccagctggaggtgcagacagtgattgtgtag

SEQ ID NO: 150822 - DNA, 1047 bp, synthetic construct
  misc_feature 1..1047: note = Description of Artificial Sequence: Synthetic coding sequence
  source 1..1047: mol_type = other DNA
atggccgccacctgtgagatcagcaacatcttcagcaactacttcagcgccatgtacagcagcgaggacagcaccctggcctctgtgcccccagctgccacctttggagcagatgacctggtgctgaccctgagcaacccccagatgagcctggagggcacagagaaggcctcctggctgggggagcagccccagttctggagcaagacccaggtgctggactggatctcctaccaggtggagaagaacaagtatgatgccagcgccatcgacttcagccgctgtgacatggatggagccaccctgtgcaactgtgccctggaggagctgcggctggtgtttggccccctgggggaccagctgcacgcccagctgcgggacctgaccagcagcagcagtgatgagctgtcctggatcatcgagctgctggagaaggatggcatggccttccaggaggccctggaccccggcccctttgaccagggcagcccctttgcccaggagctgctggatgatgtgtccacagctggcaccggggccagccgcagcagccacagcagtgacagcggcggcagtgatgtggacctggaccccacagatggcaagctgttccccagtgatggcttccgggactgcaagaagggggaccccaagcacggcaagaggaagaggggccggcccaggaagctgagcaaggagtactgggactgcctggagggcaagaagagcaagcacgccccccggggcacccacctgtgggagttcatccgggacatcctgatccaccctgagctgaatgaaggcctgatgaagtgggagaacagacatgagggcgtcttcaagttcctgcggtctgaggccgtggcccagctgtggggccagaagaagaagaacagcaacatgacctatgagaagctgagccgggccatgagatactactacaagcgggagatcctggagcgggtggatggaagaaggctggtgtacaagtttgggaagaacagcagcggctggaaggaggaggaggtgctgcagagcagaaattag

SEQ ID NO: 150823 - DNA, 1116 bp, synthetic construct
  misc_feature 1..1116: note = Description of Artificial Sequence: Synthetic coding sequence
  source 1..1116: mol_type = other DNA
atggccgccacctgtgagatcagcaacatcttcagcaactacttcagcgccatgtacagcagcgaggacagcaccctggcctctgtgcccccagctgccacctttggagcagatgacctggtgctgaccctgagcaacccccagatgagcctggagggcacagagaaggcctcctggctgggggagcagccccagttctggagcaagacccaggtgctggactggatctcctaccaggtggagaagaacaagtatgatgccagcgccatcgacttcagccgctgtgacatggatggagccaccctgtgcaactgtgccctggaggagctgcggctggtgtttggccccctgggggaccagctgcacgcccagctgcgggacctgaccagcagcagcagtgatgagctgtcctggatcatcgagctgctggagaaggatggcatggccttccaggaggccctggaccccggcccctttgaccagggcagcccctttgcccaggagctgctggatgatggccagcaggccagcccctaccaccctggcagctgtggggccggggcccccagccctggcagcagtgatgtgtccacagctggcactggagccagccgcagcagccacagcagtgacagcggcggcagtgatgtggacctggaccccacagatggcaagctgttccccagtgatggcttccgggactgcaagaagggggaccccaagcacggcaagaggaagaggggccggcccaggaagctgagcaaggagtactgggactgcctggagggcaagaagagcaagcacgccccccggggcacccacctgtgggagttcatccgggacatcctgatccaccctgagctgaatgaaggcctgatgaagtgggagaacagacatgaaggagtcttcaagttcctgcggtctgaggccgtggcccagctgtggggccagaagaagaagaacagcaacatgacctatgagaagctgagccgggccatgagatactactacaagcgggagatcctggagcgggtggatggccggcggctggtgtacaagtttgggaagaacagcagcggctggaaggaggaggaggtgctgcagagcaggaactag

SEQ ID NO: 150824 - DNA, 1116 bp, synthetic construct; identical to SEQ ID NO: 150823
  misc_feature 1..1116: note = Description of Artificial Sequence: Synthetic coding sequence
  source 1..1116: mol_type = other DNA

SEQ ID NO: 150825 - DNA, 1116 bp, synthetic construct; identical to SEQ ID NO: 150823
  misc_feature 1..1116: note = Description of Artificial Sequence: Synthetic coding sequence
  source 1..1116: mol_type = other DNA

SEQ ID NO: 150826 - DNA, 699 bp, synthetic construct
  misc_feature 1..699: note = Description of Artificial Sequence: Synthetic coding sequence
  source 1..699: mol_type = other DNA
atggccgccacctgtgagatcagcaacatcttcagcaactacttcagcgccatgtacagcagcgaggacagcaccctggcctctgtgcccccagctgccacctttggagcagatgacctggtgctgaccctgagcaacccccagatgagcctggaggagaaggcctcctggctgggggagcagccccagttctggagcaagacccaggtgctggactggatctcctaccaggtggagaagaacaagtatgatgccagcgccatcgacttcagccgctgtgacatggatggagccaccctgtgcaactgtgccctggaggagctgcggctggtgtttggccccctgggggaccagctgcacgcccagctgcgggacctgaccagcagcagcagtgatgagctgtcctggatcatcgagctgctggagaaggatggcatggccttccaggaggccctggaccccggcccctttgaccagggcagcccctttgcccaggagctgctggatgatggccagcaggccagcccctaccaccctggcagctgtggggccggggcccccagccctggcagcagtgatgtgtccacagctggcactggagccagccgcagcagccacagcagtgacagcggcggcagtgatgtggacctggaccccacagatggcaagctgttccccagtgatggcttccgggactag

SEQ ID NO: 150827 - DNA, 1992 bp, synthetic construct
  misc_feature 1..1992: note = Description of Artificial Sequence: Synthetic coding sequence
  source 1..1992: mol_type = other DNA
atggccatcaccctgcagcccagcgacctgatctttgaatttgccagcaatggcatggatgatgacatccaccagctggaggaccccagcgtcttccctgctgtgattgtggagcaggtgccctacccagacctgctgcacctgtacagcggcctggagctggatgatgtgcacaacggcatcatcacagatggcaccctgtgcatgacccaggaccagatcctggagggcagcttcctgctgacagatgacaatgaggccaccagccacaccatgagcacagctgaggtgctgctgaacatggagagccccagcgacatcctggatgagaagcagatcttcagcaccagcgagatgctgcctgacagcgaccctgccccagctgtgaccctgcccaactacctgtttcctgccagcgagccagatgccctgaacagagctggggacaccagtgaccaggagggccacagcctggaggagaaggccagccgggaggagagcgccaagaagacaggcaagagcaagaagaggatcaggaagaccaagggcaacagaagcaccagccctgtgacagaccccagcatccccatcaggaagaagagcaaggatggcaagggcagcaccatctacctgtgggagttcctgctggccctgctgcaggacaggaacacctgccccaagtacatcaagtggacccagcgggagaagggcatcttcaagctggtggacagcaaggctgtgtccaagctgtggggcaagcagaagaacaagccagacatgaactatgagaccatgggccgggccctgcgctactactaccagaggggcatcctggccaaggtggagggccagaggctggtgtaccagttcaaggagatgcccaaggacctggtggtgattgaagatgaagatgagagcagcgaggccacagctgccccaccccaggccagcacagcctctgtggccagcgccagcaccaccaggaggaccagcagccgggtgagcagccgcagcgccccccagggcaagggcagcagctcctgggagaagcccaagatccagcacgtgggcctgcagcccagcgccagcctggagctgggccccagcctggatgaggagatccccaccaccagcaccatgctggtgtccccagctgagggccaggtgaagctgaccaaggctgtgtctgccagctctgtgcccagcaacatccacctgggcgtggcccctgtgggcagcggcagcgccctgaccctgcagaccatccccctgaccaccgtgctgaccaacggccccccagccagcaccacagcccccacccagctggtgctgcagagcgtgcctgctgccagcaccttcaaggacaccttcaccctgcaggccagcttccccctgaatgccagcttccaggacagccaggtggccgcccctggggcccccctcatcctgagcggcctgccccagctgctggccggggccaaccggcccaccaacccagcccccccaacagtgactggagctggccctgctggccccagcagccagcccccaggcaccgtgattgctgccttcatccgcaccagcggcaccacagctgccccccgggtgaaggagggccccctgcggagcagcagctatgtgcagggcatggtgactggagcccccatggagggcctgctggtgcctgaggagaccctgcgggagctgctgcgggaccaggcccacctgcagcccctgcccacccaggtggtgtcccggggcagccacaaccccagcctgctgggcaaccagaccctgagcccccccagccggcccaccgtgggcctgacccctgtggccgagctggagctgagcagcggcagcggcagcctgctgatggccgagcccagcgtgaccaccagcggcagcctgctgaccaggagccccaccccagcccccttcagccccttcaaccccaccagcctcatcaagatggagccccatgacatctag

SEQ ID NO: 150828 - DNA, 1992 bp, synthetic construct; identical to SEQ ID NO: 150827
  misc_feature 1..1992: note = Description of Artificial Sequence: Synthetic coding sequence
  source 1..1992: mol_type = other DNA

SEQ ID NO: 150829 - DNA, 234 bp, synthetic construct
  misc_feature 1..234: note = Description of Artificial Sequence: Synthetic coding sequence
  source 1..234: mol_type = other DNA
atggatgatgacatccaccagctggaggaccccagcgtcttccctgctgtgattgtggagcaggtgccctacccagacctgctgcacctgtacagcggcctggagctggatgatgtgcacaacggcatcatcacagatggcaccctgtgcatgacccaggaccagatcctggagggcagcttcctgctgacagatgacaatgaggccaccagccacaccatgagcacagcctag

SEQ ID NO: 150830 - DNA, 768 bp, synthetic construct
  misc_feature 1..768: note = Description of Artificial Sequence: Synthetic coding sequence
  source 1..768: mol_type = other DNA
atgctggacagcgtgacccacagcaccttcctgcccaatgccagcttctgtgaccccctgatgtcctggacagacctcttcagcaatgaggagtactacccagcctttgagcaccagacagcctgtgacagctactggacctctgtgcaccctgagtactggaccaagagacatgtgtgggagtggctgcagttctgctgtgaccagtacaagctggacaccaactgcatctccttctgcaacttcaacatcagcggcctgcagctgtgcagcatgacccaggaggagtttgtggaggccgccggcctgtgtggggagtacctgtacttcatcctgcagaacatccgcacccagggctacagcttcttcaatgatgctgaggagagcaaggccaccatcaaggactatgctgacagcaactgcctgaagaccagcggcatcaagagccaggactgccacagccacagcaggaccagcctgcagagcagccacctgtgggagtttgtgcgggacctgctgctgagccctgaggagaactgtggcatcctggagtgggaggaccgggagcagggcatcttccgggtggtgaagtctgaggccctggccaagatgtggggccagaggaagaagaatgacaggatgacctatgagaagctgagccgggccctgcgctactactacaagacaggcatcctggagcgggtggaccggcggctggtgtacaagtttgggaagaatgcccacggctggcaggaggacaagctgtag

SEQ ID NO: 150831 - DNA, 798 bp, synthetic construct
  misc_feature 1..798: note = Description of Artificial Sequence: Synthetic coding sequence
  source 1..798: mol_type = other DNA
atgcccagcctgccccacagccaccgggtgatgctggacagcgtgacccacagcaccttcctgcccaatgccagcttctgtgaccccctgatgtcctggacagacctcttcagcaatgaggagtactacccagcctttgagcaccagacagcctgtgacagctactggacctctgtgcaccctgagtactggaccaagagacatgtgtgggagtggctgcagttctgctgtgaccagtacaagctggacaccaactgcatctccttctgcaacttcaacatcagcggcctgcagctgtgcagcatgacccaggaggagtttgtggaggccgccggcctgtgtggggagtacctgtacttcatcctgcagaacatccgcacccagggctacagcttcttcaatgatgctgaggagagcaaggccaccatcaaggactatgctgacagcaactgcctgaagaccagcggcatcaagagccaggactgccacagccacagcaggaccagcctgcagagcagccacctgtgggagtttgtgcgggacctgctgctgagccctgaggagaactgtggcatcctggagtgggaggaccgggagcagggcatcttccgggtggtgaagtctgaggccctggccaagatgtggggccagaggaagaagaatgacaggatgacctatgagaagctgagccgggccctgcgctactactacaagacaggcatcctggagcgggtggaccggcggctggtgtacaagtttgggaagaatgcccacggctggcaggaggacaagctgtag

SEQ ID NO: 150832 - DNA, 483 bp, synthetic construct
  misc_feature 1..483: note = Description of Artificial Sequence: Synthetic coding sequence
  source 1..483: mol_type = other DNA
atgctggacagcgtgacccacagcaccttcctgcccaatgccagcttctgtgaccccctgatgtcctggacagacctcttcagcaatgaggagtactacccagcctttgagcaccagacagatgctgacagcaactgcctgaagaccagcggcatcaagagccaggactgccacagccacagcaggaccagcctgcagagcagccacctgtgggagtttgtgcgggacctgctgctgagccctgaggagaactgtggcatcctggagtgggaggaccgggagcagggcatcttccgggtggtgaagtctgaggccctggccaagatgtggggccagaggaagaagaatgacaggatgacctatgagaagctgagccgggccctgcgctactactacaagacaggcatcctggagcgggtggaccggcggctggtgtacaagtttgggaagaatgcccacggctggcaggaggacaagctgtag

SEQ ID NO: 150833 - DNA, 1728 bp, synthetic construct
  misc_feature 1..1728: note = Description of Artificial Sequence: Synthetic coding sequence
  source 1..1728: mol_type = other DNA
atgtttggcatccaggacaccctgggccggggccccaccctgaaggagaagagcctgggcgctgagatggattctgtgcgctcctgggtgagaaatgtgggcgtggtggatgccaacgtggccgcccagagcggcgtggccctgagccgggcccactttgagaagcagccccccagcaacctgaggaagagcaacttcttccactttgtgctggccctgtatgaccggcagggccagcctgtggagattgaaagaacagcctttgtggactttgtggagaatgacaaggagcagggcaatgagaagaccaacaacggcacccactacaagctgcagctgctgtacagcaatggagtgaggacagagcaggacctgtatgtgcggctgattgacagcgtgaccaagcagcccatcgcctatgagggccagaacaagaaccctgagatgtgccgggtgctgctgacccatgaggtgatgtgcagccgctgctgtgagaagaagagctgtggcaacagaaatgagacccccagcgaccctgtgatcatcgaccgcttcttcctgaagttcttcctgaagtgcaaccagaactgcctgaagacagctggcaacccccgggacatgaggcgcttccaggtggtgctgagcaccaccgtgaatgtggatggccacgtgctggccgtgtctgacaacatgtttgtgcacaacaacagcaagcatggaagaagagcccggcggctggaccccagcgaggccaccccctgcatcaaggccatcagccccagcgagggctggaccaccggcggggccatggtgatcatcatcggggacaacttctttgatggcctgcaggtggtgtttggcaccatgctggtgtggagcgagctgatcacccctcatgccatccgggtgcagaccccacccaggcacatccctggggtggtggaggtgaccctgagctacaagagcaagcagttctgcaagggggcccctggccgcttcatctacacagccctgaatgagcccaccattgattatggcttccagaggctgcagaaggtgatccccaggcaccctggggaccctgagcggctggccaaggagatgctgctgaagagagctgctgacctggtggaggccctgtatggcaccccccacaacaaccaggacatcatcctgaagagagctgctgacattgctgaggccctgtacagcgtgcccaggaaccccagccagctgcctgccctgagcagcagccctgcccacagcggcatgatgggcatcaacagctatggcagccagctgggcgtgtccatcagcgagagcacccagggcaacaaccagggctacatccggaacaccagcagcatcagcccccggggctacagcagcagcagcaccccccagcagagcaactacagcaccagcagcaacagcatgaatggctacagcaatgtgcccatggccaacctgggcgtgcccggcagccctggcttcctgaatggcagccccaccggcagcccctacggcatcatgagcagcagccccaccgtgggcagcagcagcaccagcagcatcctgcccttcagcagctctgtgtttcctgctgtgaagcagaagagcgcctttgcccctgtgatccggccccagggcagccccagccctgcctgcagcagtggaaatggaaatggcttccgggccatgacaggcctggtggtgccccccatgtag

SEQ ID NO: 150834 - DNA, 795 bp, synthetic construct
  misc_feature 1..795: note = Description of Artificial Sequence: Synthetic coding sequence
  source 1..795: mol_type = other DNA
atggtgatcatcattggagacaacttctttgatggcctgcaggtggtgtttggcaccatgctggtgtggagcgagctgatcaccccccacgccatccgggtgcagaccccacccaggcacatccctggggtggtggaggtgaccctgagctacaagagcaagcagttctgcaagggggcccctggccgcttcatctacacagccctgaatgagcccaccatcgactatggcttccagaggctgcagaaggtgatccccaggcaccctggggaccctgagcggctggccaaggagatgctgctgaagagagctgctgacctggtggaggccctgtatggcaccccccacaacaaccaggacatcatcctgaagagagctgctgacattgctgaggccctgtacagcgtgcccaggaaccccagccagctgcctgccctgagcagcagccctgcccacagcggcatgatgggcatcaacagctatggcagccagctgggcgtgtccatcagcgagagcacccagggcaacaaccagggctacatccggaacaccagcagcatcagcccccggggctacagcagcagcagcaccccccagcagagcaactacagcaccagcagcaacagcatgaatggctacagcaatgtgcccatggccaacctgggcgtgcccggcagccctggcttcctgaatggcagccccaccggcagcccctatggaacaggcctgtggctgacctggctgctgaaggccttctggggcaagaagagaattgagaccatccccttcctgtag

SEQ ID NO: 150835 - DNA, 1791 bp, synthetic construct
  misc_feature 1..1791: note = Description of Artificial Sequence: Synthetic coding sequence
  source 1..1791: mol_type = other DNA
atgtttggcatccaggagaacatcccccggggcggcaccaccatgaaggaggagcccctgggcagcggcatgaaccctgtgcgctcctggatgcacacagctggggtggtggatgccaacacagctgcccagagcggcgtgggcctggcccgggcccactttgagaagcagccccccagcaacctgaggaagagcaacttcttccactttgtgctggccctgtatgaccggcagggccagcctgtggagattgaaagaacagcctttgtggactttgtggagaaggagaaggagcccaacaatgagaagaccaacaacggcatccactacaagctgcagctgctgtacagcaatggagtgaggacagagcaggacctgtatgtgcggctgattgacagcatgaccaagcaggccatcgtgtatgagggccaggacaagaaccctgagatgtgccgggtgctgctgacccatgagatcatgtgcagccgctgctgtgacaagaagagctgtggcaacagaaatgagacccccagcgaccccgtcatcatcgaccgcttcttcctgaagttcttcctgaagtgcaaccagaactgcctgaagaatgccggcaacccccgggacatgaggcgcttccaggtggtggtgtccaccaccgtgaatgtggatggccacgtgctggccgtgtctgacaacatgtttgtgcacaacaacagcaagcacggccggcgggcccggcggctggaccccagcgagggcacagcccccagctacctggagaatgccaccccctgcatcaaggccatcagccccagcgagggctggaccaccggcggggccaccgtcatcatcatcggggacaacttctttgatggcctgcaggtggtgtttggcaccatgctggtgtggagcgagctgatcacccctcatgccatccgggtgcagaccccacccaggcacatccctggggtggtggaggtgaccctgagctacaagagcaagcagttctgcaagggggcccctggccgctttgtgtacacagccctgaatgagcccaccattgattatggcttccagaggctgcagaaggtgatccccaggcaccctggggaccctgagcggctgcccaaggaggtgctgctgaagagagctgctgacctggtggaggccctgtatggcatgccccacaacaaccaggagatcatcctgaagagagctgctgacattgctgaggccctgtacagcgtgcccaggaaccacaaccagatccccaccctgggcaacaacccagcccacacaggcatgatgggcgtgaacagcttcagcagccagctggccgtgaatgtgtctgagaccagccaggccaatgaccaggtgggctacagcaggaacaccagctctgtgagcccccggggctacgtgcccagcagcaccccccagcagagcaactacaacacagtgtccacctccatgaatggctacggcagcggggccatggccagcctgggcgtgcccggcagccctggcttcctgaatggcagcagcgccaacagcccctatggaattgtgcccagcagccccaccatggccgccagctctgtgaccctgcccagcaactgcagcagcacccacggcatcttctccttcagccctgccaacgtcatctctgctgtgaagcagaagagcgcctttgcccctgtggtgcggccccaggccagccccccacccagctgcaccagcgccaatggaaatggcctgcaggccatgagcggcctggtggtgccccccatgtag

SEQ ID NO: 150836 - DNA, 1656 bp, synthetic construct
  misc_feature 1..1656: note = Description of Artificial Sequence: Synthetic coding sequence
  source 1..1656: mol_type = other DNA
atgtttggcatccaggagaacatcccccggggcggcaccaccatgaaggaggagcccctgggcagcggcatgaaccctgtgcgctcctggatgcacacagctggggtggtggatgccaacacagctgcccagagcggcgtgggcctggcccgggcccactttgagaagcagccccccagcaacctgaggaagagcaacttcttccactttgtgctggccctgtatgaccggcagggccagcctgtggagattgaaagaacagcctttgtggactttgtggagaaggagaaggagcccaacaatgagaagaccaacaacggcatccactacaagctgcagctgctgtacagcaatggagtgaggacagagcaggacctgtatgtgcggctgattgacagcatgaccaagcaggccatcgtgtatgagggccaggacaagaaccctgagatgtgccgggtgctgctgacccatgagatcatgtgcagccgctgctgtgacaagaagagctgtggcaacagaaatgagacccccagcgaccccgtcatcatcgaccgcttcttcctgaagttcttcctgaagtgcaaccagaactgcctgaagaatgccggcaacccccgggacatgaggcgcttccaggtggtggtgtccaccaccgtgaatgtggatggccacgtgctggccgtgtctgacaacatgtttgtgcacaacaacagcaagcacggccggcgggcccggcggctggaccccagcgaggccaccccctgcatcaaggccatcagccccagcgagggctggaccactggaggagccaccgtcatcatcattggagacaacttctttgatggcctgcaggtggtgtttggcaccatgctggtgtggagcgagctgatcaccccccacgccatccgggtgcagaccccacccaggcacatccctggggtggtggaggtgaccctgagctacaagagcaagcagttctgcaagggggcccctggccgctttgtgtacacagccctgaatgagcccaccatcgactatggcttccagaggctgcagaaggtgatccccaggcaccctggggaccctgagcggctgcccaaggaggtgctgctgaagagagctgctgacctggtggaggccctgtatggcatgccccacaacaaccaggagatcatcctgaagagagctgctgacattgctgaggccctgtacagcgtgcccaggaaccacaaccagatccccaccctgggcaacaacccagcccacacaggcatgatgggcgtgaacagcttcagcagccagctggccgtgaatgtgtctgagaccagccaggccaatgaccaggtgggctacagcaggaacaccagctctgtgagcccccggggctacgtgcccagcagcaccccccagcagagcaactacaacacagtgtccacctccatgaatggctacggcagcggggccatggccagcctgggcgtgcccggcagccctggcttcctgaatggcagcagcgccaacagcccctacggcatgaagcagaagagcgcctttgcccctgtggtgcggccccaggccagccccccacccagctgcaccagcgccaatggaaatggcctgcaggccatgagcggcctggtggtgccccccatgtag

SEQ ID NO: 150837 - DNA, 576 bp, synthetic construct
  misc_feature 1..576: note = Description of Artificial Sequence: Synthetic coding sequence
  source 1..576: mol_type = other DNA
tgattcagcagccagctggccgtgaatgtgtctgagaccagccaggccaatgaccaggtgggctacagcaggaacaccagctctgtgagcccccggggctacgtgcccagcagcaccccccagcagagcaactacaacacagtgtccacctccatgaatggctacggcagcggggccatggccagcctgggcgtgcccggcagccctggcttcctgaatggcagcagcgccaacagcccctatggaattgtgcccagcagccccaccatggccgccagctctgtgaccctgcccagcaactgcagcagcacccacggcatcttctccttcagccctgccaacgtcatctctgctgtgaagcagaagagcgcctttgcccctgtggtgcggccccaggccagccccccacccagctgcaccagcgccaatggaaatggcctgcagggcagcctgctgggcgcagaagatgtggccgctgagaagaccaactggcccttctgtgaggtgggcggcatcttccactttgatgagctgatgctgaagaagggcaccgggaagctgtgcctgggctggtag

SEQ ID NO: 150838 - DNA, 1809 bp, synthetic construct
  misc_feature 1..1809: note = Description of Artificial Sequence: Synthetic coding sequence
  source 1..1809: mol_type = other DNA
atgtttcctgcccaggatgccctgcccaggagcggcctgaacctgaaggaggagcccctgctgcctgctggcctgggctctgtgcgctcctggatgcagggcgccggcatcctggatgccagcacagctgcccagagcggcgtgggcctggcccgggcccactttgagaagcagccccccagcaacctgaggaagagcaacttcttccactttgtgctggccatgtatgaccggcagggccagcctgtggaggtggagaggacagccttcatcgactttgtggagaaggaccgggagcccggggctgagaagaccaacaacggcatccactaccgcctgcggctggtgtacaacaacggcctgaggacagagcaggacctgtatgtgcggctgattgacagcatgagcaagcaggccatcatctatgagggccaggacaagaaccctgagatgtgccgggtgctgctgacccatgagatcatgtgcagccgctgctgtgacaggaagagctgtggcaacagaaatgagacccccagcgaccctgtgatcatcgaccgcttcttcctgaagttcttcctgaagtgcaaccagaactgcctgaagaatgccggcaacccccgggacatgaggcgcttccaggtggtggtgtccaccaccgtgtctgtggatggccacgtgctggccgtgtctgacaacatgtttgtgcacaacaacagcaagcatggaagaagagcccggcggctggaccccagcgaggccgccaccccctgcatcaaggccatcagccctggagagggctggaccactggaggagccaccgtgattgtgattggagacaacttctttgatggcctgcaggtggtgtttggaaatgtgctggtgtggagcgagctgatcaccccccacgccatccgggtgcagaccccacccaggcacatccctggggtggtggaggtgaccctgagctacaagagcaagcagttctgcaagggctgccccggccgctttgtgtacacagccctgaatgagcccaccatcgactatggcttccagaggctgcagaaggtgatccccaggcaccctggggaccctgagcggctgcccaaggaggtgctgctgaagagagctgctgacctggccgaggccctgtatggagtgcccggcagcaaccaggagctgctgctgaagagagctgctgatgtggccgaggccctgtacagcaccccccgggcccctggccccctggcccccctggcccccagccacccccaccctgctgtggtgggcatcaatgccttcagcagccccctggccatcgctgtgggagatgccaccccaggccctgagcccggctacgcccggagctgcagcagcgccagcccccggggctttgcccccagccctggcagccagcagagcggctatggaggcggcctgggcgccggcctgggcggctacggggcccctggggtggccggcctgggcgtgcccggcagccccagcttcctgaatggcagcacagccaccagcccctttgccatcatgcccagcagcccccccctggccgccgccagctccatgagcctgcctgctgctgcccccaccacctctgtgttctccttcagccctgtgaacatgatctctgctgtgaagcagaggtctgcctttgcccctgtgctgcggccccccagcagccccccccaggcctgcccccgggcccacggggagggcctgcctgaccagagctttgaggacagcgacaagttccacagccctgcccggggcctgcagggcctggcctacagctag

SEQ ID NO: 150839 - DNA, 1797 bp, synthetic construct
  misc_feature 1..1797: note = Description of Artificial Sequence: Synthetic coding sequence
  source 1..1797: mol_type = other DNA
atggatgccctgcccaggagcggcctgaacctgaaggaggagcccctgctgcctgctggcctgggctctgtgcgctcctggatgcagggcgccggcatcctggatgccagcacagctgcccagagcggcgtgggcctggcccgggcccactttgagaagcagccccccagcaacctgaggaagagcaacttcttccactttgtgctggccatgtatgaccggcagggccagcctgtggaggtggagaggacagccttcatcgactttgtggagaaggaccgggagcccggggctgagaagaccaacaacggcatccactaccgcctgcggctggtgtacaacaacggcctgaggacagagcaggacctgtatgtgcggctgattgacagcatgagcaagcaggccatcatctatgagggccaggacaagaaccctgagatgtgccgggtgctgctgacccatgagatcatgtgcagccgctgctgtgacaggaagagctgtggcaacagaaatgagacccccagcgaccctgtgatcatcgaccgcttcttcctgaagttcttcctgaagtgcaaccagaactgcctgaagaatgccggcaacccccgggacatgaggcgcttccaggtggtggtgtccaccaccgtgtctgtggatggccacgtgctggccgtgtctgacaacatgtttgtgcacaacaacagcaagcatggaagaagagcccggcggctggaccccagcgaggccgccaccccctgcatcaaggccatcagccctggagagggctggaccactggaggagccaccgtgattgtgattggagacaacttctttgatggcctgcaggtggtgtttggaaatgtgctggtgtggagcgagctgatcaccccccacgccatccgggtgcagaccccacccaggcacatccctggggtggtggaggtgaccctgagctacaagagcaagcagttctgcaagggctgccccggccgctttgtgtacacagccctgaatgagcccaccatcgactatggcttccagaggctgcagaaggtgatccccaggcaccctggggaccctgagcggctgcccaaggaggtgctgctgaagagagctgctgacctggccgaggccctgtatggagtgcccggcagcaaccaggagctgctgctgaagagagctgctgatgtggccgaggccctgtacagcaccccccgggcccctggccccctggcccccctggcccccagccacccccaccctgctgtggtgggcatcaatgccttcagcagccccctggccatcgctgtgggagatgccaccccaggccctgagcccggctacgcccggagctgcagcagcgccagcccccggggctttgcccccagccctggcagccagcagagcggctatggaggcggcctgggcgccggcctgggcggctacggggcccctggggtggccggcctgggcgtgcccggcagccccagcttcctgaatggcagcacagccaccagcccctttgccatcatgcccagcagcccccccctggccgccgccagctccatgagcctgcctgctgctgcccccaccacctctgtgttctccttcagccctgtgaacatgatctctgctgtgaagcagaggtctgcctttgcccctgtgctgcggccccccagcagccccccccaggcctgcccccgggcccacggggagggcctgcctgaccagagctttgaggacagcgacaagttccacagccctgcccggggcctgcagggcctggcctacagctag

SEQ ID NO: 150840 - DNA, 555 bp, synthetic construct
  misc_feature 1..555: note = Description of Artificial Sequence: Synthetic coding sequence
  source 1..555: mol_type = other DNA
cggggctctgtgcagcacccccctgtggtgggcatcaatgccttcagcagccccctggccatcgctgtgggagatgccaccccaggccctgagcccggctacgcccggagctgcagcagcgccagcccccggggctttgcccccagccctggcagccagcagagcggctatggaggcggcctgggcgccggcctgggcggctacggggcccctggggtggccggcctgggcgtgcccggcagccccagcttcctgaatggcagcacagccaccagcccctttgccatcatgcccagcagcccccccctggccgccgccagctccatgagcctgcctgctgctgcccccaccacctctgtgttctccttcagccctgtgaacatgatctctgctgtgaagcagaggtctgcctttgcccctgtgctgcggccccccagcagccccccccaggcctgcccccgggcccacggggagggcctgcctgaccagagctttgaggacagcgacaagttccacagccctgcccggggcctgcagggcctggcctacagctag

SEQ ID NO: 150841 - DNA, 1632 bp, synthetic construct
  misc_feature 1..1632: note = Description of Artificial Sequence: Synthetic coding sequence
  source 1..1632: mol_type = other DNA
atggctgctgccaaggccgagatgcagctgatgagccccctgcagatcagtgaccccttcggcagcttcccccacagccccaccatggacaactaccccaagctggaggagatgatgctgctgagcaatggagccccccagttcctgggcgccgccggggcccctgagggcagcggcagcaacagcagcagcagcagcagcggcggcggcggcggcggcggcggcggcagcaacagcagcagcagcagcagcaccttcaacccccaggccgacaccggggagcagccctatgagcacctgacagctgagagcttcccagacatcagcctgaacaatgagaaggtgctggtggagaccagctaccccagccagaccacccggctgccccccatcacctacacaggccgcttcagcctggagcccgcccccaacagcggcaacaccctgtggccagagcccctcttcagcctggtgtctggcctggtgtccatgaccaaccccccagccagcagcagcagcgcccccagccctgctgccagcagcgccagcgccagccagagcccccccctgagctgtgctgtgcccagcaatgacagcagccccatctacagcgctgcccccaccttccccacccccaacacagacatcttccctgagccccagagccaggccttccctggcagcgctggaacagccctgcagtacccacctccagcctacccagctgccaagggcggcttccaggtgcccatgatcccagactacctgttcccccagcagcagggcgacctgggcctgggcaccccagaccagaagcccttccagggcctggagagcaggacccagcagcccagcctgacccccctgagcaccatcaaggcctttgccacccagagcggcagccaggacctgaaggccctgaacaccagctaccagagccagctgatcaagcccagcaggatgaggaagtaccccaaccggcccagcaagaccccacctcatgagcggccctatgcctgccctgtggagagctgtgaccggcgcttcagcagaagtgatgagctgaccaggcacatccgcatccacacaggccagaagcccttccagtgccgcatctgcatgaggaacttcagcagaagtgaccacctgaccacccacatccgcacccacactggagagaagccctttgcctgtgacatctgtggcaggaagtttgcccggagtgatgagaggaagaggcacaccaagatccacctgcggcagaaggacaagaaggctgacaagtctgtggtggccagcagcgccaccagcagcctgagcagctaccccagccctgtggccaccagctaccccagccctgtgaccaccagctaccccagccctgccaccaccagctaccccagccctgtgcccaccagcttcagcagccctggcagcagcacctaccccagccctgtgcacagcggcttccccagccccagcgtggccaccacctacagctctgtgcccccagccttccctgcccaggtgagcagcttccccagcagcgctgtgaccaacagcttcagcgccagcacaggcctgagtgacatgacagccaccttcagccccaggaccatcgagatctgctag

SEQ ID NO: 150842 - DNA, 603 bp, synthetic construct
  misc_feature 1..603: note = Description of Artificial Sequence: Synthetic coding sequence
  source 1..603: mol_type = other DNA
atggctgctgccaaggccgagatgcagctgatgagccccctgcagatcagtgaccccttcggcagcttcccccacagccccaccatggacaactaccccaagctggaggagatgatgctgctgagcaatggagccccccagttcctgggcgccgccggggcccctgagggcagcggcagcaacagcagcagcagcagcagcggcggcggcggcggcggcggcggcggcagcaacagcagcagcagcagcagcaccttcaacccccaggccgacaccggggagcagccctatgagcacctgacagctgagagcttcccagacatcagcctgaacaatgagaaggtgctggtggagaccagctaccccagccagaccacccggctgccccccatcacctacacaggccgcttcagcctggagcccgcccccaacagcggcttccccagccccagcgtggccaccacctacagctctgtgcccccagccttccctgcccaggtgtcctccttccccagcagcgctgtgaccaacagcttcagcgccagcacaggcctgagtgacatgacagccaccttcagccccaggaccatcgagatctgctag

SEQ ID NO: 150843 - DNA, 699 bp, synthetic construct
  misc_feature 1..699: note = Description of Artificial Sequence: Synthetic coding sequence
  source 1..699: mol_type = other DNA
atggctgctgccaaggccgagatgcagctgatgagccccctgcagatcagtgaccccttcggcagcttcccccacagccccaccatggacaactaccccaagctggaggagatgatgctgctgagcaatggagccccccagttcctgggcgccgccggggcccctgagggcagcggcagcaacagcagcagcagcagcagcggcggcggcggcggcggcggcggcggcagcaacagcagcagcagcagcagcaccttcaacccccaggccgacaccggggagcagccctatgagcacctgacagctgagagcttcccagacatcagcctgaacaatgagaaggtgctggtggagaccagctaccccagccagaccacccggctgccccccatcacctacacaggccgcttcagcctggagcccgcccccaacagcggcaacaccctgtggccagagcccctcttcagcctggtgtctggcctggtgtccatgaccaaccccccagccagcagcagcagcgcccccagccctgctgccagcagcgccagcgccagccagagcccccccctgagctgtgctgtgcccagcaatgacagcagccccatctacagcgctgcccccaccttccccacccccaacacagacatcttccctgagacagccatgagcaagttcttcaccagcatccagaggacatag

SEQ ID NO: 150844 - DNA, 1431 bp, synthetic construct
  misc_feature 1..1431: note = Description of Artificial Sequence: Synthetic coding sequence
  source 1..1431: mol_type = other DNA
atgatgacagccaaggctgtggacaagatccctgtgaccctgagcggctttgtgcaccagctgagtgacaacatctaccctgtggaggacctggccgccacctctgtgaccatcttccccaatgctgagctgggcggcccctttgaccagatgaatggagtggccggagatggcatgatcaacatcgacatgactggagagaagaggagcctggacctgccctaccccagcagctttgcccctgtgtctgcccccaggaaccagaccttcacctacatgggcaagttcagcattgacccccagtacccaggggccagctgctacccagagggcatcatcaacatcgtgtctgctggcatcctgcagggcgtgaccagccctgccagcaccacagccagcagctctgtgaccagcgccagccccaaccccctggccaccggccccctgggcgtgtgcaccatgagccagacccagcctgacctggaccacctgtacagccccccacctcctcctccaccctacagcggctgtgccggggacctgtaccaggaccccagcgccttcctgtctgctgccaccaccagcaccagcagcagcctggcctacccacctcctccttcctaccccagccccaagccagccacagatcctggcctcttccccatgatcccagactacccaggcttcttccccagccagtgccagagggacctgcatggaacagctggccctgacaggaagcccttcccctgccccctggacaccctgcgggtgcccccacccctgacccccctgagcaccatccggaacttcaccctgggcggccccagcgctggggtgactggacctggggccagcggcggcagcgagggcccccggctgcccggcagcagcagcgctgctgctgctgctgctgctgctgctgcctacaacccccaccacctgcccctgcggcccatcctgcggcccaggaagtaccccaaccggcccagcaagacccctgtgcatgagcggccctacccctgcccagctgagggctgtgaccggcgcttcagcagaagtgatgagctgaccaggcacatccgcatccacacaggccacaagcccttccagtgccgcatctgcatgaggaacttcagcagaagtgaccacctgaccacccacatccgcacccacactggagagaagccctttgcctgtgactactgcggcaggaagtttgcccggagtgatgagaggaagaggcacaccaagatccacctgcggcagaaggagaggaagagcagcgcccccagcgcctctgtgcctgcccccagcacagccagctgcagcggcggcgtgcagcccggcggcaccctgtgcagcagcaacagcagcagcctgggcggcggccccctggccccctgcagcagcaggaccaggaccccctag

SEQ ID NO: 150845 - DNA, 1281 bp, synthetic construct
  misc_feature 1..1281: note = Description of Artificial Sequence: Synthetic coding sequence
  source 1..1281: mol_type = other DNA
atgaatggagtggccggagatggcatgatcaacatcgacatgactggagagaagaggagcctggacctgccctaccccagcagctttgcccctgtgtctgcccccaggaaccagaccttcacctacatgggcaagttcagcattgacccccagtacccaggggccagctgctacccagagggcatcatcaacatcgtgtctgctggcatcctgcagggcgtgaccagccctgccagcaccacagccagcagctctgtgaccagcgccagccccaaccccctggccaccggccccctgggcgtgtgcaccatgagccagacccagcctgacctggaccacctgtacagccccccacctcctcctccaccctacagcggctgtgccggggacctgtaccaggaccccagcgccttcctgtctgctgccaccaccagcaccagcagcagcctggcctacccacctcctccttcctaccccagccccaagccagccacagatcctggcctcttccccatgatcccagactacccaggcttcttccccagccagtgccagagggacctgcatggaacagctggccctgacaggaagcccttcccctgccccctggacaccctgcgggtgcccccacccctgacccccctgagcaccatccggaacttcaccctgggcggccccagcgctggggtgactggacctggggccagcggcggcagcgagggcccccggctgcccggcagcagcagcgctgctgctgctgctgctgctgctgctgcctacaacccccaccacctgcccctgcggcccatcctgcggcccaggaagtaccccaaccggcccagcaagacccctgtgcatgagcggccctacccctgcccagctgagggctgtgaccggcgcttcagcagaagtgatgagctgaccaggcacatccgcatccacacaggccacaagcccttccagtgccgcatctgcatgaggaacttcagcagaagtgaccacctgaccacccacatccgcacccacactggagagaagccctttgcctgtgactactgcggcaggaagtttgcccggagtgatgagaggaagaggcacaccaagatccacctgcggcagaaggagaggaagagcagcgcccccagcgcctctgtgcctgcccccagcacagccagctgcagcggcggcgtgcagcccggcggcaccctgtgcagcagcaacagcagcagcctgggcggcggccccctggccccctgcagcagcaggaccaggaccccctag

SEQ ID NO: 150846 - DNA, 786 bp, synthetic construct
  misc_feature 1..786: note = Description of Artificial Sequence: Synthetic coding sequence
  source 1..786: mol_type = other DNA
atgagggtgggcctgcccagcgaggccagcagctgcccctggagcgcccggggcccccgggaccccccagagcggcggcgcagcggcctggcccacgtgctgagtgacaacatctaccctgtggaggacctggccgccacctctgtgaccatcttccccaatgctgagctgggcggcccctttgaccagatgaatggagtggccggagatggcatgatcaacatcgacatgaccggggagaagaggagcctggacctgccctaccccagcagctttgcccctgtgtctgcccccaggaaccagaccttcacctacatgggcaagttcagcattgacccccagtacccaggggccagctgctacccagagggcatcatcaacatcgtgtctgctggcatcctgcagggcgtgaccagccctgccagcaccacagccagcagctctgtgaccagcgccagccccaaccccctggccaccggccccctgggcgtgtgcaccatgagccagacccagcctgacctggaccacctgtacagccccccacctcctcctccaccctacagcggctgtgccggggacctgtaccaggaccccagcgccttcctgtctgctgccaccaccagcaccagcagcagcctggcctacccacctccacccagctaccccagccccaagcctgtggaggccgcccgggaccccggctgcctggtggccgcccagcagcagcagcagcccccacctcctccacccatcacccacaccacctgccactgcggccccttctag

SEQ ID NO: 150847 - DNA, 1431 bp, synthetic construct; identical to SEQ ID NO: 150844
  misc_feature 1..1431: note = Description of Artificial Sequence: Synthetic coding sequence
  source 1..1431: mol_type = other DNA

SEQ ID NO: 150848 - DNA, 1461 bp, synthetic construct
  misc_feature 1..1461: note = Description of Artificial Sequence: Synthetic coding sequence
  source 1..1461: mol_type = other DNA
atgctgcacctgtctgagttcagcgagccagatgccctgctggtgaagagcacagagggctgctgtgccgagcccagcgctgagctgccccggctgcctgccagagatgccccagctgccaccggctacccaggggccggggacttcctgtcctgggccctgaacagctgtggggccagcggggacctggccgacagctgcttcctggagggccctgcccccaccccacctcctggcctgagctacagcggcagcttcttcatccaggccgtgcctgagcacccccatgaccctgaggccctcttcaacctgatgagcggcatcctgggcctggcccccttccctggccctgaggccgccgccagccgcagccccctggatgcccccttccctgctggcagtgatgccctgctgcccggccccccagacctgtacagcccagacctgggcgccgcccccttccctgaggccttctgggaggccagcccctgtgccggggcccccagccagtgcctgtatgagccccagctgagccccccagatgtgaagccaggcctgcgggcccccccagccagccctgccctggatgctgtgtctgccttcaagggcccctatgccccctgggagctgctgtctgtgggcgcccctggcaactgtggcagccagggcgactaccaggccgcccctgaggcccgcttccctgtgattggcaccaagattgaggacctgctgagcatcagctgcccagctgagctgcctgctgtgcctgccaaccggctgtaccccagcggggcctatgatgccttccccctggcccctggggacctgggggagggcgctgagggcctgcccggcctgctgaccccaccttctggagagggcggcagcagtggagatggaggagagttcctggccagcacccagccccagctgagccccctgggcctgcggtctgctgctgctgctgacttccccaagcccctggtggccgacatccctggcagcagcggcgtggccgcccctcctgtgcccccacctccacccacccccttcccccaggccaaggcccggaggaaaggaagaagaggaggcaagtgcagcacccgctgcttctgcccccggccccacgccaaggcctttgcctgccctgtggagagctgtgtgcgcagctttgcccggagtgatgagctgaacagacacctgcgcatccacacaggccacaagcccttccagtgccgcatctgcctgaggaacttcagcagaagtgaccacctgaccacccacgtgaggacccacactggagagaagccctttgcctgtgatgtgtgtggcagaagatttgcccggagtgatgagaagaagaggcacagcaaggtgcacctgaagcagaaggcccgggcagaggagcggctgaagggcctgggcttctacagcctgggcctgagctttgccagcctgtag

SEQ ID NO: 150849 - DNA, 1770 bp, synthetic construct
  misc_feature 1..1770: note = Description of Artificial Sequence: Synthetic coding sequence
  source 1..1770: mol_type = other DNA
atggctgtggcccggggcgtgggcagccctgagcccgccccaccccagctgtacaagtggggcggctgcggcctgggggagcccggcagcgccctggagaggagaggagctgctgcccggggccgctgtggccgggcccgggccccccggctgcctgacagcttccccagaggagaatgtcccaagccaggggcccgggcccccaggtctgtgcgctgtggggagcccctgcccccagccagccccccaccagcccggccccaggcccagagggcccggccccgggccccccacagcagaagaagagccatgctgcacctgtctgagttcagcgagccagatgccctgctggtgaagagcacagagggctgctgtgccgagcccagcgctgagctgccccggctgcctgccagagatgccccagctgccaccggctacccaggagctggggacttcctgtcctgggccctgaacagctgtggggccagcggggacctggccgacagctgcttcctggagggccctgcccccaccccacctcctggcctgagctacagcggcagcttcttcatccaggccgtgcctgagcacccccatgaccctgaggccctcttcaacctgatgagcggcatcctgggcctggcccccttccctggccctgaggccgccgccagccgcagccccctggatgcccccttccctgctggcagtgatgccctgctgcccggccccccagacctgtacagcccagacctgggcgccgcccccttccctgaggccttctgggaggccagcccctgtgccggggcccccagccagtgcctgtatgagccccagctgagccccccagatgtgaagccaggcctgcgggcccccccagccagccctgccctggatgctgtgtctgccttcaagggcccctatgccccctgggagctgctgtctgtgggcgcccctggcaactgtggcagccagggcgactaccaggccgcccctgaggcccgcttccctgtgattggcaccaagattgaggacctgctgagcatcagctgcccagctgagctgcctgctgtgcctgccaacagactctaccccagcggggcctatgatgccttccccctggcccctggggacctgggggagggcgctgagggcctgcccggcctgctgaccccacccagcggggagggcggcagcagtggagatggaggagagttcctggccagcacccagccccagctgagccccctgggcctgcggtctgctgctgctgctgacttccccaagcccctggtggccgacatccctggcagcagtggagtggccgcccctcctgtgcccccacctccacccacccccttcccccaggccaaggcccggaggaagggccggcggggcggcaagtgcagcacccgctgcttctgcccccggccccacgccaaggcctttgcctgccctgtggagagctgtgtgcgcagctttgcccggagtgatgagctgaacagacacctgcgcatccacacaggccacaagcccttccagtgccgcatctgcctgaggaacttcagcagaagtgaccacctgaccacccacgtgaggacccacactggagagaagccctttgcctgtgatgtgtgtggccgccgctttgcccggagtgatgagaagaagaggcacagcaaggtgcacctgaagcagaaggcccgggcagaggagcggctgaagggcctgggcttctacagcctgggcctgagctttgccagcctgtag

SEQ ID NO: 150850 - DNA, 921 bp, synthetic construct
  misc_feature 1..921: note = Description of Artificial Sequence: Synthetic coding sequence
  source 1..921: mol_type = other DNA
atggacaccccacccctgagtgacagcgagagcgagagtgatgagagcctggtgacagaccgggagctgcaggatgccttcagccggggcctgctgaagccaggcctgaatgtggtgctggagggccccaagaaggctgtgaatgatgtgaatggcctgaagcagtgcctggccgagttcaagagggacctggagtgggtggagcggctggatgtgaccctgggccctgtgcctgagatcggcggcagcgaggccccagccccccagaacaaggaccagaaggctgtggaccctgaagatgacttccagcgggagatgtccttctaccggcaggcccaggccgctgtgctggccgtgctgccccggctgcaccagctgaaggtgcccaccaagaggcccacagactactttgctgagatggccaagagtgacctgcagatgcagaagatccggcagaagctgcagaccaagcaggccgccatggagaggtctgagaaggccaagcagctgcgggccctgaggaaatatggcaagaaggtgcagacagaggtgctgcagaagaggcagcaggagaaggcccacatgatgaatgccatcaagaagtaccagaagggcttcagtgacaagctggacttcctggagggggaccagaagcccctggcccagaggaagaaggccggggccaagggccagcagatgaggaagggccccagcgccaagaggcgctacaagaaccagaagtttggatttggaggcaagaagaagggcagcaagtggaacacccgggagagctatgatgatgtgagcagcttccgggccaagacagcccacggccggggcctgaagaggcctgggaagaagggcagcaacaagaggcctgggaagaggacccgggagaagatgaagaacagaacccactag

SEQ ID NO: 150851 - DNA, 1086 bp, synthetic construct
  misc_feature 1..1086: note = Description of Artificial Sequence: Synthetic coding sequence
  source 1..1086: mol_type = other DNA
atgtacccagaggccctgcctgtgggcatcctgagcaacccagacaccttcaagagaagaagtggcagctacagcaatgacaagccagaggtgtggtttgctgctggcagcggcagccccaaccagaagctgagcagcagctgtgtgggccgggcctgtggggagatggacaccccacccctgagtgacagcgagagcgagagtgatgagagcctggtgacagaccgggagctgcaggatgccttcagccggggcctgctgaagccaggcctgaatgtggtgctggagggccccaagaaggctgtgaatgatgtgaatggcctgaagcagtgcctggccgagttcaagagggacctggagtgggtggagcggctggatgtgaccctgggccctgtgcctgagattggaggcagcgaggccccagccccccagaacaaggaccagaaggctgtggaccctgaagatgacttccagcgggagatgtccttctaccggcaggcccaggccgctgtgctggccgtgctgccccggctgcaccagctgaaggtgcccaccaagaggcccacagactactttgctgagatggccaagagtgacctgcagatgcagaagatccggcagaagctgcagaccaagcaggccgccatggagaggtctgagaaggccaagcagctgcgggccctgaggaaatatggcaagaaggtgcagacagaggtgctgcagaagaggcagcaggagaaggcccacatgatgaatgccatcaagaagtaccagaagggcttcagtgacaagctggacttcctggagggggaccagaagcccctggcccagaggaagaaggccggggccaagggccagcagatgaggaagggccccagcgccaagaggcgctacaagaaccagaagtttggatttggaggcaagaagaagggcagcaagtggaacacccgggagagctatgatgatgtgtcctccttccgggccaagacagcccacggccggggcctgaagaggcctgggaagaagggcagcaacaagaggcctgggaagaggacccgggagaagatgaagaacagaacccactag

SEQ ID NO: 150852 - DNA, 2448 bp, synthetic construct
  misc_feature 1..2448: note = Description of Artificial Sequence: Synthetic coding sequence
  source 1..2448: mol_type = other DNA
atggaggatggcttcagcagctacagcagcctgtatgacaccagcagcctgctgcagttctgcaatgatgattctgccagcgctgccagctccatggaggtgacagaccgcatcgccagcctggagcagagggtgcagatgcaggaggatgacatccagctgctgaagagcgccctggctgatgtggtgcggcggctgaacatcacagaggagcagcaggccgtgctgaacaggaagggccccaccaaggcccggcccctgatgcagaccctgcccctgcggaccaccgtgaacaatggaacagtgctgcccaagaagcccaccggcagcctgcccagccccagcggcgtgaggaaggagacagctgtgcctgccaccaagagcaacatcaagaggaccagcagcagcgagcgggtgtccccaggcggccggcgggagagcaatggagacagccggggcaacagaaacagaacaggcagcaccagcagcagcagcagcggcaagaagaacagcgagagcaagcccaaggagcccgtcttctctgctgaggagggctacgtgaagatgttcctgcggggccggcctgtgaccatgtacatgcccaaggaccaggtggacagctacagcctggaggccaaggtggagctgcccaccaagaggctgaagctggagtgggtgtatggctaccggggccgggactgcaggaacaacctgtacctgctgcccactggagagaccgtgtacttcatcgcctctgtggtggtgctgtacaacgtggaggagcagctgcagaggcactacgccggccacaatgatgatgtgaagtgcctggccgtgcacccagaccgcatcaccatcgccaccggccaggtggccggcaccagcaaggatggcaagcagctgcccccccacgtgcgcatctgggacagcgtgaccctgaacaccctgcacgtgattggaattggcttctttgacagagctgtgacctgcatcgccttcagcaagagcaatggaggcaccaacctgtgtgctgtggatgacagcaatgaccacgtgctgtctgtgtgggactggcagaaggaggagaagctggctgatgtgaagtgcagcaatgaagctgtgtttgctgctgacttccaccccacagacaccaacatcatcgtgacctgtgggaagagccacctgtacttctggaccctggagggcagcagcctgaacaagaagcagggcctgtttgagaagcaggagaagcccaagtttgtgctgtgtgtgaccttctctgaaaatggagacaccatcaccggggacagcagcggcaacatcctggtgtggggcaagggcaccaaccgcatctcctatgctgtgcagggcgcccatgaaggaggcatctttgccctgtgcatgctgagagatggcaccctggtgtctgggggcggcaaggacaggaagctgatctcctggagcggcaactaccagaagctgaggaagacagagatccctgagcagtttggccccatcagaacagtggccgagggcaaaggagatgtgatcctgattggcaccaccaggaactttgtgctgcagggcaccctgagcggggacttcacccccatcacccagggccacacagatgagctgtggggcctggccatccacgccagcaagagccagttcctgacctgtggccatgacaagcacgccaccctgtgggatgctgtgggccacaggcctgtgtgggacaagatcatcgaggaccctgcccagagcagcggcttccaccccagcggctctgtggtggccgtgggcaccctgaccggccgctggtttgtgtttgacacagagaccaaggacctggtgacagtgcacacagatggaaatgagcagctgtctgtgatgagatacagcccagatggcaacttcctggccatcggcagccatgacaactgcatctacatctatggagtgtctgacaatggaaggaagtacaccagggtgggcaaatgttctggccacagcagcttcatcacccacctggactggagcgtgaacagccagttcctggtgagcaacagcggggactatgagatcctgtactgggtgcccagcgcctgcaagcaggtggtgtctgtggagaccacccgggacatcgagtgggccacctacacctgcaccctgggcttccacgtgtttggagtgtggccagagggcagtgatggaacagacatcaatgctgtgtgccgggcccacgagaagaagctgctgagcactggagatgactttgggaaggtgcacctgttctcctacccctgcagccagttccgggcccccagccacatctacggcggccacagcagccacgtgaccaacgtggacttcctgtgtgaggacagccacctgatcagcactggaggcaaggacaccagcatcatgcagtggagggtcatctag

SEQ ID NO: 150853 - DNA, 2505 bp, synthetic construct
  misc_feature 1..2505: note = Description of Artificial Sequence: Synthetic coding sequence
  source 1..2505: mol_type = other DNA
atggaggatggcttcagcagctacagcagcctgtatgacaccagcagcctgctgcagttctgcaatgatgattctgccagcgctgccagctccatggaggtgacagaccgcatcgccagcctggagcagagggtgcagatgcaggaggatgacatccagctgctgaagagcgccctggctgatgtggtgcggcggctgaacatcacagaggagcagcaggccgtgctgaacaggaagggccccaccaaggcccggcccctgatgcagaccctgcccctgcggaccaccgtgaacaatggaacagtgctgcccaagaagcccaccggcagcctgcccagccccagcggcgtgaggaaggagacagctgtgcctgccaccaagaggctgaacagatctgtgtccctgctgaatgcctgcaagctgaacagaagcacccccagcaacatcaagaggaccagcagcagcgagcgggtgtcccctgggggcagaagagagagcaatggagacagccggggcaacagaaacagaacaggcagcaccagcagcagcagcagcggcaagaagaacagcgagagcaagcccaaggagcctgtgttttctgctgaggagggctacgtgaagatgttcctgcggggccggcctgtgaccatgtacatgcccaaggaccaggtggacagctacagcctggaggccaaggtggagctgcccaccaagaggctgaagctggagtgggtgtatggctaccggggccgggactgcaggaacaacctgtacctgctgcccaccggggagaccgtgtacttcatcgcctctgtggtggtgctgtacaacgtggaggagcagctgcagaggcactacgccggccacaatgatgatgtgaagtgcctggccgtgcacccagaccgcatcaccatcgccaccggccaggtggccggcaccagcaaggatggcaagcagctgccccctcatgtgcgcatctgggacagcgtgaccctgaacaccctgcacgtgattggcatcggcttctttgacagagctgtgacctgcatcgccttcagcaagagcaatggaggcaccaacctgtgtgctgtggatgacagcaatgaccacgtgctgtctgtgtgggactggcagaaggaggagaagctggctgatgtgaagtgcagcaatgaggccgtgtttgctgctgacttccaccccacagacaccaacatcatcgtgacctgtgggaagagccacctgtacttctggaccctggagggcagcagcctgaacaagaagcagggcctgtttgagaagcaggagaagcccaagtttgtgctgtgtgtgaccttctctgaaaatggagacaccatcactggagacagcagcggcaacatcctggtgtggggcaagggcaccaaccgcatctcctatgctgtgcagggcgcccacgagggcggcatctttgccctgtgcatgctgagagatggcaccctggtgtctgggggcggcaaggacaggaagctgatctcctggagcggcaactaccagaagctgaggaagacagagatccctgagcagtttggccccatcagaacagtggccgagggcaaaggagatgtgatcctgattggcaccaccaggaactttgtgctgcagggcaccctgagcggggacttcacccccatcacccagggccacacagatgagctgtggggcctggccatccacgccagcaagagccagttcctgacctgtggccatgacaagcacgccaccctgtgggatgctgtgggccacaggcctgtgtgggacaagatcattgaagatcctgcccagagcagcggcttccaccccagcggctctgtggtggccgtgggcaccctgaccggccgctggtttgtgtttgacacagagaccaaggacctggtgacagtgcacacagatggaaatgagcagctgtctgtgatgagatacagcccagatggcaacttcctggccatcggcagccatgacaactgcatctacatctacggcgtgtctgacaatggaaggaagtacaccagggtgggcaagtgcagcggccacagcagcttcatcacccacctggactggagcgtgaacagccagttcctggtgagcaacagcggggactatgagatcctgtactgggtgcccagcgcctgcaagcaggtggtgtctgtggagaccacccgggacatcgagtgggccacctacacctgcaccctgggcttccacgtgtttggagtgtggccagagggcagtgatggaacagacatcaatgctgtgtgccgggcccacgagaagaagctgctgagcactggagatgactttgggaaggtgcacctgttctcctacccctgcagccagttccgggcccccagccacatctatggaggccacagcagccacgtgaccaacgtggacttcctgtgtgaggacagccacctgatcagcactggaggcaaggacaccagcatcatgcagtggagggtcatctag

SEQ ID NO: 150854 - DNA, 2505 bp, synthetic construct; identical to SEQ ID NO: 150853
  misc_feature 1..2505: note = Description of Artificial Sequence: Synthetic coding sequence
  source 1..2505: mol_type = other DNA

SEQ ID NO: 150855 - DNA, 2946 bp, synthetic construct
  misc_feature 1..2946: note = Description of Artificial Sequence: Synthetic coding sequence
  source 1..2946: mol_type = other DNA
atggatggctttgctggcagcctggatgacagcatctctgctgccagcaccagtgatgtgcaggaccggctgagcgccctggagagccgggtgcagcagcaggaggatgagatcaccgtgctgaaggccgccctggctgatgtgctgcggcggctggccatcagcgaggaccacgtggcctctgtgaagaagtctgtgagcagcaagggccagcccagcccccgggccgtcatccccatgagctgcatcaccaatggaagtggggccaacaggaagcccagccacaccagcgctgtgtccattgctgggaaggagaccctgagcagcgctgccaagtctggaacagagaagaagaaggagaagccccagggccagcgggagaagaaggaggagagccacagcaatgaccagagcccccagatccgggccagccccagcccccagcccagcagccagcccctgcagatccaccggcagaccccagagagcaagaatgccacccccaccaagagcatcaagaggcccagccctgctgagaagagccacaacagctgggagaacagtgatgacagcaggaacaagctgagcaagatccccagcacccccaagctgatccccaaggtgaccaagacagctgacaagcacaaggatgtgatcatcaaccaggagggggagtacatcaagatgttcatgaggggccggcccatcaccatgttcatccccagtgatgtggacaactatgatgacatcagaacagagctgcccccagagaagctgaagctggagtgggcctacggctaccggggcaaggactgccgggccaacgtgtacctgctgcccaccgggaagatcgtgtacttcatcgcctctgtggtggtgctcttcaactatgaggagaggacccagaggcactacctgggccacacagactgtgtgaagtgcctggccatccacccagacaagatccgcatcgccaccggccagattgctggggtggacaaggatggccggcccctgcagccccacgtgcgggtgtgggacagcgtgaccctgagcaccctgcagatcatcggcctgggcacctttgagcggggcgtgggctgcctggacttcagcaaggctgacagcggcgtgcacctgtgcatcattgatgacagcaatgagcacatgctgactgtgtgggactggcagaagaaggccaagggagctgagatcaagaccaccaatgaggtggtgctggccgtggagttccaccccacagatgccaacaccatcatcacctgtgggaagagccacatcttcttctggacctggagcggcaacagcctgaccaggaagcagggcatctttgggaagtatgagaagcccaagtttgtgcagtgcctggccttcctgggcaatggagatgtgctgaccggggacagcggaggagtgatgctgatctggagcaagaccaccgtggagcccaccccaggcaagggccccaagggcgtgtaccagatcagcaagcagatcaaggcccatgatggctctgtgttcaccctgtgccagatgagaaatggcatgctgctgactggaggcggcaaggacaggaagatcatcctgtgggaccatgacctgaaccctgagcgggagattgaggtgcctgaccagtatggcaccatccgggctgtggccgagggcaaggctgaccagttcctggtgggcaccagcaggaacttcatcctgcggggcaccttcaatgatggcttccagatcgaggtgcagggccacacagatgagctgtggggcctggccacccaccccttcaaggacctgctgctgacctgtgcccaggaccggcaggtgtgcctgtggaacagcatggagcaccggctggagtggacccggctggtggatgagcccggccactgtgccgacttccaccccagcggcaccgtggtggccatcggcacccacagcggccgctggtttgtgctggatgctgagacccgggacctggtgtccatccacacagatggaaatgagcagctgtctgtgatgagatacagcattgatggcaccttcctggccgtgggcagccatgacaacttcatctacctgtatgtggtgtctgaaaatggaaggaagtacagccgctatggccgctgcaccggccacagcagctacatcacccacctggactggagcccagacaacaagtacatcatgagcaacagcggggactatgagatcctgtactgggacatccccaacggctgcaagctgatccggaacagaagtgactgcaaggacatcgactggaccacctacacctgtgtgctgggcttccaggtgtttggagtgtggccagagggcagtgatggaacagacatcaatgccctggtgcgcagccacaacaggaaggtgattgctgtggctgatgacttctgcaaggtgcacctgttccagtacccctgcagcaaggccaaggcccccagccacaagtacagcgcccacagcagccacgtgaccaacgtgtccttcacccacaatgacagccacctgatcagcactggaggcaaggacatgagcatcatccagtggaagctggtggagaagctgagcctgccccagaatgaaacagtggccgacaccaccctgaccaaggcccctgtgagcagcacagaatctgtcatccagagcaacacccccaccccaccacccagccagcccctgaatgaaacagctgaggaggagagccgcatcagcagcagccccaccctgctggagaacagcctggagcagacagtggagcccagcgaggaccacagcgaggaggagagcgaggagggcagcggggacctgggggagcccctgtatgaggagccctgcaatgagatcagcaaggagcaggccaaggccaccctgctggaggaccagcaggaccccagccccagcagctag

SEQ ID NO: 150856 - DNA, 738 bp, synthetic construct
  misc_feature 1..738: note = Description of Artificial Sequence: Synthetic coding sequence
  source 1..738: mol_type = other DNA
atgagcaacagcggggactatgagatcctgtactgggacatccccaacggctgcaagctgatccggaacagaagtgactgcaaggacatcgactggaccacctacacctgtgtgctgggcttccaggtgtttggagtgtggccagagggcagtgatggaacagacatcaatgccctggtgcgcagccacaacaggaaggtgattgctgtggctgatgacttctgcaaggtgcacctgttccagtacccctgcagcaaggccaaggcccccagccacaagtacagcgcccacagcagccacgtgaccaacgtgtccttcacccacaatgacagccacctgatcagcactggaggcaaggacatgagcatcatccagtggaagctggtggagaagctgagcctgccccagaatgaaacagtggccgacaccaccctgaccaaggcccctgtgagcagcacagaatctgtcatccagagcaacacccccaccccaccacccagccagcccctgaatgaaacagctgaggaggagagccgcatcagcagcagccccaccctgctggagaacagcctggagcagacagtggagcccagcgaggaccacagcgaggaggagagcgaggagggcagcggggacctgggggagcccctgtatgaggagccctgcaatgagatcagcaaggagcaggccaaggccaccctgctggaggaccagcaggaccccagccccagcagctag

SEQ ID NO: 150857 - DNA, 2772 bp, synthetic construct
  misc_feature 1..2772: note = Description of Artificial Sequence: Synthetic coding sequence
  source 1..2772: mol_type = other DNA
atggatggctttgctggcagcctggatgacagcatctctgctgccagcaccagtgatgtgcaggaccggctgagcgccctggagagccgggtgcagcagcaggaggatgagatcaccgtgctgaaggccgccctggctgatgtgctgcggcggctggccatcagcgaggaccacgtggcctctgtgaagaagtctgtgagcagcaagggccagcccagcccccgggccgtcatccccatgagctgcatcaccaatggaagtggggccaacaggaagcccagccacaccagcgctgtgtccattgctgggaaggagaccctgagcagcgctgccaagagcatcaagaggcccagccctgctgagaagagccacaacagctgggagaacagtgatgacagcaggaacaagctgagcaagatccccagcacccccaagctgatccccaaggtgaccaagacagctgacaagcacaaggatgtgatcatcaaccaggagggggagtacatcaagatgttcatgaggggccggcccatcaccatgttcatccccagtgatgtggacaactatgatgacatcagaacagagctgcccccagagaagctgaagctggagtgggcctacggctaccggggcaaggactgccgggccaacgtgtacctgctgcccaccgggaagatcgtgtacttcatcgcctctgtggtggtgctcttcaactatgaggagaggacccagaggcactacctgggccacacagactgtgtgaagtgcctggccatccacccagacaagatccgcatcgccaccggccagattgctggggtggacaaggatggccggcccctgcagccccacgtgcgggtgtgggacagcgtgaccctgagcaccctgcagatcatcggcctgggcacctttgagcggggcgtgggctgcctggacttcagcaaggctgacagcggcgtgcacctgtgcatcattgatgacagcaatgagcacatgctgactgtgtgggactggcagaagaaggccaagggagctgagatcaagaccaccaatgaggtggtgctggccgtggagttccaccccacagatgccaacaccatcatcacctgtgggaagagccacatcttcttctggacctggagcggcaacagcctgaccaggaagcagggcatctttgggaagtatgagaagcccaagtttgtgcagtgcctggccttcctgggcaatggagatgtgctgaccggggacagcggaggagtgatgctgatctggagcaagaccaccgtggagcccaccccaggcaagggccccaagggcgtgtaccagatcagcaagcagatcaaggcccatgatggctctgtgttcaccctgtgccagatgagaaatggcatgctgctgactggaggcggcaaggacaggaagatcatcctgtgggaccatgacctgaaccctgagcgggagattgaggtgcctgaccagtatggcaccatccgggctgtggccgagggcaaggctgaccagttcctggtgggcaccagcaggaacttcatcctgcggggcaccttcaatgatggcttccagatcgaggtgcagggccacacagatgagctgtggggcctggccacccaccccttcaaggacctgctgctgacctgtgcccaggaccggcaggtgtgcctgtggaacagcatggagcaccggctggagtggacccggctggtggatgagcccggccactgtgccgacttccaccccagcggcaccgtggtggccatcggcacccacagcggccgctggtttgtgctggatgctgagacccgggacctggtgtccatccacacagatggaaatgagcagctgtctgtgatgagatacagcattgatggcaccttcctggccgtgggcagccatgacaacttcatctacctgtatgtggtgtctgaaaatggaaggaagtacagccgctatggccgctgcaccggccacagcagctacatcacccacctggactggagcccagacaacaagtacatcatgagcaacagcggggactatgagatcctgtactgggacatccccaacggctgcaagctgatccggaacagaagtgactgcaaggacatcgactggaccacctacacctgtgtgctgggcttccaggtgtttggagtgtggccagagggcagtgatggaacagacatcaatgccctggtgcgcagccacaacaggaaggtgattgctgtggctgatgacttctgcaaggtgcacctgttccagtacccctgcagcaaggccaaggcccccagccacaagtacagcgcccacagcagccacgtgaccaacgtgtccttcacccacaatgacagccacctgatcagcactggaggcaaggacatgagcatcatccagtggaagctggtggagaagctgagcctgccccagaatgaaacagtggccgacaccaccctgaccaaggcccctgtgagcagcacagaatctgtcatccagagcaacacccccaccccaccacccagccagcccctgaatgaaacagctgaggaggagagccgcatcagcagcagccccaccctgctggagaacagcctggagcagacagtggagcccagcgaggaccacagcgaggaggagagcgaggagggcagcggggacctgggggagcccctgtatgaggagccctgcaatgagatcagcaaggagcaggccaaggccaccctgctggaggaccagcaggaccccagccccagcagctag

SEQ ID NO: 150858 - DNA, 780 bp, synthetic construct
  misc_feature 1..780: note = Description of Artificial Sequence: Synthetic coding sequence
  source 1..780: mol_type = other DNA
atgctgctgcgctcctggtttggaaacaaggacttccaggccctgcccatcctggcccggctgcccagcatgcccacagacatggagcacacaggccactacctgcacctggccttcctgatgaccaccgtcttcagcctgagccctggcaccaaggccaactacacccggctgtgggccaacagcaccagctcctgggacagcgtcatccagaacaagacaggcaggaaccagaatgaaaacatcaacaccaaccccatcaccccagaggtggactacaagggcaacagcaccaacatgcctgagaccagccacatcgtggccctgaccagcaagtctgagcaggagctgtacatccccagcgtggtgagcaacagccccagcacagtgcagagcattgagaacaccagcaagagccacggggagatcttcaagaaggatgtgtgtgccgagaacaacaacaacatggccatgctgatctgcctgatcatcatcgctgtgctcttcctgatctgcaccttcctgttcctgagcacagtggtgctggccaacaaggtgagcagcctgcggcgcagcaagcaggtgggcaagaggcagcccaggagcaatggagacttcctggccagcggcctgtggccagctgagagtgacacctggaagaggaccaagcagctgaccggccccaacctggtgatgcagagcactggagtgctgacagccacccgggagaggaaggatgaggagggcacagagaagctgaccaacaagcagatcggctag

SEQ ID NO: 150859 - DNA, 711 bp, synthetic construct
  misc_feature 1..711: note = Description of Artificial Sequence: Synthetic coding sequence
  source 1..711: mol_type = other DNA
atgcccacagacatggagcacacaggccactacctgcacctggccttcctgatgaccaccgtcttcagcctgagccctggcaccaaggccaactacacccggctgtgggccaacagcaccagctcctgggacagcgtcatccagaacaagacaggaagaaaccagaatgaaaacatcaacaccaaccccatcaccccagaggtggactacaagggcaacagcaccaacatgcctgagaccagccacatcgtggccctgaccagcaagtctgagcaggagctgtacatccccagcgtggtgagcaacagccccagcacagtgcagagcattgagaacaccagcaagagccatggagagatcttcaagaaggatgtgtgtgccgagaacaacaacaacatggccatgctgatctgcctgatcatcatcgctgtgctcttcctgatctgcaccttcctgttcctgagcacagtggtgctggccaacaaggtgagcagcctgcggcgcagcaagcaggtgggcaagaggcagcccaggagcaatggagacttcctggccagcggcctgtggccagctgagagtgacacctggaagaggaccaagcagctgaccggccccaacctggtgatgcagagcactggagtgctgacagccacccgggagaggaaggatgaggagggcacagagaagctgaccaacaagcagattggatag

SEQ ID NO: 150860 - DNA, 711 bp, synthetic construct; identical to SEQ ID NO: 150859
  misc_feature 1..711: note = Description of Artificial Sequence: Synthetic coding sequence
  source 1..711: mol_type = other DNA

SEQ ID NO: 150861 - DNA, 699 bp, synthetic construct
  misc_feature 1..699: note = Description of Artificial Sequence: Synthetic coding sequence
  source 1..699: mol_type = other DNA
atggagcacacaggccactacctgcacctggccttcctgatgaccaccgtcttcagcctgagccctggcaccaaggccaactacacccggctgtgggccaacagcaccagctcctgggacagcgtcatccagaacaagacaggaagaaaccagaatgaaaacatcaacaccaaccccatcaccccagaggtggactacaagggcaacagcaccaacatgcctgagaccagccacatcgtggccctgaccagcaagtctgagcaggagctgtacatccccagcgtggtgagcaacagccccagcacagtgcagagcattgagaacaccagcaagagccatggagagatcttcaagaaggatgtgtgtgccgagaacaacaacaacatggccatgctgatctgcctgatcatcatcgctgtgctcttcctgatctgcaccttcctgttcctgagcacagtggtgctggccaacaaggtgagcagcctgcggcgcagcaagcaggtgggcaagaggcagcccaggagcaatggagacttcctggccagcggcctgtggccagctgagagtgacacctggaagaggaccaagcagctgaccggccccaacctggtgatgcagagcactggagtgctgacagccacccgggagaggaaggatgaggagggcacagagaagctgaccaacaagcagattggatag

SEQ ID NO: 150862 - DNA, 1347 bp, synthetic construct
  misc_feature 1..1347: note = Description of Artificial Sequence: Synthetic coding sequence
  source 1..1347: mol_type = other DNA
atggaccccaagtacttcatcctgatcctcttctgtggccacctgaacaacaccttcttcagcaagacagagaccatcaccacagagaagcagagccagcccaccctcttcaccagctccatgagccaggtgctggccaacagccagaacaccaccggcaaccccctgggccagcccacccagttcagtgacaccttcagcggccagagcatcagccctgccaaggtgacagctggccagcccaccccagctgtgtacaccagcagcgagaagccagaggcccacaccagcgctggccagcccctggcctacaacaccaagcagcccacccccatcgccaacaccagcagccagcaggccgtgttcaccagcgcccggcagctgcccagcgcccggaccagcaccacccagccccccaagagctttgtgtacaccttcacccagcagagcagctctgtgcagatccccagcaggaagcagatcaccgtgcacaaccccagcacccagcccaccagcacagtgaagaacagccccaggagcaccccaggcttcatcctggacaccaccagcaacaagcagaccccccagaagaacaactacaacagcattgctgccatcctgattggagtgctgctgacctccatgctggtggccatcatcatcatcgtgctgtggaagtgcctgaggaagcctgtgctgaatgaccagaactgggccggccgcagcccctttgctgatggagagaccccagacatctgcatggacaacatcagagaaaatgagatcagcaccaagaggaccagcatcatcagcctgaccccctggaagcccagcaagagcaccctgctggctgatgacctggagatcaagctgtttgagagcagcgagaacatcgaggacagcaacaaccccaagacagagaagatcaaggaccaggtgaatggcaccagcgaggacagcgcagatggcagcacagtgggcacagctgtgagcagcagtgatgatgctgacctgcccccacctccacccctgctggacctggagggccaggagagcaaccagagcgacaagcccaccatgaccatcgtgagccccctgcccaatgacagcaccagcctgccccccagcctggactgcctgaaccaggactgtggggaccacaagtctgagatcatccagagcttcccccccctggacagcctgaacctgcccctgccccctgtggacttcatgaagaaccaggaggacagcaacctggagatccagtgccaggagttcagcatcccccccaacagcgaccaggacctgaatgaaagcctgcccccacctcctgctgagctgctgtag

SEQ ID NO: 150863 - DNA, 1392 bp, synthetic construct
  misc_feature 1..1392: note = Description of Artificial Sequence: Synthetic coding sequence
  source 1..1392: mol_type = other DNA
atgctgttccgctatgcagagaagatcaccaggaagtacagcgagatggaccccaagtacttcatcctgatcctcttctgtggccacctgaacaacaccttcttcagcaagacagagaccatcaccacagagaagcagagccagcccaccctcttcaccagctccatgagccaggtgctggccaacagccagaacaccactggaaaccccctgggccagcccacccagttcagtgacaccttcagcggccagagcatcagccctgccaaggtgacagctggccagcccaccccagctgtgtacaccagcagcgagaagccagaggcccacaccagcgctggccagcccctggcctacaacaccaagcagcccacccccatcgccaacaccagcagccagcaggccgtgttcaccagcgcccggcagctgcccagcgcccggaccagcaccacccagccccccaagagctttgtgtacaccttcacccagcagagcagctctgtgcagatccccagcaggaagcagatcaccgtgcacaaccccagcacccagcccaccagcacagtgaagaacagccccaggagcaccccaggcttcatcctggacaccaccagcaacaagcagaccccccagaagaacaactacaacagcattgctgccatcctgattggagtgctgctgacctccatgctggtggccatcatcatcatcgtgctgtggaagtgcctgaggaagcctgtgctgaatgaccagaactgggccggccgcagcccctttgctgatggagagaccccagacatctgcatggacaacatccgggagaatgagatcagcaccaagaggaccagcatcatcagcctgaccccctggaagcccagcaagagcaccctgctggctgatgacctggagatcaagctgtttgagagcagtgaaaatattgaggacagcaacaaccccaagacagagaagatcaaggaccaggtgaatggcaccagtgaagattctgcagatggcagcacagtgggcacagctgtgagcagcagtgatgatgctgacctgcccccacctccacccctgctggacctggagggccaggagagcaaccagagcgacaagcccaccatgaccatcgtgagccccctgcccaatgacagcaccagcctgccccccagcctggactgcctgaaccaggactgtggggaccacaagtctgagatcatccagagcttcccccccctggacagcctgaacctgcccctgccccctgtggacttcatgaagaaccaggaggacagcaacctggagatccagtgccaggagttcagcatcccccccaacagcgaccaggacctgaatgaaagcctgcccccacctcctgctgagctgctgtag

SEQ ID NO: 150864 - DNA, 924 bp, synthetic construct
  misc_feature 1..924: note = Description of Artificial Sequence: Synthetic coding sequence
  source 1..924: mol_type = other DNA
atgaaccaggccgagctgatgcagctggacatggagggcatgctgcagcacttccagaaggtgatcccccaccagtttgatggagtgcctgacaagctgatccaggccgcctaccaggtgaagtacaacagcaagaagatgaagaagctggagaaggagtacaccaccatcaagaccaaggagatggaggagcaggtggagatcaagaggctgaggacagagaaccggctgctgaagcagagaattgagaccctggagaaggagagcgccagcctggccgacaggctcatccagggccaggtgacccgggcccaggaggccgaggagaactacctgatcaagcgggagctggccaccatcaagcagcagagtgatgaggccagcgccaagctggagcaggccgagaacaccatcaggaagctgcagcaccagcagcagtggcacaagtgcagcagcaactacaatgaagattttgtgctgcagctggagaaggagctggtgcaggcccggctgtctgaggccgagagccagtgtgccctgaaggagatgcaggacaaggtgctggacatcgagaagaggaacaacagcctgcctgatgagaacaacatcgcccggctgcaggaggagctgattgctgtgaagctgcgggaggccgaggccatcatgggcctgaaggagctgcggcagcaggtgaaggacctggaggagcactggcagaggcacctggcccggaccaccggccgctggaaggacccccccaagaagaatgccatgaatgagctgcaggatgagctgatgaccatccggctgcgggaggccgagacccaggccgagatccgggagatcaagcagaggatgatggagatggagacccagagcggcacctgtggccccctgctgaagatcatcttcttcaatgcctag

SEQ ID NO: 150865 - DNA, 2433 bp, synthetic construct
  misc_feature 1..2433: note = Description of Artificial Sequence: Synthetic coding sequence
  source 1..2433: mol_type = other DNA
atggtgaccaacaagatgacagctgccttcaggaaccccagcggcaagcaggtggccacagacaaggtggccgagaagctgagcagcaccctgtcctgggtgaagaacacagtgagccacacagtgtcccagatggccagccaggtggccagccccagcaccagcctgcacaccaccagcagcagcaccaccctgagcaccccagccctgagccccagcagccccagccagctgagcccagatgacctggagctgctggccaagctggaggagcagaaccggctgctggagacagacagcaagagcctgcggtctgtgaatggcagcagaagaaattctggcagcagcctggtgagcagcagcagcgccagcagcaacctgagccacctggaggaggacagctggatcctgtggggcagaattgtgaatgagtgggaggatgtgaggaagaagaaggagaagcaggtgaaggagctggtgcacaagggcatcccccaccacttccgggccatcgtgtggcagctgctgtgcagcgcccagagcatgcccatcaaggaccagtacagcgagctgctgaagatgaccagcccctgtgagaagctgatcagaagagacatcgcccggacctacccagagcacaacttcttcaaggagaaggacagcctgggccaggaggtgctcttcaacgtgatgaaggcctacagcctggtggaccgggaggtgggctactgccagggcagcgccttcatcgtgggcctgctgctgatgcagatgcctgaggaggaggccttctgtgtgtttgtgaagctgatgcaggactaccgcctgcgggagctgttcaagcccagcatggccgagctgggcctgtgcatgtaccagtttgagtgcatgatccaggagcacctgcctgagctgtttgtgcacttccagagccagagcttccacacctccatgtatgccagctcctggttcctgaccatcttcctgaccaccttccccctgcccatcgccacccgcatctttgacatcttcatgtctgagggcctggagatcgtgttccgggtgggcctggccctgctgcagatgaaccaggccgagctgatgcagctggacatggagggcatgctgcagcacttccagaaggtgatcccccaccagtttgatggagtgcctgacaagctgatccaggccgcctaccaggtgaagtacaacagcaagaagatgaagaagctggagaaggagtacaccaccatcaagaccaaggagatggaggagcaggtggagatcaagaggctgaggacagaaaatcggctgctgaagcagagaattgagaccctggagaagcacaagtgcagcagcaactacaatgaagattttgtgctgcagctggagaaggagctggtgcaggcccggctgtctgaggccgagagccagtgtgccctgaaggagatgcaggacaaggtgctggacatcgagaagaggaacaacagcctgcctgatgagaacaacatcgcccggctgcaggaggagctgattgctgtgaagctgcgggaggccgaggccatcatgggcctgaaggagctgcggcagcaggtgaaggacctggaggagcactggcagaggcacctggcccggaccaccggccgctggaaggacccccccaagaagaatgccatgaatgagctgcaggatgagctgatgaccatccggctgcgggaggccgagacccaggccgagatccgggagatcaagcagaggatgatggagatggagacccagaaccagatcaacagcaaccacctgcggcgggcagagcaggaggtgatcagcctgcaggagaaggtgcagtacctgagcgcccagaacaagggcctgctgacccagctgtctgaggccaagaggaagcaggccgagattgagtgcaagaacaaggaggaggtgatggctgtgcggctgcgggaggccgacagcattgctgctgtggccgagctgcggcagcacatcgccgagctggagatccagaaggaggagggcaagctgcagggccagctgaacaagagtgacagcaaccagtacatcggggagctgaaggaccagattgctgagctgaaccacgagctgcgctgcctgaagggccagaggggcttcagcggccagcccccatttgatggcatccacatcgtgaaccacctgattggagatgatgagagcttccacagcagtgatgaggacttcatcgacaacagcctgcaggagactggagtgggcttccccctgcacggcaagagcggctccatgagcctggaccctgctgtggctgatggcagcgagagcgagacagaagattctgtgctggagacccgggagagcaaccaggtggtgcagaaggagcggcccccaagaagaagagagagctacagcaccaccgtgtag

SEQ ID NO: 150866 - DNA, 2433 bp, synthetic construct; identical to SEQ ID NO: 150865
  misc_feature 1..2433: note = Description of Artificial Sequence: Synthetic coding sequence
  source 1..2433: mol_type = other DNA

SEQ ID NO: 150867 - DNA, 2466 bp, synthetic construct
  misc_feature 1..2466: note = Description of Artificial Sequence: Synthetic coding sequence
  source 1..2466: mol_type = other DNA
atggtgaccaacaagatgacagctgccttcaggaaccccagcggcaagcaggtggccacagacaaggtggccgagaagctgagcagcaccctgtcctgggtgaagaacacagtgagccacacagtgtcccagatggccagccaggtggccagccccagcaccagcctgcacaccaccagcagcagcaccaccctgagcaccccagccctgagccccagcagccccagccagctgagcccagatgacctggagctgctggccaagctggaggagcagaaccggctgctggagacagacagcaagagcctgcggtctgtgaatggcagcagaagaaattctggcagcagcctggtgagcagcagcagcgccagcagcaacctgagccacctggaggaggacagctggatcctgtggggcagaattgtgaatgagtgggaggatgtgaggaagaagaaggagaagcaggtgaaggagctggtgcacaagggcatcccccaccacttccgggccatcgtgtggcagctgctgtgcagcgcccagagcatgcccatcaaggaccagtacagcgagctgctgaagatgaccagcccctgtgagaagctgatcagaagagacatcgcccggacctacccagagcacaacttcttcaaggagaaggacagcctgggccaggaggtgctcttcaacgtgatgaaggcctacagcctggtggaccgggaggtgggctactgccagggcagcgccttcatcgtgggcctgctgctgatgcagatgcctgaggaggaggccttctgtgtgtttgtgaagctgatgcaggactaccgcctgcgggagctgttcaagcccagcatggccgagctgggcctgtgcatgtaccagtttgagtgcatgatccaggagcacctgcctgagctgtttgtgcacttccagagccagagcttccacacctccatgtatgccagctcctggttcctgaccatcttcctgaccaccttccccctgcccatcgccacccgcatctttgacatcttcatgtctgagggcctggagatcgtgttccgggtgggcctggccctgctgcagatgaaccaggccgagctgatgcagctggacatggagggcatgctgcagcacttccagaaggtgatcccccaccagtttgatggagtgcctgacaagctgatccaggccgcctaccaggtgaagtacaacagcaagaagatgaagaagctggagaaggagtacaccaccatcaagaccaaggagatggaggagcaggtggagatcaagaggctgaggacagaaaatcggctgctgaagcagagaattgagaccctggagaaggagagcgccagcctggccgacaggctcatccagcacaagtgcagcagcaactacaatgaagattttgtgctgcagctggagaaggagctggtgcaggcccggctgtctgaggccgagagccagtgtgccctgaaggagatgcaggacaaggtgctggacatcgagaagaggaacaacagcctgcctgatgagaacaacatcgcccggctgcaggaggagctgattgctgtgaagctgcgggaggccgaggccatcatgggcctgaaggagctgcggcagcaggtgaaggacctggaggagcactggcagaggcacctggcccggaccaccggccgctggaaggacccccccaagaagaatgccatgaatgagctgcaggatgagctgatgaccatccggctgcgggaggccgagacccaggccgagatccgggagatcaagcagaggatgatggagatggagacccagaaccagatcaacagcaaccacctgcggcgggcagagcaggaggtgatcagcctgcaggagaaggtgcagtacctgagcgcccagaacaagggcctgctgacccagctgtctgaggccaagaggaagcaggccgagattgagtgcaagaacaaggaggaggtgatggctgtgcggctgcgggaggccgacagcattgctgctgtggccgagctgcggcagcacatcgccgagctggagatccagaaggaggagggcaagctgcagggccagctgaacaagagtgacagcaaccagtacatcggggagctgaaggaccagattgctgagctgaaccacgagctgcgctgcctgaagggccagaggggcttcagcggccagcccccatttgatggcatccacatcgtgaaccacctgattggagatgatgagagcttccacagcagtgatgaggacttcatcgacaacagcctgcaggagaccggggtgggcttccccctgcacggcaagagcggctccatgagcctggaccctgctgtggctgatggcagcgagagcgagacagaggacagcgtgctggagacccgggagagcaaccaggtggtgcagaaggagcggccccccaggagaagagagagctacagcaccaccgtgtag

SEQ ID NO: 150868 - DNA, 891 bp, synthetic construct
  misc_feature 1..891: note = Description of Artificial Sequence: Synthetic coding sequence
  source 1..891: mol_type = other DNA
atgtcctgggtgcaggccaccctgctggcccggggcctgtgccgggcctggggcggcacctgtggggccgccctgaccggcaccagcatcagccaggtgccccggcggctgccccggggcctgcactgcagcgctgctgcccacagcagcgagcagagcctggtgcccagccccccagagccccggcagaggcccaccaaggccctggtgccctttgaggacctgtttggccaggcccctggaggagagcgggacaaggccagcttcctgcagacagtgcagaagtttgctgagcacagcgtgaggaagaggggccacatcgacttcatctacctggccctgaggaagatgagagaatatggagtggagcgggacctggccgtgtacaaccagctgctgaacatcttccccaaggaggtgttccggcccaggaacatcatccagaggatctttgtgcactacccccggcagcaggagtgtggcattgctgtgctggagcagatggagaaccacggcgtgatgcccaacaaggagacagagttcctgctgatccagatctttggaaggaagagctaccccatgctgaagctggtgcggctgaagctgtggttcccccgcttcatgaatgtgaaccccttccctgtgccccgggacctgccccaggaccctgtggagctggccatgtttggcctgcggcacatggagccagacctgagcgcccgggtgaccatctaccaggtgcccctgcccaaggacagcactggagctgctgaccccccccagccccacatcgtgggcagcggcagagatgctggaggagtggagcccctgctgcctgatgctgctggccctggggtgtgtgaggagtggctgggccagctgcgggtgtag

SEQ ID NO: 150869 - DNA, 1296 bp, synthetic construct
  misc_feature 1..1296: note = Description of Artificial Sequence: Synthetic coding sequence
  source 1..1296: mol_type = other DNA
atgtcctgggtgcaggccaccctgctggcccggggcctgtgccgggcctggggcggcacctgtggggccgccctgaccggcaccagcatcagccaggtgccccggcggctgccccggggcctgcactgcagcgctgctgcccacagcagcgagcagagcctggtgcccagccccccagagccccggcagaggcccaccaaggccctggtgccctttgaggacctgtttggccaggcccctggaggagagcgggacaaggccagcttcctgcagacagtgcagaagtttgctgagcacagcgtgaggaagaggggccacatcgacttcatctacctggccctgaggaagatgagagaatatggagtggagcgggacctggccgtgtacaaccagctgctgaacatcttccccaaggaggtgttccggcccaggaacatcatccagaggatctttgtgcactacccccggcagcaggagtgtggcattgctgtgctggagcagatggagaaccacggcgtgatgcccaacaaggagacagagttcctgctgatccagatctttggaaggaagagctaccccatgctgaagctggtgcggctgaagctgtggttcccccgcttcatgaatgtgaaccccttccctgtgccccgggacctgccccaggaccctgtggagctggccatgtttggcctgcggcacatggagccagacctgagcgcccgggtgaccatctaccaggtgcccctgcccaaggacagcactggagctgctgaccccccccagccccacatcgtgggcatccagagcccagaccagcaggccgccctggcccggcacaacccagcccggcctgtgtttgtggagggccccttcagcctgtggctgaggaacaagtgtgtgtactaccacatcctgcgggctgacctgctgcccccagaggagcgggaggtggaggagaccccagaggagtggaacctgtactaccccatgcagctggacctggagtatgtgcgcagcggctgggacaactatgaatttgacatcaatgaggtggaggagggccctgtgtttgccatgtgcatggccggggcccatgaccaggccaccatggccaagtggatccagggcctgcaggagaccaaccccaccctggcccagatccctgtggtgttccggctggccggcagcacccgggagctgcagaccagcagcgctggcctggaggagccccccctgcctgaggaccaccaggaggaggatgacaacctgcagaggcagcagcagggccagagctag

SEQ ID NO: 150870 - DNA, 654 bp, synthetic construct
  misc_feature 1..654: note = Description of Artificial Sequence: Synthetic coding sequence
  source 1..654: mol_type = other DNA
atgtcctgggtgcaggccaccctgctggcccggggcctgtgccgggcctggggcggcacctgtggggccgccctgaccggcaccagcatcagccaggtgcccctgcccaaggacagcactggagctgctgaccccccccagccccacatcgtgggcatccagagcccagaccagcaggccgccctggcccggcacaacccagcccggcctgtgtttgtggagggccccttcagcctgtggctgaggaacaagtgtgtgtactaccacatcctgcgggctgacctgctgcccccagaggagcgggaggtggaggagaccccagaggagtggaacctgtactaccccatgcagctggacctggagtatgtgcgcagcggctgggacaactatgaatttgacatcaatgaggtggaggagggccctgtgtttgccatgtgcatggccggggcccatgaccaggccaccatggccaagtggatccagggcctgcaggagaccaaccccaccctggcccagatccctgtggtgttccggctggccggcagcacccgggagctgcagaccagcagcgctggcctggaggagccccccctgcctgaggaccaccaggaggaggatgacaacctgcagaggcagcagcagggccagagctag

SEQ ID NO: 150871 - DNA, 891 bp, synthetic construct
  misc_feature 1..891: note = Description of Artificial Sequence: Synthetic coding sequence
  source 1..891: mol_type = other DNA
atgtcctgggtgcaggccaccctgctggcccggggcctgtgccgggcctggggcggcacctgtggggccgccctgaccggcaccagcatcagccaggtgccccggcggctgccccggggcctgcactgcagcgctgctgcccacagcagcgagcagagcctggtgcccagccccccagagccccggcagaggcccaccaaggccctggtgccctttgaggacctgtttggccaggcccctggaggagagcgggacaaggccagcttcctgcagacagtgcagaagtttgctgagcacagcgtgaggaagaggggccacatcgacttcatctacctggccctgaggaagatgagagaatatggagtggagcgggacctggccgtgtacaaccagctgctgaacatcttccccaaggaggtgttccggcccaggaacatcatccagaggatctttgtgcactacccccggcagcaggagtgtggcattgctgtgctggagcagatggagaaccacggcgtgatgcccaacaaggagacagagttcctgctgatccagatctttggaaggaagagctaccccatgctgaagctggtgcggctgaagctgtggttcccccgcttcatgaatgtgaaccccttccctgtgccccgggacctgccccaggaccctgtggagctggccatgtttggcctgcggcacatggagccagacctgagcgcccgggtgaccatctaccaggtgcccctgcccaaggacagcactggagctgctgaccccccccagccccacatcgtggagctgacctgctgccccaggagaagaggcaagtggaagagaagaagaagaagtggcaccagcaccacccgctgctcctggacctggagcatgtag

SEQ ID NO: 150872 - DNA, 1770 bp, synthetic construct
  misc_feature 1..1770: note = Description of Artificial Sequence: Synthetic coding sequence
  source 1..1770: mol_type = other DNA
atgtctgtgtctgtgcatgaaaataggaagagccgggccagcagcggcagcatcaacatctacctgttccacaagagcagctatgctgacagcgtgctgacccacctgaacctgctgcggcagcagaggctcttcacagatgtgctgctgcacgccggcaacagaaccttcccctgccacagagctgtgctggccgcctgcagccgctactttgaggccatgttcagcggcggcctgaaggagagccaggacagcgaggtgaactttgacaacagcatccaccctgaggtgctggagctgctgctggactatgcctacagcagcagggtcatcatcaatgaagaaaatgctgagagcctgctggaggccggggacatgctggagttccaggacatcagagatgcctgtgccgagttcctggagaagaacctgcaccccaccaactgcctgggcatgctgctgctgagtgatgcccaccagtgcaccaagctgtatgagctgtcctggaggatgtgcctgagcaacttccagaccatcaggaagaatgaagacttcctgcagctgccccaggacatggtggtgcagctgctgagcagcgaggagctggagacagaagatgagcggctggtgtatgaaagtgccatcaactggatctcctatgacctgaagaagcgctactgctacctgcctgagctgctgcagacagtgcggctggccctgctgcctgccatctacctgatggagaatgtggccatggaggagctgatcaccaagcagaggaagagcaaggagatcgtggaggaggccatccgctgcaagctgaagatcctgcagaatgatggagtggtgaccagcctgtgtgcccggcccaggaagacaggccacgccctcttcctgctgggcggccagaccttcatgtgtgacaagctgtacctggtggaccagaaggccaaggagatcatccccaaggctgacatccccagccccaggaaggagttcagcgcctgtgccatcggctgcaaggtgtacatcactggaggccggggctctgaaaatggagtgtccaaggatgtgtgggtgtatgacaccctgcacgaggagtggagcaaggccgcccccatgctggtggccaggtttggacatggcagcgctgagctgaagcactgcctgtatgtggtgggcggccacacagctgccaccggctgcctgcctgccagccccagcgtgtccctgaagcaggtggagcactatgaccccaccatcaacaagtggaccatggtggcccccctgcgggagggcgtgtccaatgctgctgtggtgtctgccaagctgaagctgtttgcctttggaggcacctctgtgtcccatgacaagctgcccaaggtgcagtgctatgaccagtgtgaaaatcgctggacagtgcctgccacctgcccccagccctggagatacacagctgctgctgtgctgggcaaccagatcttcatcatgggcggggacacagagttcagcgcctgcagcgcctacaagttcaacagcgagacctaccagtggaccaaggtgggagatgtgacagccaagaggatgagctgccacgctgtggccagcggcaacaagctgtatgtggtgggcggctacttcggcatccagcgctgcaagaccctggactgctatgaccccaccctggatgtgtggaacagcatcaccaccgtgccctacagcctcatccccacagcctttgtgtccacctggaagcacctgcccagctag

SEQ ID NO: 150873 - DNA, 153 bp, synthetic construct
  misc_feature 1..153: note = Description of Artificial Sequence: Synthetic coding sequence
  source 1..153: mol_type = other DNA
atgtctgtgtctgtgcatgaaaataggaagagccgggccagcagcggcagcatcaacatctacctgttccacaagagcagctatgctgacagcgtgctgacccacctgaacctgctgcggcagcagaggctcttcacagatgtgctgctgtag

SEQ ID NO: 150874 - DNA, 15 bp, synthetic construct
  misc_feature 1..15: note = Description of Artificial Sequence: Synthetic coding sequence
  source 1..15: mol_type = other DNA
atgtctgtgtcctag

SEQ ID NO: 150875 - DNA, 1770 bp, synthetic construct; identical to SEQ ID NO: 150872
  misc_feature 1..1770: note = Description of Artificial Sequence: Synthetic coding sequence
  source 1..1770: mol_type = other DNA

SEQ ID NO: 150876 - DNA, 1551 bp, synthetic construct
  misc_feature 1..1551: note = Description of Artificial Sequence: Synthetic coding sequence
  source 1..1551: mol_type = other DNA
atgttttctgggggcctgaaggagagccaggacagcgaggtgaactttgacaacagcatccaccctgaggtgctggagctgctgctggactatgcctacagcagcagggtcatcatcaatgaggagaatgctgagagcctgctggaggccggggacatgctggagttccaggacatcagagatgcctgtgccgagttcctggagaagaacctgcaccccaccaactgcctgggcatgctgctgctgagtgatgcccaccagtgcaccaagctgtatgagctgtcctggaggatgtgcctgagcaacttccagaccatcaggaagaatgaagacttcctgcagctgccccaggacatggtggtgcagctgctgagcagcgaggagctggagacagaagatgagcggctggtgtatgagagcgccatcaactggatctcctatgacctgaagaagcgctactgctacctgcctgagctgctgcagacagtgcggctggccctgctgcctgccatctacctgatggagaatgtggccatggaggagctgatcaccaagcagaggaagagcaaggagatcgtggaggaggccatccgctgcaagctgaagatcctgcagaatgatggagtggtgaccagcctgtgtgcccggcccaggaagacaggccacgccctcttcctgctgggcggccagaccttcatgtgtgacaagctgtacctggtggaccagaaggccaaggagatcatccccaaggctgacatccccagccccaggaaggagttcagcgcctgtgccatcggctgcaaggtgtacatcaccggcggccggggctctgaaaatggagtgtccaaggatgtgtgggtgtatgacaccctgcacgaggagtggagcaaggccgcccccatgctggtggcccgcttcggccacggcagcgctgagctgaagcactgcctgtatgtggtgggcggccacacagctgccaccggctgcctgcctgccagccccagcgtgtccctgaagcaggtggagcactatgaccccaccatcaacaagtggaccatggtggcccccctgcgggagggcgtgtccaatgctgctgtggtgtctgccaagctgaagctgtttgccttcggcggcacctctgtgtcccatgacaagctgcccaaggtgcagtgctatgaccagtgtgagaaccgctggacagtgcctgccacctgcccccagccctggagatacacagctgctgctgtgctgggcaaccagatcttcatcatgggcggggacacagagttcagcgcctgcagcgcctacaagttcaacagcgagacctaccagtggaccaaggtgggagatgtgacagccaagaggatgagctgccacgctgtggccagcggcaacaagctgtatgtggtgggcggctacttcggcatccagcgctgcaagaccctggactgctatgaccccaccctggatgtgtggaacagcatcaccaccgtgccctacagcctcatccccacagcctttgtgtccacctggaagcacctgcccagctag

SEQ ID NO: 150877 - DNA, 1932 bp, synthetic construct
  misc_feature 1..1932: note = Description of Artificial Sequence: Synthetic coding sequence
  source 1..1932: mol_type = other DNA
atggtggatgctgggggcgtggagaacatcacccagctgccccaggagctgccccagatgatggctgctgctgctgatggcctgggcagcatcgccatcgacaccacccagctgaacatgtctgtgacagaccccacagcctgggccacagccatgaacaacctgggcatggtgcctgtgggcctgcccggccagcagctggtgtctgacagcatctgtgtgcccggctttgaccccagcctgaacatgatgacaggcatcacccccatcaaccccatgatccctggcctgggcctggtgcccccacctccacccacagaggtggccgtggtgaaggagatcatccactgcaagagctgcaccctcttcccccagaaccccaacctgcccccacccagcacccgggagcggcccccaggctgcaagacagtgtttgtgggcggcctgcctgaaaatgccacagaggagatcatccaggaggtgtttgagcagtgtggggacatcacagccatcaggaagagcaagaagaacttctgccacatccgctttgctgaggagttcatggtggacaaggccatctacctgagcggctacaggatgaggctgggcagcagcacagacaagaaggacagcggccgcctgcacgtggactttgcccaggccagagatgacttctatgagtgggagtgcaagcagaggatgagggcccgggaggagcggcacaggaggaagctggaggaggaccggctgcggccccccagccccccagccatcatgcactacagcgagcacgaggccgccctgctggccgagaagctgaaggatgacagcaagttcagcgaggccatcaccgtgctgctgtcctggattgaaagaggagaggtgaacagaagaagtgccaaccagttctacagcatggtgcagagcgccaacagccacgtgcggcggctgatgaatgagaaggccacccatgagcaggagatggaggaggccaaggagaacttcaagaatgccctgaccggcatcctgacccagtttgagcagatcgtggccgtgttcaatgccagcacccggcagaaggcctgggaccacttcagcaaggcccagaggaagaacatcgacatctggaggaagcacagcgaggagctgagaaatgcccagagcgagcagctgatgggcatcagaagagaggaggagatggagatgtctgatgatgagaactgtgacagccccaccaagaagatgagggtggatgagagcgccctggccgcccaggcctatgccctgaaggaggagaatgacagcctgcgctggcagctggatgcctacagaaatgaggtggagctgctgaagcaggagaaggagcagctgttcagaacagaggagaacctgaccaaggaccagcagctgcagttcctgcagcagaccatgcagggcatgcagcagcagctgctgaccatccaggaggagctgaacaacaagaagtctgagctggagcaggccaaggaggagcagagccacacccaggccctgctgaaggtgctgcaggagcagctgaagggcaccaaggagctggtggagaccaacggccacagccatgaggacagcaatgagatcaacgtgctgactgtggccctggtgaaccaggaccgggagaacaacatcgagaagaggagccagggcctgaagtctgagaaggaggccctgctgattggcatcatcagcaccttcctgcacgtgcacccctttggagccaacatcgagtacctgtggagctacatgcagcagctggacagcaagatcagcgccaatgaaattgagatgctgctgatgaggctgcccaggatgttcaagcaggagttcaccggggtgggcgccaccctggagaagcgctggaagctgtgtgcctttgagggcatcaagaccacctag

SEQ ID NO: 150878 - DNA, 1932 bp, synthetic construct; identical to SEQ ID NO: 150877
  misc_feature 1..1932: note = Description of Artificial Sequence: Synthetic coding sequence
  source 1..1932: mol_type = other DNA

SEQ ID NO: 150879 - DNA, 708 bp, synthetic construct
  misc_feature 1..708: note = Description of Artificial Sequence: Synthetic coding sequence
  source 1..708: mol_type = other DNA
atggtggacaaggccatctacctgagcggctacaggatgaggctgggcagcagcacagacaagaaggacagcggccgcctgcacgtggactttgcccaggccagagatgacttctatgagtgggagtgcaagcagaggatgagggcccgggaggagcggcacaggaggaagctggaggaggaccggctgcggccccccagccccccagccatcatgcactacagcgagcatgaagctgccctgctggccgagaagctgaaggatgacagcaagttcagcgaggccatcaccgtgctgctgtcctggattgagcggggggaggtgaacagaagaagtgccaaccagttctacagcatggtgcagagcgccaacagccacgtgcggcggctgatgaatgagaaggccacccatgagcaggagatggaggaggccaaggagaacttcaagaatgccctgaccggcatcctgacccagtttgagcagatcgtggccgtgttcaatgccagcacccggcagaaggcctgggaccacttcagcaaggcccagaggaagaacatcgacatctggaggaagcacagcgaggagctgagaaatgcccagagcgagcagctgatgggcatccggcgggaggaggagatggagatgtctgatgatgagaactgtgacagccccaccaagaagatgagggtggatgaaagtggggcctag

SEQ ID NO: 150880 - DNA, 1833 bp, synthetic construct
  misc_feature 1..1833: note = Description of Artificial Sequence: Synthetic coding sequence
  source 1..1833: mol_type = other DNA
atgcagagggacttccgctggctgtgggtgtatgaaattggctacgccgctgacaacagcaggaccctgaatgtggacagcacagccatgaccctgcccatgtctgaccccacagcctgggccacagccatgaacaacctgggcatggcccccctgggcattgctggccagcccatcctgcctgactttgatcctgccctgggcatgatgacaggcatcccccccatcacccccatgatgcctggcctgggcatcgtgcccccacccatccccccagacatgcctgtggtgaaggagatcatccactgcaagagctgcaccctcttcccccccaaccccaacctgcccccaccagccacccgggagcggcccccaggctgcaagacagtgtttgtgggcggcctgcctgaaaatggaacagagcagatcatcgtggaggtgtttgagcagtgtggggagatcatcgccatcaggaagagcaagaagaacttctgccacatccgctttgctgaggagtacatggtggacaaggccctgtacctgagcggctaccgcatccggctgggcagcagcacagacaagaaggacaccggccgcctgcacgtggactttgcccaggccagagatgacctgtatgagtgggagtgcaagcagaggatgctggcccgggaggagcggcacagaagaaggatggaggaggagcggctgcggccccccagccccccacctgtggtgcactacagcgaccatgaatgttccatcgtggccgagaagctgaaggatgacagcaagttcagcgaggccgtgcagaccctgctgacctggattgaaagaggagaggtgaacagaagaagtgccaacaacttctacagcatgatccagagcgccaacagccacgtgcggcggctggtgaatgagaaggccgcccacgagaaggacatggaggaggccaaggagaagttcaagcaggccctgagcggcatcctgatccagtttgagcagatcgtggccgtgtaccacagcgccagcaagcagaaggcctgggaccacttcaccaaggcccagaggaagaacatctctgtgtggtgcaagcaggccgaggagatccggaacatccacaatgatgagctgatgggcatcagaagagaggaggagatggagatgtctgatgatgaaattgaggagatgacagagaccaaggagacagaggagagcgccctggtgtcccaggccgaggccctgaaggaggagaatgacagcctgcgctggcagctggatgcctacagaaatgaggtggagctgctgaagcaggagcagggcaaggtgcacagagaagatgaccccaacaaggagcagcagctgaagctgctgcagcaggccctgcagggcatgcagcagcacctgctgaaggtgcaggaggagtacaagaagaaggaggccgagctggagaagctgaaggatgacaagctgcaggtggagaagatgctggagaacctgaaggagaaggagagctgtgccagccggctgtgtgccagcaaccaggacagcgagtaccccctggagaagaccatgaacagcagccccatcaagtctgagcgggaggccctgctggtgggcatcatcagcaccttcctgcacgtgcacccctttggagccagcattgagtacatctgcagctacctgcaccggctggacaacaagatctgcaccagtgatgtggagtgcctgatgggccgcctgcagcacaccttcaagcaggagatgactggagtgggcgccagcctggagaagcgctggaagttctgtggctttgagggcctgaagctgacctag

SEQ ID NO: 150881 - DNA, 1917 bp, synthetic construct
  misc_feature 1..1917: note = Description of Artificial Sequence: Synthetic coding sequence
  source 1..1917: mol_type = other DNA
ctgccctttgatcctgccaacaacaatgagcccctgcagtttggcagcgccagcggccccctggtgacagagggcctgattgaaaatggaggagagagcagcaagaagaggaagaggaccaacacccccagcgctgacaacagcaggaccctgaatgtggacagcacagccatgaccctgcccatgtctgaccccacagcctgggccacagccatgaacaacctgggcatggcccccctgggcattgctggccagcccatcctgcctgactttgatcctgccctgggcatgatgacaggcatcccccccatcacccccatgatgcctggcctgggcatcgtgcccccacccatccccccagacatgcctgtggtgaaggagatcatccactgcaagagctgcaccctcttcccccccaaccccaacctgcccccaccagccacccgggagcggcccccaggctgcaagacagtgtttgtgggcggcctgcctgaaaatggaacagagcagatcatcgtggaggtgtttgagcagtgtggggagatcatcgccatcaggaagagcaagaagaacttctgccacatccgctttgctgaggagtacatggtggacaaggccctgtacctgagcggctaccgcatccggctgggcagcagcacagacaagaaggacaccggccgcctgcacgtggactttgcccaggccagagatgacctgtatgagtgggagtgcaagcagaggatgctggcccgggaggagcggcacagaagaaggatggaggaggagcggctgcggccccccagccccccacctgtggtgcactacagcgaccatgaatgttccatcgtggccgagaagctgaaggatgacagcaagttcagcgaggccgtgcagaccctgctgacctggattgaaagaggagaggtgaacagaagaagtgccaacaacttctacagcatgatccagagcgccaacagccacgtgcggcggctggtgaatgagaaggccgcccacgagaaggacatggaggaggccaaggagaagttcaagcaggccctgagcggcatcctgatccagtttgagcagatcgtggccgtgtaccacagcgccagcaagcagaaggcctgggaccacttcaccaaggcccagaggaagaacatctctgtgtggtgcaagcaggccgaggagatccggaacatccacaatgatgagctgatgggcatcagaagagaggaggagatggagatgtctgatgatgaaattgaggagatgacagagaccaaggagacagaggagagcgccctggtgtcccaggccgaggccctgaaggaggagaatgacagcctgcgctggcagctggatgcctacagaaatgaggtggagctgctgaagcaggagcagggcaaggtgcacagagaagatgaccccaacaaggagcagcagctgaagctgctgcagcaggccctgcagggcatgcagcagcacctgctgaaggtgcaggaggagtacaagaagaaggaggccgagctggagaagctgaaggatgacaagctgcaggtggagaagatgctggagaacctgaaggagaaggagagctgtgccagccggctgtgtgccagcaaccaggacagcgagtaccccctggagaagaccatgaacagcagccccatcaagtctgagcgggaggccctgctggtgggcatcatcagcaccttcctgcacgtgcacccctttggagccagcattgagtacatctgcagctacctgcaccggctggacaacaagatctgcaccagtgatgtggagtgcctgatgggccgcctgcagcacaccttcaagcaggagatgactggagtgggcgccagcctggagaagcgctggaagttctgtggctttgagggcctgaagctgacctag

SEQ ID NO: 150882 - DNA, 1833 bp, synthetic construct; identical to SEQ ID NO: 150880
  misc_feature 1..1833: note = Description of Artificial Sequence: Synthetic coding sequence
  source 1..1833: mol_type = other DNA

SEQ ID NO: 150883 - DNA, 1746 bp, synthetic construct
  misc_feature 1..1746: note = Description of Artificial Sequence: Synthetic coding sequence
  source 1..1746: mol_type = other DNA
atgaccctgcccatgtctgaccccacagcctgggccacagccatgaacaacctgggcatggcccccctgggcattgctggccagcccatcctgcctgactttgatcctgccctgggcatgatgacaggcatcccccccatcacccccatgatgcctggcctgggcatcgtgcccccacccatccccccagacatgcctgtggtgaaggagatcatccactgcaagagctgcaccctcttcccccccaaccccaacctgcccccaccagccacccgggagaggcctcctggctgcaagacagtgtttgtgggcggcctgcctgaaaatggaacagagcagatcatcgtggaggtgtttgagcagtgtggggagatcatcgccatcaggaagagcaagaagaacttctgccacatccgctttgctgaggagtacatggtggacaaggccctgtacctgagcggctaccgcatccggctgggcagcagcacagacaagaaggacaccggccgcctgcacgtggactttgcccaggccagagatgacctgtatgagtgggagtgcaagcagaggatgctggcccgggaggagcggcacagaagaaggatggaggaggagcggctgcggccccccagccccccacctgtggtgcactacagcgaccacgagtgcagcatcgtggccgagaagctgaaggatgacagcaagttcagcgaggccgtgcagaccctgctgacctggattgagcggggggaggtgaacagaagaagtgccaacaacttctacagcatgatccagagcgccaacagccacgtgcggcggctggtgaatgagaaggccgcccacgagaaggacatggaggaggccaaggagaagttcaagcaggccctgagcggcatcctgatccagtttgagcagatcgtggccgtgtaccacagcgccagcaagcagaaggcctgggaccacttcaccaaggcccagaggaagaacatctctgtgtggtgcaagcaggccgaggagatccggaacatccacaatgatgagctgatgggcatccggcgggaggaggagatggagatgtctgatgatgaaattgaggagatgacagagaccaaggagacagaggagagcgccctggtgtcccaggccgaggccctgaaggaggagaatgacagcctgcgctggcagctggatgcctacagaaatgaggtggagctgctgaagcaggagcagggcaaggtgcaccgggaggatgaccccaacaaggagcagcagctgaagctgctgcagcaggccctgcagggcatgcagcagcacctgctgaaggtgcaggaggagtacaagaagaaggaggccgagctggagaagctgaaggatgacaagctgcaggtggagaagatgctggagaacctgaaggagaaggagagctgtgccagccggctgtgtgccagcaaccaggacagcgagtaccccctggagaagaccatgaacagcagccccatcaagtctgagcgggaggccctgctggtgggcatcatcagcaccttcctgcacgtgcacccctttggagccagcattgagtacatctgcagctacctgcaccggctggacaacaagatctgcaccagtgatgtggagtgcctgatgggccgcctgcagcacaccttcaagcaggagatgactggagtgggcgccagcctggagaagcgctggaagttctgtggctttgagggcctgaagctgacctag

SEQ ID NO: 150884 - DNA, 1746 bp, synthetic construct; identical to SEQ ID NO: 150883
  misc_feature 1..1746: note = Description of Artificial Sequence: Synthetic coding sequence
  source 1..1746: mol_type = other DNA

SEQ ID NO: 150885 - DNA, 1131 bp, synthetic construct
  misc_feature 1..1131: note = Description of Artificial Sequence: Synthetic coding sequence
  source 1..1131: mol_type = other DNA
atgaccctgcccatgtctgaccccacagcctgggccacagccatgaacaacctgggcatggcccccctgggcattgctggccagcccatcctgcctgactttgatcctgccctgggcatgatgacaggcatcccccccatcacccccatgatgcctggcctgggcatcgtgcccccacccatccccccagacatgcctgtggtgaaggagatcatccactgcaagagctgcaccctcttcccccccaaccccaacctgcccccaccagccacccgggagaggcctcctggctgcaagacagtgtttgtgggcggcctgcctgaaaatggaacagagcagatcatcgtggaggtgtttgagcagtgtggggagatcatcgccatcaggaagagcaagaagaacttctgccacatccgctttgctgaggagtacatggtggacaaggccctgtacctgagcggctaccgcatccggctgggcagcagcacagacaagaaggacaccggccgcctgcacgtggactttgcccaggccagagatgacctgtatgagtgggagtgcaagcagaggatgctggcccgggaggagcggcacagaagaaggatggaggaggagcggctgcggccccccagccccccacctgtggtgcactacagcgaccacgagtgcagcatcgtggccgagaagctgaaggatgacagcaagttcagcgaggccgtgcagaccctgctgacctggattgagcggggggaggtgaacagaagaagtgccaacaacttctacagcatgatccagagcgccaacagccacgtgcggcggctggtgaatgagaaggccgcccacgagaaggacatggaggaggccaaggagaagttcaagcaggccctgagcggcatcctgatccagtttgagcagatcgtggccgtgtaccacagcgccagcaagcagaaggcctgggaccacttcaccaaggcccagaggaagaacatctctgtgtggtgcaagcaggccgaggagatccggaacatccacaatgatgagctgatgggcatccggcgggaggaggagatggagatgtctgatgatgaaattgaggagatgacagagaccaaggagacagaggagagctag

SEQ ID NO: 150886 - DNA, 1407 bp, synthetic construct
  misc_feature 1..1407: note = Description of Artificial Sequence: Synthetic coding sequence
  source 1..1407: mol_type = other DNA
atgaccctgcccatgtctgaccccacagcctgggccacagccatgaacaacctgggcatggcccccctgggcattgctggccagcccatcctgcctgactttgatcctgccctgggcatgatgacaggcatcccccccatcacccccatgatgcctggcctgggcatcgtgcccccacccatccccccagacatgcctgtggtgaaggagatcatccactgcaagagctgcaccctcttcccccccaaccccaacctgcccccaccagccacccgggagaggcctcctggctgcaagacagtgtttgtgggcggcctgcctgaaaatggaacagagcagatcatcgtggaggtgtttgagcagtgtggggagatcatcgccatcaggaagagcaagaagaacttctgccacatccgctttgctgaggagtacatggtggacaaggccctgtacctgagcggctaccgcatccggctgggcagcagcacagacaagaaggacaccggccgcctgcacgtggactttgcccaggccagagatgacctgtatgagtgggagtgcaagcagaggatgctggcccgggaggagcggcacagaagaaggatggaggaggagcggctgcggccccccagccccccacctgtggtgcactacagcgaccacgagtgcagcatcgtggccgagaagctgaaggatgacagcaagttcagcgaggccgtgcagaccctgctgacctggattgagcggggggaggtgaacagaagaagtgccaacaacttctacagcatgatccagagcgccaacagccacgtgcggcggctggtgaatgagaaggccgcccacgagaaggacatggaggaggccaaggagaagttcaagcaggccctgagcggcatcctgatccagtttgagcagatcgtggccgtgtaccacagcgccagcaagcagaaggcctgggaccacttcaccaaggcccagaggaagaacatctctgtgtggtgcaagcaggccgaggagatccggaacatccacaatgatgagctgatgggcatccggcgggaggaggagatggagatgtctgatgatgaaattgaggagatgacagagaccaaggagacagaggagagcgccctggtgtcccaggccgaggccctgaaggaggagaatgacagcctgcgctggcagctggatgcctacagaaatgaggtggagctgctgaagcaggagcagggcaaggtgcaccgggaggatgaccccaacaaggagcagcagctgaagctgctgcagcaggccctgcagggcatgcagcagcacctgctgaaggtgcaggaggagtacaagaagaaggaggccgagctggagaagctgaaggatgacaagctgcaggtggagaagatgaagaagtag

SEQ ID NO: 150887 - DNA, 1119 bp, synthetic construct
  misc_feature 1..1119: note = Description of Artificial Sequence: Synthetic coding sequence
  source 1..1119: mol_type = other DNA
atggagagcgaggagctggccgacagagtgctggatgtggtggagaggagcctgagcaactacccctttgacttccagggcgcccgcatcatcaccggccaggaggagggcgcctacggctggatcaccatcaactacctgctgggcaagttcagccagaagacccgctggttcagcatcgtgccctatgagaccaacaaccaggagacctttggagccctggacctgggcggggccagcacccaggtgacctttgtgccccagaaccagaccatcgagagcccagacaatgccctgcagttccggctgtatggcaaggactacaacgtgtacacccacagcttcctgtgctacggcaaggaccaggccctgtggcagaagctggccaaggacatccaggtggccagcaatgagatcctgcgggacccctgcttccaccctggctacaagaaggtggtgaatgtgtctgacctgtacaagaccccctgcaccaagagatttgagatgaccctgcccttccagcagtttgagatccagggcatcggcaactaccagcagtgccaccagagcatcctggagctgttcaacaccagctactgcccctacagccagtgtgccttcaacggcatcttcctgccccccctgcagggcgactttggagccttcagcgccttctactttgtgatgaagttcctgaacctgaccagcgagaaggtgtcccaggagaaggtgacagagatgatgaagaagttctgtgcccagccctgggaggagatcaagaccagctatgctggggtgaaggagaagtacctgtctgagtactgcttcagcggcacctacatcctgagcctgctgctgcagggctaccacttcaccgctgacagctgggagcacatccacttcatcggcaagatccagggcagtgatgctggctggaccctgggctacatgctgaacctgaccaacatgatcccagctgagcagcccctgagcacccccctgagccacagcacctacgtgttcctgatggtgctcttcagcctggtgctcttcaccgtggccatcatcggcctgctgatcttccacaagcccagctacttctggaaggacatggtgtag

SEQ ID NO: 150888 - DNA, 1533 bp, synthetic construct
  misc_feature 1..1533: note = Description of Artificial Sequence: Synthetic coding sequence
  source 1..1533: mol_type = other DNA
atggaggacaccaaggagagcaatgtgaagaccttctgcagcaagaacatcctggccatcctgggcttcagcagcatcatcgccgtcatcgccctgctggccgtgggcctgacccagaacaaggccctgcctgaaaatgtgaagtatggaattgtgctggatgctggcagcagccacaccagcctgtacatctacaagtggccagctgagaaggaaaatgacacaggagtggtgcaccaggtggaggagtgccgggtgaagggccctggcatcagcaagtttgtgcagaaggtgaatgaaattggcatctacctgacagactgcatggagcgggcccgggaggtgatccccaggagccagcaccaggagacccctgtgtacctgggcgccacagctggcatgaggctgctgaggatggagagcgaggagctggccgacagagtgctggatgtggtggagaggagcctgagcaactacccctttgacttccagggcgcccgcatcatcaccggccaggaggagggcgcctacggctggatcaccatcaactacctgctgggcaagttcagccagaagacccgctggttcagcatcgtgccctatgagaccaacaaccaggagacctttggagccctggacctgggcggggccagcacccaggtgacctttgtgccccagaaccagaccatcgagagcccagacaatgccctgcagttccggctgtatggcaaggactacaacgtgtacacccacagcttcctgtgctacggcaaggaccaggccctgtggcagaagctggccaaggacatccaggtggccagcaatgagatcctgcgggacccctgcttccaccctggctacaagaaggtggtgaatgtgtctgacctgtacaagaccccctgcaccaagagatttgagatgaccctgcccttccagcagtttgagatccagggcatcggcaactaccagcagtgccaccagagcatcctggagctgttcaacaccagctactgcccctacagccagtgtgccttcaacggcatcttcctgccccccctgcagggcgactttggagccttcagcgccttctactttgtgatgaagttcctgaacctgaccagcgagaaggtgtcccaggagaaggtgacagagatgatgaagaagttctgtgcccagccctgggaggagatcaagaccagctatgctggggtgaaggagaagtacctgtctgagtactgcttcagcggcacctacatcctgagcctgctgctgcagggctaccacttcaccgctgacagctgggagcacatccacttcatcggcaagatccagggcagtgatgctggctggaccctgggctacatgctgaacctgaccaacatgatcccagctgagcagcccctgagcacccccctgagccacagcacctacgtgttcctgatggtgctcttcagcctggtgctcttcaccgtggccatcatcggcctgctgatcttccacaagcccagctacttctggaaggacatggtgtag

SEQ ID NO: 150889 - DNA, 921 bp, synthetic construct
  misc_feature 1..921: note = Description of Artificial Sequence: Synthetic coding sequence
  source 1..921: mol_type = other DNA
atgaagggcaccaaggacctgaccagccagcagaaggagagcaatgtgaagaccttctgcagcaagaacatcctggccatcctgggcttcagcagcatcatcgctgtgattgccctgctggccgtgggcctgacccagaacaaggccctgcctgaaaatgtgaagtatggcatcgtgctggatgctggcagcagccacaccagcctgtacatctacaagtggccagctgagaaggaaaatgacaccggggtggtgcaccaggtggaggagtgccgggtgaagggccctggcatcagcaagtttgtgcagaaggtgaatgagatcggcatctacctgacagactgcatggagcgggcccgggaggtgatccccaggagccagcaccaggagacccctgtgtacctgggcgccacagctggcatgaggctgctgaggatggagagcgaggagctggccgacagagtgctggatgtggtggagaggagcctgagcaactacccctttgacttccagggcgcccgcatcatcaccggccaggaggagggcgcctacggctggatcaccatcaactacctgctgggcaagttcagccagaagacccgctggttcagcatcgtgccctatgagaccaacaaccaggagaccttcggggccctggacctgggcggggccagcacccaggtgacctttgtgccccagaaccagaccatcgagagcccagacaatgccctgcagttccggctgtatggcaaggactacaacgtgtacacccacagcttcctgtgctacggcaaggaccaggccctgtggcagaagctggccaaggacatccaggccagcatcacccagagcaggcctgcccccttcaccagcgcccccccagcccccaccagctgctgcttcctgttccagatccagtag

SEQ ID NO: 150890 - DNA, 1569 bp, synthetic construct
  misc_feature 1..1569: note = Description of Artificial Sequence: Synthetic coding sequence
  source 1..1569: mol_type = other DNA
atgggccgggaggagctgttcctgaccttctccttcagcagcggcttccaggagagcaatgtgaagaccttctgcagcaagaacatcctggccatcctgggcttcagcagcatcatcgccgtcatcgccctgctggccgtgggcctgacccagaacaaggccctgcctgaaaatgtgaagtatggaattgtgctggatgctggcagcagccacaccagcctgtacatctacaagtggccagctgagaaggaaaatgacacaggagtggtgcaccaggtggaggagtgccgggtgaagggccctggcatcagcaagtttgtgcagaaggtgaatgaaattggcatctacctgacagactgcatggagcgggcccgggaggtgatccccaggagccagcaccaggagacccctgtgtacctgggcgccacagctggcatgaggctgctgaggatggagagcgaggagctggccgacagagtgctggatgtggtggagaggagcctgagcaactacccctttgacttccagggcgcccgcatcatcaccggccaggaggagggcgcctacggctggatcaccatcaactacctgctgggcaagttcagccagaagacccgctggttcagcatcgtgccctatgagaccaacaaccaggagacctttggagccctggacctgggcggggccagcacccaggtgacctttgtgccccagaaccagaccatcgagagcccagacaatgccctgcagttccggctgtatggcaaggactacaacgtgtacacccacagcttcctgtgctacggcaaggaccaggccctgtggcagaagctggccaaggacatccaggtggccagcaatgagatcctgcgggacccctgcttccaccctggctacaagaaggtggtgaatgtgtctgacctgtacaagaccccctgcaccaagagatttgagatgaccctgcccttccagcagtttgagatccagggcatcggcaactaccagcagtgccaccagagcatcctggagctgttcaacaccagctactgcccctacagccagtgtgccttcaacggcatcttcctgccccccctgcagggcgactttggagccttcagcgccttctactttgtgatgaagttcctgaacctgaccagcgagaaggtgtcccaggagaaggtgacagagatgatgaagaagttctgtgcccagccctgggaggagatcaagaccagctatgctggggtgaaggagaagtacctgtctgagtactgcttcagcggcacctacatcctgagcctgctgctgcagggctaccacttcaccgctgacagctgggagcacatccacttcatcggcaagatccagggcagtgatgctggctggaccctgggctacatgctgaacctgaccaacatgatcccagctgagcagcccctgagcacccccctgagccacagcacctacgtgttcctgatggtgctcttcagcctggtgctcttcaccgtggccatcatcggcctgctgatcttccacaagcccagctacttctggaaggacatggtgtag

SEQ ID NO: 150891 - DNA, 1554 bp, synthetic construct
  misc_feature 1..1554: note = Description of Artificial Sequence: Synthetic coding sequence
  source 1..1554: mol_type = other DNA
atgaagggcaccaaggacctgaccagccagcagaaggagagcaatgtgaagaccttctgcagcaagaacatcctggccatcctgggcttcagcagcatcatcgctgtgattgccctgctggccgtgggcctgacccagaacaaggccctgcctgaaaatgtgaagtatggcatcgtgctggatgctggcagcagccacaccagcctgtacatctacaagtggccagctgagaaggaaaatgacaccggggtggtgcaccaggtggaggagtgccgggtgaagggccctggcatcagcaagtttgtgcagaaggtgaatgagatcggcatctacctgacagactgcatggagcgggcccgggaggtgatccccaggagccagcaccaggagacccctgtgtacctgggcgccacagctggcatgaggctgctgaggatggagagcgaggagctggccgacagagtgctggatgtggtggagaggagcctgagcaactacccctttgacttccagggcgcccgcatcatcaccggccaggaggagggcgcctacggctggatcaccatcaactacctgctgggcaagttcagccagaagacccgctggttcagcatcgtgccctatgagaccaacaaccaggagaccttcggggccctggacctgggcggggccagcacccaggtgacctttgtgccccagaaccagaccatcgagagcccagacaatgccctgcagttccggctgtatggcaaggactacaacgtgtacacccacagcttcctgtgctacggcaaggaccaggccctgtggcagaagctggccaaggacatccaggtggccagcaatgagatcctgcgggacccctgcttccaccctggctacaagaaggtggtgaatgtgtctgacctgtacaagaccccctgcaccaagagatttgagatgaccctgcccttccagcagtttgagatccagggcatcggcaactaccagcagtgccaccagagcatcctggagctgttcaacaccagctactgcccctacagccagtgtgccttcaacggcatcttcctgccccccctgcagggcgactttggagccttcagcgccttctactttgtgatgaagttcctgaacctgaccagcgagaaggtgtcccaggagaaggtgacagagatgatgaagaagttctgtgcccagccctgggaggagatcaagaccagctatgccggcgtgaaggagaagtacctgtctgagtactgcttcagcggcacctacatcctgagcctgctgctgcagggctaccacttcaccgctgacagctgggagcacatccacttcatcggcaagatccagggcagtgatgctggctggaccctgggctacatgctgaacctgaccaacatgatcccagctgagcagcccctgagcacccccctgagccacagcacctacgtgttcctgatggtgctcttcagcctggtgctcttcaccgtggccatcatcggcctgctgatcttccacaagcccagctacttctggaaggacatggtgtag

SEQ ID NO: 150892 - DNA, 1119 bp, synthetic construct; identical to SEQ ID NO: 150887
  misc_feature 1..1119: note = Description of Artificial Sequence: Synthetic coding sequence
  source 1..1119: mol_type = other DNA

SEQ ID NO: 150893 - DNA, 1209 bp, synthetic construct
  misc_feature 1..1209: note = Description of Artificial Sequence: Synthetic coding sequence
  source 1..1209: mol_type = other DNA
atggagcgggcccgggaggtgatccccaggagccagcaccaggagacccctgtgtacctgggcgccacagctggcatgaggctgctgaggatggagagcgaggagctggccgacagagtgctggatgtggtggagaggagcctgagcaactacccctttgacttccagggcgcccgcatcatcaccggccaggaggagggcgcctacggctggatcaccatcaactacctgctgggcaagttcagccagaagacccgctggttcagcatcgtgccctatgagaccaacaaccaggagacctttggagccctggacctgggcggggccagcacccaggtgacctttgtgccccagaaccagaccatcgagagcccagacaatgccctgcagttccggctgtatggcaaggactacaacgtgtacacccacagcttcctgtgctacggcaaggaccaggccctgtggcagaagctggccaaggacatccaggtggccagcaatgagatcctgcgggacccctgcttccaccctggctacaagaaggtggtgaatgtgtctgacctgtacaagaccccctgcaccaagagatttgagatgaccctgcccttccagcagtttgagatccagggcatcggcaactaccagcagtgccaccagagcatcctggagctgttcaacaccagctactgcccctacagccagtgtgccttcaacggcatcttcctgccccccctgcagggcgactttggagccttcagcgccttctactttgtgatgaagttcctgaacctgaccagcgagaaggtgtcccaggagaaggtgacagagatgatgaagaagttctgtgcccagccctgggaggagatcaagaccagctatgctggggtgaaggagaagtacctgtctgagtactgcttcagcggcacctacatcctgagcctgctgctgcagggctaccacttcaccgctgacagctgggagcacatccacttcatcggcaagatccagggcagtgatgctggctggaccctgggctacatgctgaacctgaccaacatgatcccagctgagcagcccctgagcacccccctgagccacagcacctacgtgttcctgatggtgctcttcagcctggtgctcttcaccgtggccatcatcggcctgctgatcttccacaagcccagctacttctggaaggacatggtgtag

SEQ ID NO: 150894 - DNA, 1419 bp, synthetic construct
  misc_feature 1..1419: note = Description of Artificial Sequence: Synthetic coding sequence
  source 1..1419: mol_type = other DNA
atggccggcaaggtgcgcagcctgctgccccccctgctgctggccgctgctggcctggccggcctgctgctgctgtgtgtgcccaccagagatgtgcgggagcccccagccctgaagtatggcatcgtgctggatgctggcagcagccacacctccatgttcatctacaagtggccagctgacaaggaaaatgacaccggcatcgtgggccagcacagcagctgtgatgtgcctgggggcggcatcagcagctatgctgacaaccccagcggggccagccagagcctggtgggctgcctggagcaggccctgcaggatgtgcccaaggagagacatgctggcacccccctgtacctgggcgccacagctggcatgaggctgctgaacctgaccaaccctgaggccagcacctctgtgctgatggctgtgacccacaccctgacccagtacccctttgacttccggggggcccgcatcctgagcggccaggaggagggcgtgtttggctgggtgacagccaactacctgctggagaacttcatcaagtatggctgggtgggccgctggttccggcccaggaagggcaccctgggcgccatggacctgggcggggccagcacccagatcacctttgagaccaccagccctgctgaggaccgggccagcgaggtgcagctgcacctgtatggccagcactacagagtgtacacccacagcttcctgtgctacggccgggaccaggtgctgcagaggctgctggccagcgccctgcagacccacggcttccacccctgctggccccggggcttcagcacccaggtgctgctgggagatgtgtaccagagcccctgcaccatggcccagaggccccagaacttcaacagcagcgcccgggtgtccctgagcggcagcagtgacccccacctgtgccgggacctggtgtctggcctcttctccttcagcagctgccccttcagccgctgcagcttcaatggagtcttccagccccctgtggccggcaactttgtggccttcagcgccttcttctacacagtggacttcctgcggacctccatgggcctgcctgtggccaccctgcagcagctggaggccgctgctgtgaatgtgtgcaaccagacctgggcccagcagctgctgagccggggctacggctttgatgagcgggcctttggaggagtcatcttccagaagaaggctgctgacacagctgtgggctgggccctgggctacatgctgaacctgaccaacctgatcccagctgaccccccaggcctgaggaagggcacagacttcagctcctgggtggtgctgctgctgctgtttgccagcgccctgctggccgccctggtgctgctgctgcggcaggtgcacagcgccaagctgcccagcaccatctag

SEQ ID NO: 150895 - DNA, 1488 bp, synthetic construct
  misc_feature 1..1488: note = Description of Artificial Sequence: Synthetic coding sequence
  source 1..1488: mol_type = other DNA
atggccggcaaggtgcgcagcctgctgccccccctgctgctggccgctgctggcctggccggcctgctgctgctgtgtgtgcccaccagagatgtgcgggagcccccagccctgaagtatggcatcgtgctggatgctggcagcagccacacctccatgttcatctacaagtggccagctgacaaggaaaatgacaccggcatcgtgggccagcacagcagctgtgatgtgcctgggggcggcatcagcagctatgctgacaaccccagcggggccagccagagcctggtgggctgcctggagcaggccctgcaggatgtgcccaaggagagacatgctggcacccccctgtacctgggcgccacagctggcatgaggctgctgaacctgaccaaccctgaggccagcacctctgtgctgatggctgtgacccacaccctgacccagtacccctttgacttccggggggcccgcatcctgagcggccaggaggagggcgtgtttggctgggtgacagccaactacctgctggagaacttcatcaagtatggctgggtgggccgctggttccggcccaggaagggcaccctgggcgccatggacctgggcggggccagcacccagatcacctttgagaccaccagccctgctgaggaccgggccagcgaggtgcagctgcacctgtatggccagcactacagagtgtacacccacagcttcctgtgctacggccgggaccaggtgctgcagaggctgctggccagcgccctgcagacccacggcttccacccctgctggccccggggcttcagcacccaggtgctgctgggagatgtgtaccagagcccctgcaccatggcccagaggccccagaacttcaacagcagcgcccgggtgtccctgagcggcagcagtgacccccacctgtgccgggacctggtgtctggcctcttctccttcagcagctgccccttcagccgctgcagcttcaatggagtcttccagccccctgtggccggcaactttgtggccttcagcgccttcttctacacagtggacttcctgcggacctccatgggcctgcctgtggccaccctgcagcagctggaggccgctgctgtgaatgtgtgcaaccagacctgggcccagctgcaggcccgggtgcccggccagagggcccggctggccgactactgtgccggggccatgtttgtgcagcagctgctgagccggggctacggctttgatgagcgggccttcggcggcgtcatcttccagaagaaggctgctgacacagctgtgggctgggccctgggctacatgctgaacctgaccaacctgatcccagctgaccccccaggcctgaggaaaggaacagacttcagctcctgggtggtgctgctgctgctgtttgccagcgccctgctggccgccctggtgctgctgctgcggcaggtgcacagcgccaagctgcccagcaccatctag

SEQ ID NO: 150896 - DNA, 1590 bp, synthetic construct
  misc_feature 1..1590: note = Description of Artificial Sequence: Synthetic coding sequence
  source 1..1590: mol_type = other DNA
atgttcaccgtgctgacccggcagccctgtgagcaggccggcctgaaggccctgtaccgcacccccaccatcatcgccctggtggtgctgctggtgtccatcgtggtgctggtgtccatcaccgtcatccagatccacaagcaggaggtgctgcccccaggcctgaagtatggaattgtgctggatgctggcagcagcaggaccaccgtgtatgtgtaccagtggccagctgagaaggagaacaacacaggagtggtgtcccagaccttcaagtgcagcgtgaagggcagcggcatcagcagctatggcaacaacccccaggatgtgccccgggcctttgaggagtgcatgcagaaggtgaagggccaggtgcccagccacctgcacggcagcacccccatccacctgggcgccacagctggcatgaggctgctgcggctgcagaatgaaacagctgccaatgaggtgctggagagcatccagagctacttcaagagccagccctttgacttccggggggcccagatcatcagcggccaggaggagggcgtgtatggctggatcacagccaactacctgatgggcaacttcctggagaagaacctgtggcacatgtgggtgcacccccacggcgtggagaccactggagccctggacctgggcggggccagcacccagatcagctttgtggccggggagaagatggacctgaacaccagtgacatcatgcaggtgtccctgtatggctacgtgtacaccctgtacacccacagcttccagtgctacggcagaaatgaagctgagaagaagttcctggccatgctgctgcagaacagccccaccaagaaccacctgaccaacccctgctacccccgggactacagcatctccttcaccatgggccacgtgtttgacagcctgtgcaccgtggaccagaggcctgagagctacaaccccaatgatgtgatcacctttgagggcaccggggaccccagcctgtgcaaggagaaggtggccagcatctttgacttcaaggcctgccacgaccaggagacctgcagctttgatggagtgtaccagcccaagatcaagggcccctttgtggcctttgctggcttctactacacagccagcgccctgaacctgagcggcagcttcagcctggacaccttcaacagcagcacctggaacttctgcagccagaactggagccagctgcccctgctgctgcccaagtttgatgaggtgtatgcccggagctactgcttcagcgccaactacatctaccacctgtttgtgaatggctacaagttcacagaggagacctggccccagatccactttgagaaggaggtgggcaacagcagcatcgcctggagcctgggctacatgctgagcctgaccaaccagatcccagctgagagccccctcatccggctgcccatcgagccccctgtgtttgtgggcaccctggccttcttcaccgctgctgccctgctgtgcctggccttcctggcctacctgtgcagcgccaccaggaggaagaggcacagcgagcacgcctttgaccatgctgtggacagcgactag

SEQ ID NO: 150897 - DNA, 1590 bp, synthetic construct; identical to SEQ ID NO: 150896
  misc_feature 1..1590: note = Description of Artificial Sequence: Synthetic coding sequence
  source 1..1590: mol_type = other DNA

SEQ ID NO: 150898 - DNA, 1287 bp, synthetic construct
  misc_feature 1..1287: note = Description of Artificial Sequence: Synthetic coding sequence
  source 1..1287: mol_type = other DNA
atggccacctcctggggcaccgtcttcttcatgctggtggtgtcctgtgtgtgcagcgctgtgagccacaggaaccagcagacctggtttgagggcatcttcctgagctccatgtgccccatcaacgtgtctgccagcaccctgtatggcatcatgtttgatgctggcagcacaggcacccgcatccacgtgtacacctttgtgcagaagatgcctggccagctgcccatcctggagggggaggtgtttgattctgtgaagccaggcctgagcgcctttgtggaccagcccaagcagggcgctgagaccgtgcagggcctgctggaggtggccaaggacagcatccccaggagccactggaagaagacccctgtggtgctgaaggccacagctggcctgcggctgctgcctgagcacaaggccaaggccctgctgtttgaggtgaaggagatcttcaggaagagccccttcctggtgcccaagggctctgtgtccatcatggatggcagtgatgagggcatcctggcctgggtgacagtgaacttcctgaccggccagctgcacggccaccggcaggagaccgtgggcaccctggacctgggcggggccagcacccagatcaccttcctgccccagtttgagaagaccctggagcagaccccccggggctacctgaccagctttgagatgttcaacagcacctacaagctgtacacccacagctacctgggcttcggcctgaaggccgcccggctggccaccctgggcgccctggagacagagggcacagatggccacaccttccgcagcgcctgcctgccccgctggctggaggccgagtggatctttggaggagtgaagtaccagtatggaggcaaccaggagggggaggtgggctttgagccctgctacgccgaggtgctgcgggtggtgcggggcaagctgcaccagcctgaggaggtgcagaggggcagcttctacgccttctcctactactatgacagagctgtggacacagacatgattgattatgagaagggcggcatcctgaaggtggaggactttgagaggaaggcccgggaggtgtgtgacaacctggagaacttcaccagcggcagccccttcctgtgcatggacctgagctacatcacagccctgctgaaggatggctttggatttgctgacagcacagtgctgcagctgaccaagaaggtgaacaacatcgagaccggctgggccctgggcgccaccttccacctgctgcagagcctgggcatcagccactag

SEQ ID NO: 150899 - DNA, 1404 bp, synthetic construct
  misc_feature 1..1404: note = Description of Artificial Sequence: Synthetic coding sequence
  source 1..1404: mol_type = other DNA
atgcagccccagcacggcccctggcagaccaggatgaggaagatcagcaaccacggcagcctgcgggtggccaaggtggcctaccccctgggcctgtgtgtgggcgtcttcatctacgtggcctacatcaagtggcaccgggccacagccacccaggccttcttcagcatcacccgggccgcccctggggcccgctggggccagcaggcccacagccccctgggcacagctgctgatggccacgaggtgttctacggcatcatgtttgatgctggcagcacaggcaccagggtgcacgtgttccagttcacccggcccccccgggagacccccaccctgacccatgagaccttcaaggccctgaagccaggcctgagcgcctatgcagatgatgtggagaagagcgcccagggcatccgggagctgctggatgtggccaagcaggacatcccctttgacttctggaaggccacccccctggtgctgaaggccacagctggcctgcggctgctgcccggggagaaggcccagaagctgctgcagaaggtgaagaaggtgttcaaggccagccccttcctggtgggagatgactgtgtgtccatcatgaatggaacagatgagggcgtgtctgcctggatcaccatcaacttcctgaccggcagcctgaagaccccaggcggcagctctgtgggcatgctggacctgggcggcggcagcacccagatcgccttcctgccccgggtggagggcaccctgcaggccagccccccaggctacctgacagccctgaggatgttcaacagaacctacaagctgtacagctacagctacctgggcctgggcctgatgtctgcccggctggccatcctgggcggcgtggagggccagcctgccaaggatggcaaggagctggtgagcccctgcctgagccccagcttcaagggggagtgggagcacgccgaggtgacctacagagtgtctggccagaaggccgccgccagcctgcacgagctgtgtgccgcccgggtgtctgaggtgctgcagaacagagtgcacaggacagaggaggtgaagcacgtggacttctacgccttctcctactactatgacctggccgccggcgtgggcctgattgatgctgagaagggcggcagcctggtggtgggggactttgaaattgctgccaagtatgtgtgcaggaccctggagacccagccccagagcagccccttcagctgcatggacctgacctacgtgtccctgctgctgcaggagtttggcttccccaggagcaaggtgctgaagctgaccaggaagattgacaacgtggagacctcctgggccctgggcgccatcttccactacatcgacagcctgaaccggcagaagagccctgccagctag

SEQ ID NO: 150900 - DNA, 1452 bp, synthetic construct
  misc_feature 1..1452: note = Description of Artificial Sequence: Synthetic coding sequence
  source 1..1452: mol_type = other DNA
atgaagaagggcatccgctatgagaccagcaggaagaccagctacatcttccagccccagcacggcccctggcagaccaggatgaggaagatcagcaaccacggcagcctgcgggtggccaaggtggcctaccccctgggcctgtgtgtgggcgtcttcatctacgtggcctacatcaagtggcaccgggccacagccacccaggccttcttcagcatcacccgggccgcccctggggcccgctggggccagcaggcccacagccccctgggcacagctgctgatggccacgaggtgttctacggcatcatgtttgatgctggcagcacaggcaccagggtgcacgtgttccagttcacccggcccccccgggagacccccaccctgacccatgagaccttcaaggccctgaagccaggcctgagcgcctatgcagatgatgtggagaagagcgcccagggcatccgggagctgctggatgtggccaagcaggacatcccctttgacttctggaaggccacccccctggtgctgaaggccacagctggcctgcggctgctgcccggggagaaggcccagaagctgctgcagaaggtgaagaaggtgttcaaggccagccccttcctggtgggagatgactgtgtgtccatcatgaatggaacagatgagggcgtgtctgcctggatcaccatcaacttcctgaccggcagcctgaagaccccaggcggcagctctgtgggcatgctggacctgggcggcggcagcacccagatcgccttcctgccccgggtggagggcaccctgcaggccagccccccaggctacctgacagccctgaggatgttcaacagaacctacaagctgtacagctacagctacctgggcctgggcctgatgtctgcccggctggccatcctgggcggcgtggagggccagcctgccaaggatggcaaggagctggtgagcccctgcctgagccccagcttcaagggggagtgggagcacgccgaggtgacctacagagtgtctggccagaaggccgccgccagcctgcacgagctgtgtgccgcccgggtgtctgaggtgctgcagaacagagtgcacaggacagaggaggtgaagcacgtggacttctacgccttctcctactactatgacctggccgccggcgtgggcctgattgatgctgagaagggcggcagcctggtggtgggggactttgaaattgctgccaagtatgtgtgcaggaccctggagacccagccccagagcagccccttcagctgcatggacctgacctacgtgtccctgctgctgcaggagtttggcttccccaggagcaaggtgctgaagctgaccaggaagattgacaacgtggagacctcctgggccctgggcgccatcttccactacatcgacagcctgaaccggcagaagagccctgccagctag

SEQ ID NO: 150901 - DNA, 1104 bp, synthetic construct
  misc_feature 1..1104: note = Description of Artificial Sequence: Synthetic coding sequence
  source 1..1104: mol_type = other DNA
atgtttgatgctggcagcacaggcaccagggtgcacgtgttccagttcaccaggcctccccgggagacccccaccctgacccatgagaccttcaaggccctgaagccaggcctgagcgcctatgcagatgatgtggagaagagcgcccagggcatccgggagctgctggatgtggccaagcaggacatcccctttgacttctggaaggccacccccctggtgctgaaggccacagctggcctgcggctgctgcctggagagaaggcccagaagctgctgcagaaggtgaagaaggtgttcaaggccagccccttcctggtgggagatgactgtgtgtccatcatgaatggaacagatgaaggagtgtctgcctggatcaccatcaacttcctgaccggcagcctgaagacccctgggggcagctctgtgggcatgctggacctgggcggcggcagcacccagatcgccttcctgccccgggtggagggcaccctgcaggccagccccccaggctacctgacagccctgaggatgttcaacagaacctacaagctgtacagctacagctacctgggcctgggcctgatgtctgcccggctggccatcctgggcggcgtggagggccagcctgccaaggatggcaaggagctggtgagcccctgcctgagccccagcttcaagggggagtgggagcacgccgaggtgacctacagagtgtctggccagaaggctgctgccagcctgcacgagctgtgtgccgcccgggtgtctgaggtgctgcagaacagagtgcacaggacagaggaggtgaagcacgtggacttctacgccttctcctactactatgacctggccgccggcgtgggcctgattgatgctgagaagggcggcagcctggtggtgggggactttgaaattgctgccaagtatggaggcagccacctggagcgggagggcacctgcctgatccccagcgtgtctgaccccggggacacagctgctgagcagcccctgctgatgcacggcccccacctgcggcagcctgccaccccaggagtgcggctgagccaggagcagagcgctgaggcccacagcgagaactag

SEQ ID NO: 150902 - DNA, 1455 bp, synthetic construct
  misc_feature 1..1455: note = Description of Artificial Sequence: Synthetic coding sequence
  source 1..1455: mol_type = other DNA
atgaagaagggcatccgctatgagaccagcaggaagaccagctacatcttccagcagccccagcacggcccctggcagaccaggatgaggaagatcagcaaccacggcagcctgcgggtggccaaggtggcctaccccctgggcctgtgtgtgggcgtcttcatctacgtggcctacatcaagtggcaccgggccacagccacccaggccttcttcagcatcaccagggctgcccctggggcccgctggggccagcaggcccacagccccctgggcacagctgctgatggccacgaggtgttctacggcatcatgtttgatgctggcagcacaggcaccagggtgcacgtgttccagttcaccaggcctccccgggagacccccaccctgacccatgagaccttcaaggccctgaagccaggcctgagcgcctatgcagatgatgtggagaagagcgcccagggcatccgggagctgctggatgtggccaagcaggacatcccctttgacttctggaaggccacccccctggtgctgaaggccacagctggcctgcggctgctgcctggagagaaggcccagaagctgctgcagaaggtgaagaaggtgttcaaggccagccccttcctggtgggagatgactgtgtgtccatcatgaatggaacagatgaaggagtgtctgcctggatcaccatcaacttcctgaccggcagcctgaagacccctgggggcagctctgtgggcatgctggacctgggcggcggcagcacccagatcgccttcctgccccgggtggagggcaccctgcaggccagccccccaggctacctgacagccctgaggatgttcaacagaacctacaagctgtacagctacagctacctgggcctgggcctgatgtctgcccggctggccatcctgggcggcgtggagggccagcctgccaaggatggcaaggagctggtgagcccctgcctgagccccagcttcaagggggagtgggagcacgccgaggtgacctacagagtgtctggccagaaggctgctgccagcctgcacgagctgtgtgccgcccgggtgtctgaggtgctgcagaacagagtgcacaggacagaggaggtgaagcacgtggacttctacgccttctcctactactatgacctggccgccggcgtgggcctgattgatgctgagaagggcggcagcctggtggtgggggactttgaaattgctgccaagtatgtgtgcaggaccctggagacccagccccagagcagccccttcagctgcatggacctgacctacgtgtccctgctgctgcaggagtttggcttccccaggagcaaggtgctgaagctgaccaggaagattgacaacgtggagacctcctgggccctgggcgccatcttccactacatcgacagcctgaaccggcagaagagccctgccagctag

SEQ ID NO: 150903 - DNA, 888 bp, synthetic construct
  misc_feature 1..888: note = Description of Artificial Sequence: Synthetic coding sequence
  source 1..888: mol_type = other DNA
tgagtgctgaaggccacagctggcctgcggctgctgcctggagagaaggcccagaagctgctgcagaaggtgaagaaggtgttcaaggccagccccttcctggtgggagatgactgtgtgtccatcatgaatggaacagatgaaggagtgtctgcctggatcaccatcaacttcctgaccggcagcctgaagacccctgggggcagctctgtgggcatgctggacctgggcggcggcagcacccagatcgccttcctgccccgggtggagggcaccctgcaggccagccccccaggctacctgacagccctgaggatgttcaacagaacctacaagctgtacagctacagctacctgggcctgggcctgatgtctgcccggctggccatcctgggcggcgtggagggccagcctgccaaggatggcaaggagctggtgagcccctgcctgagccccagcttcaagggggagtgggagcacgccgaggtgacctacagagtgtctggccagaaggctgctgccagcctgcacgagctgtgtgccgcccgggtgtctgaggtgctgcagaacagagtgcacaggacagaggaggtgaagcacgtggacttctacgccttctcctactactatgacctggccgccggcgtgggcctgattgatgctgagaagggcggcagcctggtggtgggggactttgaaattgctgccaagtatggaggcagccacctggagcgggagggcacctgcctgatccccagcgtgtctgaccccggggacacagctgctgagcagcccctgctgatgcacggcccccacctgcggcagcctgccaccccaggagtgcggctgagccaggagcagagcgctgaggcccacagcgagaactag

SEQ ID NO: 150904 - DNA, 681 bp, synthetic construct
  misc_feature 1..681: note = Description of Artificial Sequence: Synthetic coding sequence
  source 1..681: mol_type = other DNA
atgccccagcacggcccctggcagaccaggatgaggaagatcagcaaccacggcagcctgcgggtggccaaggtggcctaccccctgggcctgtgtgtgggcgtcttcatctacgtggcctacatcaagtggcaccgggccacagccacccaggccttcttcagcatcaccagggctgcccctggggcccgctggggccagcaggcccacagccccctgggcacagctgctgatggccacgaggtgttctacggcatcatgtttgatgctggcagcacaggcaccagggtgcacgtgttccagttcaccaggcctccccgggagacccccaccctgacccatgagaccttcaaggccctgaagccaggcctgagcgcctatgcagatgatgtggagaaggtgaagaaggtgttcaaggccagccccttcctggtgggagatgactgtgtgtccatcatgaatggaacagatgaaggagtgtctgcctggatcaccatcaacttcctgaccggcagcctgaagacccctgggggcagctctgtgggcatgctggacctgggcggcggcagcacccagatcgccttcctgccccgggtggagggcaccctgcaggccagccccccaggctacctgacagccctgaggatgttcaacagaacctacaagctgtacagctactag

SEQ ID NO: 150905 - DNA, 588 bp, synthetic construct
  misc_feature 1..588: note = Description of Artificial Sequence: Synthetic coding sequence
  source 1..588: mol_type = other DNA
atgcagccccagcacggcccctggcagaccaggatgaggaagatcagcaaccacggcagcctgcgggtggccaaggtggcctaccccctgggcctgtgtgtgggcgtcttcatctacgtggcctacatcaagtggcaccgggccacagccacccaggccttcttcagcatcacccgggccgcccctggggcccgctggggccagcaggcccacagccccctgggcacagctgctgatggccacgaggtgttctacggcatcatgtttgatgctggcagcacaggcaccagggtgcacgtgttccagttcacccggcccccccgggagacccccaccctgacccatgagaccttcaaggccctgaagccaggcctgagcgcctatgcagatgatgtggagaaggtgaagaaggtgttcaaggccagccccttcctggtgggagatgactgtgtgtccatcatgaatggaacagatgagggcgtgtctgcctggatcaccatcaacttcctgaccggcagcctgaagaccccaggcggcagctctgtgggcatgctggacctgggcggcggcagcacccagatcgcctag

SEQ ID NO: 150906 - DNA, 903 bp, synthetic construct
  misc_feature 1..903: note = Description of Artificial Sequence: Synthetic coding sequence
  source 1..903: mol_type = other DNA
atgaagaagggcatccgctatgagaccagcaggaagaccagctacatcttccagcagccccagcacggcccctggcagaccaggatgaggaagatcagcaaccacggcagcctgcgggtggccaaggtggcctaccccctgggcctgtgtgtgggcgtcttcatctacgtggcctacatcaagtggcaccgggccacagccacccaggccttcttcagcatcaccagggctgcccctggggcccgctggggccagcaggcccacagccccctgggcacagctgctgatggccacgaggtgttctacggcatcatgtttgatgctggcagcacaggcaccagggtgcacgtgttccagttcaccaggcctccccgggagacccccaccctgacccatgagaccttcaaggccctgaagccaggcctgagcgcctatgcagatgatgtggagaaggtgaagaaggtgttcaaggccagccccttcctggtgggagatgactgtgtgtccatcatgaatggaacagatgaaggagtgtctgcctggatcaccatcaacttcctgaccggcagcctgaagacccctgggggcagctctgtgggcatgctggacctgggcggcggcagcacccagatcgccttcctgccccgggtggagggcaccctgcaggccagccccccaggctacctgacagccctgaggatgttcaacagaacctacaagctgtacagctacagctacctgggcctgggcctgatgtctgcccggctggccatcctgggcggcgtggagggccagcctgccaaggatggcaaggagctggtgagcccctgcctgagccccagcttcaagggggagtgggagcacgccgaggtgacctacagagtgtctggccagaaggcctag

SEQ ID NO: 150907 - DNA, 453 bp, synthetic construct
  misc_feature 1..453: note = Description of Artificial Sequence: Synthetic coding sequence
  source 1..453: mol_type = other DNA
tgaccaggccggggcagccccaaggaccggctgcccccagcccccaggaagagggccctggtgtctgtgggcgtggccgagagagctgtgcatgagacccccaccctgacccatgagaccttcaaggccctgaagccaggcctgagcgcctatgcagatgatgtggagaaggtgaagaaggtgttcaaggccagccccttcctggtgggagatgactgtgtgtccatcatgaatggaacagatgaaggagtgtctgcctggatcaccatcaacttcctgaccggcagcctgaagacccctgggggcagctctgtgggcatgctggacctgggcggcggcagcacccagatcgccttcctgccccgggtggagggcaccctgcaggccagccccccaggctacctgacagccctgaggatgttcaacagaacctacaagctgtacagctactag

SEQ ID NO: 150908 - DNA, 1314 bp, synthetic construct
  misc_feature 1..1314: note = Description of Artificial Sequence: Synthetic coding sequence
  source 1..1314: mol_type = other DNA
atgaagaagggcatccgctatgagaccagcaggaagaccagctacatcttccagcagccccagcacggcccctggcagaccaggatgaggaagatcagcaaccacggcagcctgcgggtggccaaggtggcctaccccctgggcctgtgtgtgggcgtcttcatctacgtggcctacatcaagtggcaccgggccacagccacccaggccttcttcagcatcaccagggctgcccctggggcccgctggggccagcaggcccacagccccctgggcacagctgctgatggccacgaggtgttctacggcatcatgtttgatgctggcagcacaggcaccagggtgcacgtgttccagttcaccaggcctccccgggagacccccaccctgacccatgagaccttcaaggccctgaagccaggcctgagcgcctatgcagatgatgtggagaagagcgcccagggcatccgggagctgctggatgtggccaagcaggacatcccctttgacttctggaaggccacccccctggtgctgaaggccacagctggcctgcggctgctgcctggagagaaggcccagaagctgctgcagaaggtgaagaaggtgttcaaggccagccccttcctggtgggagatgactgtgtgtccatcatgaatggaacagatgaaggagtgtctgcctggatcaccatcaacttcctgaccggcagcctgaagacccctgggggcagctctgtgggcatgctggacctgggcggcggcagcacccagatcgccttcctgccccgggtggagggcaccctgcaggccagccccccaggctacctgacagccctgaggatgttcaacagaacctacaagctgtacagctacagctacctgggcctgggcctgatgtctgcccggctggccatcctgggcggcgtggagggccagcctgctgccagcctgcacgagctgtgtgccgcccgggtgtctgaggtgctgcagaacagagtgcacaggacagaggaggtgaagcacgtggacttctacgccttctcctactactatgacctggccgccggcgtgggcctgattgatgctgagaagggcggcagcctggtggtgggggactttgaaattgctgccaagtatggaggcagccacctggagcgggagggcacctgcctgatccccagcgtgtctgaccccggggacacagctgctgagcagcccctgctgatgcacggcccccacctgcggcagcctgccaccccaggagtgcggctgagccaggagcagagcgctgaggcccacagcgagaactag

SEQ ID NO: 150909 - DNA, 945 bp, synthetic construct
  misc_feature 1..945: note = Description of Artificial Sequence: Synthetic coding sequence
  source 1..945: mol_type = other DNA
tgaaacagaggagtggtgtcccggggctggaggcctggctggaggaggcctggccggggcagccccaaggaccggctgcccccagcccccaggaagagggccctggtgtctgtgggcgtggccgagagagctgtgcatgagacccccaccctgacccatgagaccttcaaggccctgaagccaggcctgagcgcctatgcagatgatgtggagaagagcgcccagggcatccgggagctgctggatgtggccaagcaggacatcccctttgacttctggaaggccacccccctggtgctgaaggccacagctggcctgcggctgctgcccggggagaaggcccagaagctgctgcagaaggtgaagaaggtgttcaaggccagccccttcctggtgggagatgactgtgtgtccatcatgaatggaacagatgagggcgtgtctgcctggatcaccatcaacttcctgaccggcagcctgaagaccccaggcggcagctctgtgggcatgctggacctgggcggcggcagcacccagatcgccttcctgccccgggtggagggcaccctgcaggccagccccccaggctacctgacagccctgaggatgttcaacagaacctacaagctgtacagctacagctacctgggcctgggcctgatgtctgcccggctggccatcctgggcggcgtggagggccagcctgccaaggatggcaaggagctggtgagcccctgcctgagccccagcttcaagggggagtgggagcacgccgaggtgacctacagagtgtctggccagaaggccgccgccagcctgcacgagctgtgtgccgcccgggtgtctgaggtgctgcagaacagagtgcacaggacagaggaggtgaagcacgtggacttctacgccttctcctactactatgacctggccgccggcgtgggctag

SEQ ID NO: 150910 - DNA, 567 bp, synthetic construct
  misc_feature 1..567: note = Description of Artificial Sequence: Synthetic coding sequence
  source 1..567: mol_type = other DNA
atgaagaagggcatccgctatgagaccagcaggaagaccagctacatcttccagccccagcacggcccctggcagaccaggatgaggaagatcagcaaccacggcagcctgcgggtggccaaggtggcctaccccctgggcctgtgtgtgggcgtcttcatctacgtggcctacatcaagtggcaccgggccacagccacccaggccttcttcagcatcacccgggccgcccctggggcccgctggggccagcaggcccacagccccctgggcacagctgctgatggccacgaggtgttctacggcatcatgtttgatgctggcagcacaggcaccagggtgcacgtgttccagttcacccggcccccccgggagacccccaccctgacccatgagaccttcaaggccctgaagccaggcctgagcgcctatgcagatgatgtggagaagagcgcccagggcatccgggagctgctggatgtggccaagcaggacatcccctttgacttctggaaggccacccccctggtgctgaaggccacagctggcctgcggctgctgccctag

SEQ ID NO: 150911 - DNA, 891 bp, synthetic construct
  misc_feature 1..891: note = Description of Artificial Sequence: Synthetic coding sequence
  source 1..891: mol_type = other DNA
atgccccagcacggcccctggcagaccaggatgaggaagatcagcaaccacggcagcctgcgggtggccaaggtggcctaccccctgggcctgtgtgtgggcgtcttcatctacgtggcctacatcaagtggcaccgggccacagccacccaggccttcttcagcatcaccagggctgcccctggggcccgctggggccagcaggcccacagccccctgggcacagctgctgatggccacgaggtgttctacggcatcatgtttgatgctggcagcacaggcaccagggtgcacgtgttccagttcaccaggcctccccgggagacccccaccctgacccatgagaccttcaaggccctgaagccaggcctgagcgcctatgcagatgatgtggagaagagcgcccagggcatccgggagctgctggatgtggccaagcaggacatcccctttgacttctggaaggccacccccctggtgctgaaggccacagctggcctgcggctgctgcctggagagaaggcccagaagctgctgcagaaggtgaagaaggtgttcaaggccagccccttcctggtgggagatgactgtgtgtccatcatgaatggaacagatgaaggagtgtctgcctggatcaccatcaacttcctgaccggcagcctgaagacccctgggggcagctctgtgggcatgctggacctgggcggcggcagcacccagatcgccttcctgccccgggtggagggcaccctgcaggccagccccccaggctacctgacagccctgaggatgttcaacagaacctacaagctgtacagctacagctacctgggcctgggcctgatgtctgcccggctggccatcctgggcggcgtggagggccagccctag

SEQ ID NO: 150912 - DNA, 936 bp, synthetic construct
  misc_feature 1..936: note = Description of Artificial Sequence: Synthetic coding sequence
  source 1..936: mol_type = other DNA
tgaggaagcacaggcaccagggtgcacgtgttccagttcacccggcccccccgggagacccccaccctgacccatgagaccttcaaggccctgaagccaggcctgagcgcctatgcagatgatgtggagaagagcgcccagggcatccgggagctgctggatgtggccaagcaggacatcccctttgacttctggaaggccacccccctggtgctgaaggccacagctggcctgcggctgctgcccggggagaaggcccagaagctgctgcagaaggtgaagaaggtgttcaaggccagccccttcctggtgggagatgactgtgtgtccatcatgaatggaacagatgagggcgtgtctgcctggatcaccatcaacttcctgaccggcagcctgaagaccccaggcggcagctctgtgggcatgctggacctgggcggcggcagcacccagatcgccttcctgccccgggtggagggcaccctgcaggccagccccccaggctacctgacagccctgaggatgttcaacagaacctacaagctgtacagctacagctacctgggcctgggcctgatgtctgcccggctggccatcctgggcggcgtggagggccagcctgctgccagcctgcacgagctgtgtgccgcccgggtgtctgaggtgctgcagaacagagtgcacaggacagaggaggtgaagcacgtggacttctacgccttctcctactactatgacctggccgccggcgtgggcctgattgatgctgagaagggcggcagcctggtggtgggggactttgaaattgctgccaagtatgtgtgcaggaccctggagacccagccccagagcagccccttcagctgcatggacctgacctacgtgtccctgctgctgcaggagtttggcttccccaggagcaaggtgctgaagtag

SEQ ID NO: 150913 - DNA, 942 bp, synthetic construct
  misc_feature 1..942: note = Description of Artificial Sequence: Synthetic coding sequence
  source 1..942: mol_type = other DNA
aacagaggagtggtgtcccggggctggaggcctggctggaggcggcccggccggggcagccccaaggaccggctgcccccagcccccaggaagagggccctggtgtctgtgggcgtggccgagagagctgtgcatgagacccccaccctgacccatgagaccttcaaggccctgaagccaggcctgagcgcctatgcagatgatgtggagaagagcgcccagggcatccgggagctgctggatgtggccaagcaggacatcccctttgacttctggaaggccacccccctggtgctgaaggccacagctggcctgcggctgctgcctggagagaaggcccagaagctgctgcagaaggtgaagaaggtgttcaaggccagccccttcctggtgggagatgactgtgtgtccatcatgaatggaacagatgaaggagtgtctgcctggatcaccatcaacttcctgaccggcagcctgaagacccctgggggcagctctgtgggcatgctggacctgggcggcggcagcacccagatcgccttcctgccccgggtggagggcaccctgcaggccagccccccaggctacctgacagccctgaggatgttcaacagaacctacaagctgtacagctacagctacctgggcctgggcctgatgtctgcccggctggccatcctgggcggcgtggagggccagcctgccaaggatggcaaggagctggtgagcccctgcctgagccccagcttcaagggggagtgggagcacgccgaggtgacctacagagtgtctggccagaaggctgctgccagcctgcacgagctgtgtgccgcccgggtgtctgaggtgctgcagaacagagtgcacaggacagaggaggtgaagcacgtggacttctacgccttctcctactactatgacctggccgccggcgtgggctag

SEQ ID NO: 150914 - DNA, 2778 bp, synthetic construct
  misc_feature 1..2778: note = Description of Artificial Sequence: Synthetic coding sequence
  source 1..2778: mol_type = other DNA
atggagagagatggctgtgccggcggcggcagcagaggaggagagggcggccgggccccccgggagggccctgctggaaatggccgggaccggggccgcagccacgccgctgaggcccctggggacccccaggccgccgccagcctgctggcccccatggatgtgggggaggagcccctggagaaggccgcccgggccaggacagccaaggaccccaacacctacaaggtgctgagcctggtgctgtctgtgtgtgtgctgaccaccatcctgggctgcatcttcggcctgaagcccagctgtgccaaggaggtgaagagctgcaagggccgctgctttgagaggacctttggaaactgccgctgtgatgctgcctgtgtggagctgggcaactgctgcctggactaccaggagacctgcatcgagcctgagcacatctggacctgcaacaagttccgctgtggggagaagaggctgaccaggagcctgtgtgcctgcagtgatgactgcaaggacaagggggactgctgcatcaactacagctctgtgtgccagggcgagaagtcctgggtggaggagccctgtgagagcatcaatgagccccagtgcccagctggctttgagaccccacccaccctgctcttcagcctggatggcttccgggcagagtacctgcacacctggggcggcctgctgcctgtgatcagcaagctgaagaagtgtggcacctacaccaagaacatgaggcctgtgtaccccaccaagaccttccccaaccactacagcatcgtgacaggcctgtacccagagagccacggcatcatcgacaacaagatgtatgaccccaagatgaatgccagcttcagcctgaagagcaaggagaagttcaaccctgagtggtacaagggggagcccatctgggtgacagccaagtaccagggcctgaagagcggcaccttcttctggccaggcagtgatgtggagatcaatggcatcttcccagacatctacaagatgtacaatggatctgtgccctttgaggagcgcatcctggccgtgctgcagtggctgcagctgcccaaggatgagcggccccacttctacaccctgtacctggaggagccagacagcagcggccacagctatggccctgtgtcctctgaggtgatcaaggccctgcagagggtggatggcatggtgggcatgctgatggatggcctgaaggagctgaacctgcaccgctgcctgaacctgatcctgatcagtgaccacggcatggagcagggcagctgcaagaagtacatctacctgaacaagtacctgggagatgtgaagaacatcaaggtgatctacggccctgctgcccggctgcggcccagtgatgtgcctgacaagtactacagcttcaactatgagggcatcgccaggaacctgagctgccgggagcccaaccagcacttcaagccctacctgaagcacttcctgcccaagaggctgcactttgccaagagtgacagaattgagcccctgaccttctacctggacccccagtggcagctggccctgaaccccagcgagaggaagtactgcggcagcggcttccacggcagtgacaacgtgttcagcaacatgcaggccctgtttgtgggctacggccctggcttcaagcatggaattgaagctgacacctttgaaaatattgaggtgtacaacctgatgtgtgacctgctgaacctgaccccagcccccaacaacggcacccacggcagcctgaaccacctgctgaagaaccctgtgtacacccccaagcaccccaaggaggtgcaccccctggtgcagtgccccttcaccaggaacccccgggacaacctgggctgcagctgcaaccccagcatcctgcccatcgaggacttccagacccagttcaacctgactgtggccgaggagaagatcatcaagcatgagaccctgccctacggccggccccgggtgctgcagaaggagaacaccatctgcctgctgagccagcaccagttcatgagcggctacagccaggacatcctgatgcccctgtggaccagctacacagtggacagaaatgacagcttcagcacagaggacttcagcaactgcctgtaccaggacttccgcatccccctgagccctgtgcacaagtgcagcttctacaagaacaacaccaaggtgtcctatggcttcctgagccccccccagctgaacaagaacagcagcggcatctacagcgaggccctgctgaccaccaacatcgtgcccatgtaccagagcttccaggtgatctggagatacttccatgacaccctgctgaggaaatatgcagaggagagaaatggagtgaatgtggtgtctggccctgtgtttgattttgattatgatggccgctgtgacagcctggagaacctgcggcagaagagaagagtcatccggaaccaggagatcctgatccccacccacttcttcatcgtgctgaccagctgcaaggacaccagccagacccccctgcactgtgagaacctggacaccctggccttcatcctgccccacaggacagacaacagcgagagctgtgtgcacggcaagcatgacagctcctgggtggaggagctgctgatgctgcaccgggcccgcatcacagatgtggagcacatcaccggcctgtccttctaccagcagaggaaggagcctgtgtctgacatcctgaagctgaagacccacctgcccaccttcagccaggaggactag

SEQ ID NO: 150915 - DNA, 2592 bp, synthetic construct
  misc_feature 1..2592: note = Description of Artificial Sequence: Synthetic coding sequence
  source 1..2592: mol_type = other DNA
atggcccggcgcagcagcttccagagctgccagatcatcagcctcttcacctttgctgtgggcgtgaacatctgcctgggcttcaccgcccaccgcatcaagagagctgagggctgggaggagggccccccaacagtgctgagtgacagcccctggaccaacatcagcggcagctgcaagggccgctgctttgagctgcaggaggccggccccccagactgccgctgtgacaacctgtgcaagagctacaccagctgctgccacgactttgatgagctgtgcctgaagacagcccggggctgggagtgcaccaaggacagatgtggggaggtgagaaatgaagaaaatgcctgccactgcagcgaggactgcctggcccggggggactgctgcaccaactaccaggtggtgtgcaagggggagagccactgggtggatgatgactgtgaggagatcaaggctgctgagtgcccagctggctttgtgcggcccccactcatcatcttctctgtggatggcttccgggccagctacatgaagaagggcagcaaggtgatgcccaacatcgagaagctgcggagctgtggcacccacagcccctacatgaggcctgtgtaccccaccaagaccttccccaacctgtacaccctggccaccggcctgtacccagagagccacggcatcgtgggcaacagcatgtatgaccctgtgtttgatgccaccttccacctgcggggccgggagaagttcaaccaccgctggtggggcggccagcccctgtggatcacagccaccaagcagggcgtgaaggccggcaccttcttctggagcgtggtgatcccccatgagcggcgcatcctgaccatcctgcagtggctgaccctgcctgaccacgagcggcccagcgtgtatgccttctacagcgagcagcctgacttcagcggccacaagtatggcccctttggacctgagatgaccaaccccctgcgggagattgacaagatcgtgggccagctgatggatggcctgaagcagctgaagctgcaccgctgtgtgaatgtcatctttgtgggggaccacggcatggaggatgtgacctgtgacagaacagagttcctgagcaactacctgaccaacgtggatgacatcaccctggtgcccggcaccctgggccgcatccgcagcaagttcagcaacaatgccaagtatgaccccaaggccatcatcgccaacctgacctgcaagaagccagaccagcacttcaagccctacctgaagcagcacctgcccaagaggctgcactacgccaacaacagaagaattgaggacatccacctgctggtggagcggcgctggcacgtggccaggaagcccctggatgtgtacaagaagcccagcggcaagtgcttcttccagggcgaccacggctttgacaacaaggtgaacagcatgcagacagtgtttgtgggctacggcagcaccttcaagtacaagaccaaggtgcccccatttgaaaatattgagctgtacaacgtgatgtgtgacctgctgggcctgaagccagcccccaacaacggcacccacggcagcctgaaccacctgctgcggaccaacaccttccggcccaccatgcctgaggaggtgacccggcccaactacccaggcatcatgtacctgcagagcgactttgacctgggctgcacctgtgatgacaaggtggagcccaagaacaagctggatgagctgaacaagaggctgcacaccaagggcagcacagaggagcggcacctgctgtatggccggcctgctgtgctgtaccgcaccaggtatgacatcctgtaccacacagactttgagagcggctacagcgagatcttcctgatgcccctgtggaccagctacacagtgtccaagcaggccgaggtgtcctctgtgcctgaccacctgaccagctgtgtgcggccagatgtgcgggtgagccccagcttcagccagaactgcctggcctacaagaatgacaagcagatgtcctatggcttcctgtttcctccctacctgagcagcagccctgaggccaagtatgatgccttcctggtgaccaacatggtgcccatgtacccagccttcaagagggtgtggaactacttccagagggtgctggtgaagaagtatgccagcgagagaaatggagtgaatgtcatcagcggccccatctttgattatgactatgatggcctgcatgacacagaggacaagatcaagcagtatgtggagggcagcagcatccctgtgcccacccactactacagcatcatcaccagctgcctggacttcacccagcctgctgacaagtgtgatggccccctgtctgtgtcctccttcatcctgccccacaggccagacaatgaggagagctgcaacagcagtgaagatgagagcaagtgggtggaggagctgatgaagatgcacacagcccgggtgcgggacatcgagcacctgaccagcctggacttcttcaggaagaccagccgcagctacccagagatcctgaccctgaagacctacctgcacacctatgaaagtgagatctag

SEQ ID NO: 150916 - DNA, 2748 bp, synthetic construct
  misc_feature 1..2748: note = Description of Artificial Sequence: Synthetic coding sequence
  source 1..2748: mol_type = other DNA
atggcccggcgcagcagcttccagagctgccagatcatcagcctcttcacctttgctgtgggcgtgaacatctgcctgggcttcaccgcccaccgcatcaagagagctgagggctgggaggagggccccccaacagtgctgagtgacagcccctggaccaacatcagcggcagctgcaagggccgctgctttgagctgcaggaggccggccccccagactgccgctgtgacaacctgtgcaagagctacaccagctgctgccacgactttgatgagctgtgcctgaagacagcccggggctgggagtgcaccaaggacagatgtggggaggtgagaaatgaagaaaatgcctgccactgcagcgaggactgcctggcccggggggactgctgcaccaactaccaggtggtgtgcaagggggagagccactgggtggatgatgactgtgaggagatcaaggctgctgagtgcccagctggctttgtgcggcccccactcatcatcttctctgtggatggcttccgggccagctacatgaagaagggcagcaaggtgatgcccaacatcgagaagctgcggagctgtggcacccacagcccctacatgaggcctgtgtaccccaccaagaccttccccaacctgtacaccctggccaccggcctgtacccagagagccacggcatcgtgggcaacagcatgtatgaccctgtgtttgatgccaccttccacctgcggggccgggagaagttcaaccaccgctggtggggcggccagcccctgtggatcacagccaccaagcagggcgtgaaggccggcaccttcttctggagcgtggtgatcccccatgagcggcgcatcctgaccatcctgcagtggctgaccctgcctgaccacgagcggcccagcgtgtatgccttctacagcgagcagcctgacttcagcggccacaagtatggcccctttggacctgaggagagcagctatggcagccccttcaccccagccaagaggcccaagaggaaggtggcccccaagaggcggcaggagaggcctgtggccccacccaagaagagaagaaggaagatccacaggatggaccactatgctgctgagacccggcaggacaagatgaccaaccccctgcgggagattgacaagatcgtgggccagctgatggatggcctgaagcagctgaagctgcaccgctgtgtgaatgtcatctttgtgggggaccacggcatggaggatgtgacctgtgacagaacagagttcctgagcaactacctgaccaacgtggatgacatcaccctggtgcccggcaccctgggccgcatccgcagcaagttcagcaacaatgccaagtatgaccccaaggccatcatcgccaacctgacctgcaagaagccagaccagcacttcaagccctacctgaagcagcacctgcccaagaggctgcactacgccaacaacagaagaattgaggacatccacctgctggtggagcggcgctggcacgtggccaggaagcccctggatgtgtacaagaagcccagcggcaagtgcttcttccagggcgaccacggctttgacaacaaggtgaacagcatgcagacagtgtttgtgggctacggcagcaccttcaagtacaagaccaaggtgcccccatttgaaaatattgagctgtacaacgtgatgtgtgacctgctgggcctgaagccagcccccaacaacggcacccacggcagcctgaaccacctgctgcggaccaacaccttccggcccaccatgcctgaggaggtgacccggcccaactacccaggcatcatgtacctgcagagcgactttgacctgggctgcacctgtgatgacaaggtggagcccaagaacaagctggatgagctgaacaagaggctgcacaccaagggcagcacagaggagcggcacctgctgtatggccggcctgctgtgctgtaccgcaccaggtatgacatcctgtaccacacagactttgagagcggctacagcgagatcttcctgatgcccctgtggaccagctacacagtgtccaagcaggccgaggtgtcctctgtgcctgaccacctgaccagctgtgtgcggccagatgtgcgggtgagccccagcttcagccagaactgcctggcctacaagaatgacaagcagatgtcctatggcttcctgtttcctccctacctgagcagcagccctgaggccaagtatgatgccttcctggtgaccaacatggtgcccatgtacccagccttcaagagggtgtggaactacttccagagggtgctggtgaagaagtatgccagcgagagaaatggagtgaatgtcatcagcggccccatctttgattatgactatgatggcctgcatgacacagaggacaagatcaagcagtatgtggagggcagcagcatccctgtgcccacccactactacagcatcatcaccagctgcctggacttcacccagcctgctgacaagtgtgatggccccctgtctgtgtcctccttcatcctgccccacaggccagacaatgaggagagctgcaacagcagtgaagatgagagcaagtgggtggaggagctgatgaagatgcacacagcccgggtgcgggacatcgagcacctgaccagcctggacttcttcaggaagaccagccgcagctacccagagatcctgaccctgaagacctacctgcacacctatgaaagtgagatctag

SEQ ID NO: 150917 - DNA, 2667 bp, synthetic construct
  misc_feature 1..2667: note = Description of Artificial Sequence: Synthetic coding sequence
  source 1..2667: mol_type = other DNA
atggcccggcgcagcagcttccagagctgccagatcatcagcctcttcacctttgctgtgggcgtgaacatctgcctgggcttcaccgcccaccgcatcaagagagctgagggctgggaggagggccccccaacagtgctgagtgacagcccctggaccaacatcagcggcagctgcaagggccgctgctttgagctgcaggaggccggccccccagactgccgctgtgacaacctgtgcaagagctacaccagctgctgccacgactttgatgagctgtgcctgaagacagcccggggctgggagtgcaccaaggacagatgtggggaggtgagaaatgaagaaaatgcctgccactgcagcgaggactgcctggcccggggggactgctgcaccaactaccaggtggtgtgcaagggggagagccactgggtggatgatgactgtgaggagatcaaggctgctgagtgcccagctggctttgtgcggcccccactcatcatcttctctgtggatggcttccgggccagctacatgaagaagggcagcaaggtgatgcccaacatcgagaagctgcggagctgtggcacccacagcccctacatgaggcctgtgtaccccaccaagaccttccccaacctgtacaccctggccaccggcctgtacccagagagccacggcatcgtgggcaacagcatgtatgaccctgtgtttgatgccaccttccacctgcggggccgggagaagttcaaccaccgctggtggggcggccagcccctgtggatcacagccaccaagcagggcgtgaaggccggcaccttcttctggagcgtggtgatcccccatgagcggcgcatcctgaccatcctgcagtggctgaccctgcctgaccacgagcggcccagcgtgtatgccttctacagcgagcagcctgacttcagcggccacaagtatggcccctttggacctgagatgaccaaccccctgcgggagattgacaagatcgtgggccagctgatggatggcctgaagcagctgaagctgcaccgctgtgtgaatgtcatctttgtgggggaccacggcatggaggatgtgacctgtgacagaacagagttcctgagcaactacctgaccaacgtggatgacatcaccctggtgcccggcaccctgggccgcatccgcagcaagttcagcaacaatgccaagtatgaccccaaggccatcatcgccaacctgacctgcaagaagccagaccagcacttcaagccctacctgaagcagcacctgcccaagaggctgcactacgccaacaacagaagaattgaggacatccacctgctggtggagcggcgctggcacgtggccaggaagcccctggatgtgtacaagaagcccagcggcaagtgcttcttccagggcgaccacggctttgacaacaaggtgaacagcatgcagacagtgtttgtgggctacggcagcaccttcaagtacaagaccaaggtgcccccatttgaaaatattgagctgtacaacgtgatgtgtgacctgctgggcctgaagccagcccccaacaacggcacccacggcagcctgaaccacctgctgcggaccaacaccttccggcccaccatgcctgaggaggtgacccggcccaactacccaggcatcatgtacctgcagagcgactttgacctgggctgcacctgtgatgacaaggtggagcccaagaacaagctggatgagctgaacaagaggctgcacaccaagggcagcacagaggccgagaccaggaagttccggggcagcagaaatgaaaacaaggagaacatcaatggaaactttgagcccaggaaggagcggcacctgctgtatggccggcctgctgtgctgtaccgcaccaggtatgacatcctgtaccacacagactttgaaagtggctacagcgagatcttcctgatgcccctgtggaccagctacacagtgtccaagcaggccgaggtgtcctctgtgcctgaccacctgaccagctgtgtgcggccagatgtgcgggtgagccccagcttcagccagaactgcctggcctacaagaatgacaagcagatgtcctatggcttcctgttccccccctacctgagcagcagccctgaggccaagtatgatgccttcctggtgaccaacatggtgcccatgtacccagccttcaagagggtgtggaactacttccagagggtgctggtgaagaagtatgccagcgagagaaatggagtgaatgtcatcagcggccccatctttgattatgactatgatggcctgcatgacacagaggacaagatcaagcagtatgtggagggcagcagcatccctgtgcccacccactactacagcatcatcaccagctgcctggacttcacccagcctgctgacaagtgtgatggccccctgtctgtgagcagcttcatcctgccccacaggccagacaatgaggagagctgcaacagcagtgaagatgagagcaagtgggtggaggagctgatgaagatgcacacagcccgggtgcgggacatcgagcacctgaccagcctggacttcttcaggaagaccagccgcagctacccagagatcctgaccctgaagacctacctgcacacctatgagagcgagatctag

SEQ ID NO: 150918 - DNA, 2628 bp, synthetic construct
  misc_feature 1..2628: note = Description of Artificial Sequence: Synthetic coding sequence
  source 1..2628: mol_type = other DNA
atggagagcaccctgaccctggccacagagcagcctgtgaagaagaacaccctgaagaagtacaagatcgcctgcatcgtgctgctggccctgctggtgatcatgagcctgggcctgggcctgggcctgggcctgaggaagctggagaagcagggcagctgcaggaagaagtgctttgatgccagcttccggggcctggagaactgccgctgtgatgtggcctgcaaggacagaggagactgctgctgggactttgaggacacctgtgtggagagcacccgcatctggatgtgcaacaagttccgctgtggggagacccggctggaggccagcctgtgcagctgcagtgatgactgcctgcagaggaaggactgctgtgccgactacaagtctgtgtgccagggcgagacctcctggctggaggagaactgtgacacagcccagcagagccagtgcccagagggctttgacctgccccctgtgatcctcttctccatggatggcttccgggcagagtacctgtacacctgggacaccctgatgcccaacatcaacaagctgaagacctgtggcatccacagcaagtacatgagggccatgtaccccaccaagaccttccccaaccactacaccatcgtgacaggcctgtacccagagagccacggcatcatcgacaacaacatgtatgatgtgaacctgaacaagaacttcagcctgagcagcaaggagcagaacaacccagcctggtggcacggccagcccatgtggctgacagccatgtaccagggcctgaaggccgccacctacttctggccaggcagcgaggtggccatcaatggcagcttccccagcatctacatgccctacaacggctctgtgccctttgaggagcgcatcagcaccctgctgaagtggctggacctgcccaaggccgagcggccccgcttctacaccatgtactttgaggagccagacagcagcggccacgccggcggccctgtgtctgcccgggtcatcaaggccctgcaggtggtggaccacgccttcggcatgctgatggagggcctgaagcagaggaacctgcacaactgtgtgaacatcatcctgctggccgaccacggcatggaccagacctactgcaacaagatggagtacatgacagactacttcccccgcatcaacttcttctacatgtatgagggccctgccccccgcatccgggcccacaacatcccccatgacttcttctccttcaacagcgaggagatcgtgaggaacctgagctgcaggaagccagaccagcacttcaagccctacctgaccccagacctgcccaagaggctgcactacgccaagaatgtgagaattgacaaggtgcacctgtttgtggaccagcagtggctggccgtgcgcagcaagagcaacaccaactgtggcggcggcaaccacggctacaacaatgagttccgctccatggaggccatcttcctggcccacggccccagcttcaaggagaagacagaggtggagccctttgaaaatattgaggtgtacaacctgatgtgtgacctgctgcgcatccagcctgcccccaacaacggcacccacggcagcctgaaccacctgctgaaggtgcccttctatgagcccagccatgctgaggaggtgtccaagttctctgtgtgtggctttgccaaccccctgcccacagagagcctggactgcttctgcccccacctgcagaacagcacccagctggagcaggtgaaccagatgctgaacctgacccaggaggagatcacagccaccgtgaaggtgaacctgcccttcggccggccccgggtgctgcagaagaatgtggaccactgcctgctgtaccaccgggagtatgtgtctggctttgggaaggccatgaggatgcccatgtggagcagctacacagtgccccagctgggggacaccagccccctgccccccaccgtgcctgactgcctgcgggcagatgtgcgggtgccccccagcgagagccagaagtgcagcttctacctggccgacaagaacatcacccacggcttcctgtaccccccagccagcaacagaacaagtgacagccagtatgatgccctgatcaccagcaacctggtgcccatgtatgaggagttcaggaagatgtgggactacttccacagcgtgctgctgatcaagcacgccacagaaagaaatggagtgaatgtggtgtctggccccatctttgactacaactatgatggccactttgatgccccagatgagatcaccaagcacctggccaacacagatgtgcccatccccacccactactttgtggtgctgaccagctgcaagaacaagagccacaccccagagaactgccccggctggctggatgtgctgcccttcatcatcccccaccggcccaccaacgtggagagctgcccagagggcaagccagaggccctgtgggtggaggagcgcttcaccgcccacatcgcccgggtgagagatgtggagctgctgaccggcctggacttctaccaggacaaggtgcagcctgtgtctgagatcctgcagctgaagacctacctgcccacctttgagaccaccatctag

SEQ ID NO: 150919 - DNA, 1992 bp, synthetic construct
  misc_feature 1..1992: note = Description of Artificial Sequence: Synthetic coding sequence
  source 1..1992: mol_type = other DNA
atggagagcaccctgaccctggccacagagcagcctgtgaagaagaacaccctgaagaagtacaagatcgcctgcatcgtgctgctggccctgctggtgatcatgagcctgggcctgggcctgggcctgggcctgaggaagctggagaagcagggcagctgcaggaagaagtgctttgatgccagcttccggggcctggagaactgccgctgtgatgtggcctgcaaggacagaggagactgctgctgggactttgaggacacctgtgtggagagcacccgcatctggatgtgcaacaagttccgctgtggggagacccggctggaggccagcctgtgcagctgcagtgatgactgcctgcagaggaaggactgctgtgccgactacaagtctgtgtgccagggcgagacctcctggctggaggagaactgtgacacagcccagcagagccagtgcccagagggctttgacctgccccctgtgatcctcttctccatggatggcttccgggcagagtacctgtacacctgggacaccctgatgcccaacatcaacaagctgaagacctgtggcatccacagcaagtacatgagggccatgtaccccaccaagaccttccccaaccactacaccatcgtgacaggcctgtacccagagagccacggcatcatcgacaacaacatgtatgatgtgaacctgaacaagaacttcagcctgagcagcaaggagcagaacaacccagcctggtggcacggccagcccatgtggctgacagccatgtaccagggcctgaaggccgccacctacttctggccaggcagcgaggtggccatcaatggcagcttccccagcatctacatgccctacaacggctctgtgccctttgaggagcgcatcagcaccctgctgaagtggctggacctgcccaaggccgagcggccccgcttctacaccatgtactttgaggagccagacagcagcggccacgccggcggccctgtgtctgcccgggtcatcaaggccctgcaggtggtggaccacgccttcggcatgctgatggagggcctgaagcagaggaacctgcacaactgtgtgaacatcatcctgctggccgaccacggcatggaccagacctactgcaacaagatggagtacatgacagactacttcccccgcatcaacttcttctacatgtatgagggccctgccccccgcatccgggcccacaacatcccccatgacttcttctccttcaacagcgaggagatcgtgaggaacctgagctgcaggaagccagaccagcacttcaagccctacctgaccccagacctgcccaagaggctgcactacgccaagaatgtgagaattgacaaggtgcacctgtttgtggaccagcagtggctggccgtgcgcagcaagagcaacaccaactgtggcggcggcaaccacggctacaacaatgagttccgctccatggaggccatcttcctggcccacggccccagcttcaaggagaagacagaggtggagccctttgaaaatattgaggtgtacaacctgatgtgtgacctgctgcgcatccagcctgcccccaacaacggcacccacggcagcctgaaccacctgctgaaggtgcccttctatgagcccagccatgctgaggaggtgtccaagttctctgtgtgtggctttgccaaccccctgcccacagagagcctggactgcttctgcccccacctgcagaacagcacccagctggagcaggtgaaccagatgctgaacctgacccaggaggagatcacagccaccgtgaaggtgaacctgcccttcggccggccccgggtgctgcagaagaatgtggaccactgcctgctgtaccaccgggagtatgtgtctggctttgggaaggccatgaggatgcccatgtggagcagctacacagtgccccagctgcctgccatcgagcaccagatcgccaacatgatgctgtag

SEQ ID NO: 150920 - DNA, 2628 bp, synthetic construct; identical to SEQ ID NO: 150918
  misc_feature 1..2628: note = Description of Artificial Sequence: Synthetic coding sequence
  source 1..2628: mol_type = other DNA

SEQ ID NO: 150921 - DNA, 765 bp, synthetic construct
  misc_feature 1..765: note = Description of Artificial Sequence: Synthetic coding sequence
  source 1..765: mol_type = other DNA
atgagcctgggcctgggcctgggcctgggcctgaggaagctggagaagcagggcagctgcaggaagaagtgctttgatgccagcttccggggcctggagaactgccgctgtgatgtggcctgcaaggacagaggagactgctgctgggactttgaggacacctgtgtggagagcacccgcatctggatgtgcaacaagttccgctgtggggagacccggctggaggccagcctgtgcagctgcagtgatgactgcctgcagaggaaggactgctgtgccgactacaagtctgtgtgccagggcgagacctcctggctggaggagaactgtgacacagcccagcagagccagtgcccagagggctttgacctgccccctgtgatcctcttctccatggatggcttccgggcagagtacctgtacacctgggacaccctgatgcccaacatcaacaagctgaagacctgtggcatccacagcaagtacatgagggccatgtaccccaccaagaccttccccaaccactacaccatcgtgacaggcctgtacccagagagccacggcatcatcgacaacaacatgtatgatgtgaacctgaacaagaacttcagcctgagcagcaaggagcagaacaacccagcctggtggcacggccagcctgtgtgcagcatcctgcacgtggccacagaggtgaccagcatcagccagtgtgacaggaggaccctcttcagcctgagcggggccagctccatgagccccatctag

SEQ ID NO: 150922 - DNA, 774 bp, synthetic construct
  misc_feature 1..774: note = Description of Artificial Sequence: Synthetic coding sequence
  source 1..774: mol_type = other DNA
atgagcctgggcctgggcctgggcctgggcctgaggaagctggagaagcagggcagctgcaggaagaagtgctttgatgccagcttccggggcctggagaactgccgctgtgatgtggcctgcaaggacagaggagactgctgctgggactttgaggacacctgtgtggagagcacccgcatctggatgtgcaacaagttccgctgtggggagacccggctggaggccagcctgtgcagctgcagtgatgactgcctgcagaggaaggactgctgtgccgactacaagtctgtgtgccagggcgagacctcctggctggaggagaactgtgacacagcccagcagagccagtgcccagagggctttgacctgccccctgtgatcctcttctccatggatggcttccgggcagagtacctgtacacctgggacaccctgatgcccaacatcaacaagctgaagacctgtggcatccacagcaagtacatgagggccatgtaccccaccaagaccttccccaaccactacaccatcgtgacaggcctgtacccagagagccacggcatcatcgacaacaacatgtatgatgtgaacctgaacaagaacttcagcctgagcagcaaggagcagaacaacccagcctggtggcacggccagcccatgtggctgacagccatgtaccagggcctgaaggccgccacctacttctggccaggcagcgaggtggccatcaatggcagcttccccagcatctacatgccctacaacggctag

SEQ ID NO: 150923 - DNA, 1200 bp, synthetic construct
  misc_feature 1..1200: note = Description of Artificial Sequence: Synthetic coding sequence
  source 1..1200: mol_type = other DNA
atggccagccctgggaagccaggagcagatgaggcccaggaggaggagggggagctggagggcggcagcgctggcccccgggccgccatcctggagcaggccgaggagctgttcctgctgtgtgacaaggaggccaagggcttcatcaccaagcatgacctgcagggcctgcagagcgacctgcccctgaccccagagcagctggaggccgtgtttgagagcctggaccgggcccacacaggcttcctgacagcccgggagttctgcctgggcctgggcatgtttgtgggcgtggccagcgcccagggcgccaacccctgcaggaccccagaggagacctttgagagcggcggcctggatgtgcagggcacagctggcagcctggatgaggaggaggaggaggaggagcgcttccacacagtgctggagcagctgggcgtggcccctgtgctgggcaagcagagagctgtgaggaccctgtgggcccggctgcagcgggagaggcctgagctgctgggcagctttgaagatgtgctgatccgggccagcgcctgcctggaggaggccgcccgggagagagatggcctggagcaggccctgcggcggcgggagagcgagcacgagcgggaggtgcgggccctgtatgaggagacagagcagctgcgggagcagagccggcggccccccagccagaactttgcccggggggagcggcgcagccggctggagctggagctgcagagccgggagcaggacctggagcgggccggcctgcggcagcgggagctggagcagcagctgcacgcccaggccgctgagcacctggaggcccaggcccagaacagccagctgtggagggcccacgaggccctgcggacccagctggagggcgcccaggagcagatccggcggctggagagcgaggcccggggccggcaggagcagacccagagagatgtggtggccgtgtccaggaacatgcagaaggagaaggtgtccctgctgcggcagctggagctgctgcgggagctgaacacccggctgagagatgacagagatgcctgtgaggcccggcgggccggcagcagctgcaggaaggccctgaccacagcccggctgcccggccccacctgctgctgctgctgctgctgggcccggcccccaagaagaggcagcggccacctgcccagcgccaggtag

SEQ ID NO: 150924 - DNA, 885 bp, synthetic construct
  misc_feature 1..885: note = Description of Artificial Sequence: Synthetic coding sequence
  source 1..885: mol_type = other DNA
atggccagccctgggaagccaggagcagatgaggcccaggaggaggagggggagctggagggcggcagcgctggcccccgggccgccatcctggagcaggccgaggagctgttcctgctgtgtgacaaggaggccaagggcttcatcaccaagcatgacctgcagggcctgcagagcgacctgcccctgaccccagagcagctggaggccgtgtttgagagcctggaccgggcccacacaggcttcctgacagcccgggagttctgcctgggcctgggcatgtttgtgggcgtggccagcgcccagggcgccaacccctgcaggaccccagaggagacctttgagagcggcggcctggatgtgcagggcacagctggcagcctggatgaggaggaggaggaggaggagcgcttccacacagtgctggagcagctgggcgtggcccctgtgctgggcaagcagagagctgtgaggaccctgtgggcccggctgcagcgggagaggcctgagctgctgggcagctttgaagatgtgctgatccgggccagcgcctgcctggaggaggccgcccgggagagagatggcctggagcaggccctgcggcggcgggagagcgagcacgagcgggaggtgcgggccctgtatgaggagacagagcagctgcgggagcagagccggcggccccccagccagaactttgcccggggggagcggcgcagccggctggagctggagctgcagagccgggagcaggacctggagcgggccggcctgcggcagcgggagcggcggggccggcggctgcaggagcacgccgagcgggagagccagcctgccacagccaccggggccgcccagggcgctgagtacacagctgctggatag

SEQ ID NO: 150925 - DNA, 267 bp, synthetic construct
  misc_feature 1..267: note = Description of Artificial Sequence: Synthetic coding sequence
  source 1..267: mol_type = other DNA
atggccagccctgggaagccaggagcagatgaggcccaggaggaggagggggagctggagggcggcagcgctggcccccgggccgccatcctggagcaggccgaggagctgttcctgctgtgtgacaaggaggccaagggcttcatcaccaagcatgacctgcagggcctgcagagcgacctgcccctgaccccagagcagctggaggccgtgtttgagagcctggaccgggcccacacaggcttcctgacagcccgggagttctag

SEQ ID NO: 150926 - DNA, 105 bp, synthetic construct
  misc_feature 1..105: note = Description of Artificial Sequence: Synthetic coding sequence
  source 1..105: mol_type = other DNA
atggccagccctgggaagccaggagcagatgaggcccaggaggaggagggggagctggagggcggcagcgctggcccccgggccgccatcctggagcaggcctag

SEQ ID NO: 150927 - DNA, 885 bp, synthetic construct; identical to SEQ ID NO: 150924
  misc_feature 1..885: note = Description of Artificial Sequence: Synthetic coding sequence
  source 1..885: mol_type = other DNA

SEQ ID NO: 150928 - DNA, 162 bp, synthetic construct
  misc_feature 1..162: note = Description of Artificial Sequence: Synthetic coding sequence
  source 1..162: mol_type = other DNA
atggccagccctgggaagccaggagcagatgaggcccaggaggaggagggggagctggagggcggcagcgctggcccccgggccgccatcctggagcaggccgaggagctgttcctgctgtgtgacaaggaggccaagggcttcatcaccaagcatgactag

SEQ ID NO: 150929 - DNA, 246 bp, synthetic construct
  misc_feature 1..246: note = Description of Artificial Sequence: Synthetic coding sequence
  source 1..246: mol_type = other DNA
atggccagccctgggaagccaggagcagatgaggcccaggaggaggagggggagctggagggcggcagcgctggcccccgggccgccatcctggagcaggccgaggagctgttcctgctgtgtgacaaggaggccaagggcttcatcaccaagcatgacctgcagggcctgcagagcgacctgcccctgaccccagagcagctggaggccgtgtttgagagcctggaccgggcccacactggatag

SEQ ID NO: 150930 - DNA, 1188 bp, synthetic construct
  misc_feature 1..1188: note = Description of Artificial Sequence: Synthetic coding sequence
  source 1..1188: mol_type = other DNA
atggccgccccagatggccgggtggtgtcccggccccagaggctgggccagggcagcggccagggccccaagggcagcggggcctgcctgcaccccctggacagcctggagcagaaggagacccaggagcagaccagcggccagctggtgatgctgaggaaggcccaggagttcttccagacctgtgatgctgagggcaagggcttcatcgccaggaaggacatgcagaggctgcacaaggagctgcccctgagcctggaggagctggaggatgtgtttgatgccctggatgctgatggaaatggctacctgaccccccaggagttcaccaccggcttcagccacttcttcttcagccagaacaaccccagccaggaggatgctggggagcaggtggcccagagacatgaggagaaggtgtacctgagcagaggagatgaggacctgggggacatgggagaagatgaggaggcccagttcaggatgctgatggaccggctgggcgcccagaaggtgctggaggatgaaagtgatgtgaagcagctgtggctgcagctgaagaaggaggagccccacctgctgagcaactttgaggacttcctgacccgcatcatcagccagctgcaggaggcccacgaggagaagaatgagctggagtgtgccctgaagaggaagattgctgcctatgatgaggagatccagcacctgtatgaggagatggagcagcagatcaagtctgagaaggagcagttcctgctgaaggacacagagcgcttccaggcccggagccaggagctggagcagaagctgctgtgcaaggagcaggagctggagcagctgacccagaagcagaagaggctggagggccagtgcacagccctgcaccacgacaagcatgagaccaaggccgagaacaccaagctgaagctgaccaaccaggagctggcccgggagctggagaggacctcctgggagctgcaggatgcccagcagcagctggagagcctgcagcaggaggcctgcaagctgcaccaggagaaggagatggaggtgtacagagtgacagagagcctgcagcgggagaaggccggcctgctgaagcagctggacttcctgcgctgtgtgggcggccactggcctgtgctgcgggccccacccaggagcctgggcagcgagggccctgtgtag

SEQ ID NO: 150931 - DNA, 2196 bp, synthetic construct
  misc_feature 1..2196: note = Description of Artificial Sequence: Synthetic coding sequence
  source 1..2196: mol_type = other DNA
atggccgccccagatggccgggtggtgtcccggccccagaggctgggccagggcagcggccagggccccaagggcagcggggcctgcctgcaccccctggacagcctggagcagaaggagacccaggagcagaccagcggccagctggtgatgctgaggaaggcccaggagttcttccagacctgtgatgctgagggcaagggcttcatcgccaggaaggacatgcagaggctgcacaaggagctgcccctgagcctggaggagctggaggatgtgtttgatgccctggatgctgatggaaatggctacctgaccccccaggagttcaccaccggcttcagccacttcttcttcagccagaacaaccccagccaggaggatgctggggagcaggtggcccagagacatgaggagaaggtgtacctgagcagaggagatgaggacctgggggacatgggagaagatgaggaggcccagttcaggatgctgatggaccggctgggcgcccagaaggtgctggaggatgaaagtgatgtgaagcagctgtggctgcagctgaagaaggaggagccccacctgctgagcaactttgaggacttcctgacccgcatcatcagccagctgcaggaggcccacgaggagaagaatgagctggagtgtgccctgaagaggaagattgctgcctatgatgaggagatccagcacctgtatgaggagatggagcagcagatcaagtctgagaaggagcagttcctgctgaaggacacagagcgcttccaggcccggagccaggagctggagcagaagctgctgtgcaaggagcaggagctggagcagctgacccagaagcagaagaggctggagggccagtgcacagccctgcaccacgacaagcatgagaccaaggccgagaacaccaagctgaagctgaccaaccaggagctggcccgggagctggagaggacctcctgggagctgcaggatgcccagcagcagctggagagcctgcagcaggaggcctgcaagctgcaccaggagaaggagatggaggtgtacagagtgacagagagcctgcagcgggagaaggccggcctgctgaagcagctggacttcctgcgggagaggaacaagcacctgagagatgagcgggacatctgcttccagaagaacaaggccgccaaggccaacacagctgccagccgggcctcctggaagaagaggagcggcagcgtcatcggcaagtatgtggacagccggggcatcctgcggagccagagcgaggaggaggaggaggtgtttggcatccccaggaggagcagcctgggcctgagcggctaccccctgacagaggaggagcccggcactggagagcccggccctgggggcccctacccccggcccctgcggcgcatcatctctgtggaggaggaccccctgccccagctgctggatggcggctttgagcagcccctgagcaaatgttctgaggaggaggaggtgtctgaccagggcgtgcagggccagatccctgaggccccacccctgaagctgacccccaccagcccccggggccagcctgtgggcaaggaggccctgtgcaaggaggagagcagccccagcgccccagacaggctcttcaagatcgtgtttgtgggcaacagcgctgtgggcaagaccagcttcctgcggcgcttctgtgaagatcgcttcagccctggcatggccgccaccgtgggcatcgactacagagtgaagaccctgaatgtggacaacagccaggtggccctgcagctgtgggacacagctggccaggagcgctaccgctgcatcacccagcagttcttcaggaaggcagatggagtcatcgtgatgtatgacctgacagacaagcagagcttcctgtctgtgcggcgctggctgagctctgtggaggaggccgtgggggacagagtgcctgtgctgctgctgggcaacaagctggacaatgagaaggagcgggaggtgccccggggcctgggggagcagctggccacagagaacaacctgatcttctatgagtgcagcgcctacagcggccacaacaccaaggagagcctgctgcacctggcccgcttcctgaaggagcaggaggacacagtgcgggaggacaccatccaggtgggccacccagccaagaagaagagctgctgcggctag

SEQ ID NO: 150932 - DNA, 1389 bp, synthetic construct
  misc_feature 1..1389: note = Description of Artificial Sequence: Synthetic coding sequence
  source 1..1389: mol_type = other DNA
atggccgccccagatggccgggtggtgtcccggccccagaggctgggccagggcagcggccagggccccaagggcagcggggcctgcctgcaccccctggacagcctggagcagaaggagacccaggagcagaccagcggccagctggtgatgctgaggaaggcccaggagttcttccagacctgtgatgctgagggcaagggcttcatcgccaggaaggacatgcagaggctgcacaaggagctgcccctgagcctggaggagctggaggatgtgtttgatgccctggatgctgatggaaatggctacctgaccccccaggagttcaccaccggcttcagccacttcttcttcagccagaacaaccccagccaggaggatgctggggagcaggtggcccagagacatgaggagaaggtgtacctgagcagaggagatgaggacctgggggacatgggagaagatgaggaggcccagttcaggatgctgatggaccggctgggcgcccagaaggtgctggaggatgaaagtgatgtgaagcagctgtggctgcagctgaagaaggaggagccccacctgctgagcaactttgaggacttcctgacccgcatcatcagccagctgcaggaggcccacgaggagaagaatgagctggagtgtgccctgaagaggaagattgctgcctatgatgaggagatccagcacctgtatgaggagatggagcagcagatcaagtctgagaaggagcagttcctgctgaaggacacagagcgcttccaggcccggagccaggagctggagcagaagctgctgtgcaaggagcaggagctggagcagctgacccagaagcagaagaggctggagggccagtgcacagccctgcaccacgacaagcatgagaccaaggccgagaacaccaagctgaagctgaccaaccaggagctggcccgggagctggagaggacctcctgggagctgcaggatgcccagcagcagctggagagcctgcagcaggaggcctgcaagctgcaccaggagaaggagatggaggtgtacagagtgacagagagcctgcagcgggagaaggccggcctgctgaagcagctggacttcctgcgggagaggaacaagcacctgagagatgagcgggacatctgcttccagaagaacaaggccgccaaggccaacacagctgccagccgggcctcctggaagaagaggagcggcagcgtcatcggcaagtatgtggacagccggggcatcctgcggcgctggccccagagggaccggggcatccccaccctgcagtaccagacccagagggacctggaggactgcaagcatgagatgaagaagatctgcaaggccgaggtgaccctggagatgtag

SEQ ID NO: 150933 - DNA, 357 bp, synthetic construct
  misc_feature 1..357: note = Description of Artificial Sequence: Synthetic coding sequence
  source 1..357: mol_type = other DNA
tgagagaaggagatggaggtgtacagagtgacagagagcctgcagcgggagaaggccggcctgctgaagcagctggacttcctgcgggagaggaacaagcacctgagagatgagcgggacatctgcttccagaagaacaaggccgccaaggccaacacagctgccagccgggcctcctggaagaagaggagcggcagcgtcatcggcaagtatgtggacagccggggcatcctgcggcgctggccccagagggaccggggcatccccaccctgcagtaccagacccagagggacctggaggactgcaagcatgagatgaagaagatctgcaaggccgaggtgaccctggagatgtag

SEQ ID NO: 150934 - DNA, 1923 bp, synthetic construct
  misc_feature 1..1923: note = Description of Artificial Sequence: Synthetic coding sequence
  source 1..1923: mol_type = other DNA
atggtgagcaaccctgtgcacggcctgcccttcctgcccggcaccagcttcaaggacagcaccaagacagccttccacaggagccagaccctgagctacagaaatggctacgccatcgtgagaagacccaccgtgggcattggaggagaccggctgcagttcaaccagctgagccaggccgagctggatgagctggccagcaaggcccctgtgctgacctacggccagcccaagcaggcccctcctgctgacttcatcccagcccacgtggcctttgacaagaaggtgctgaagtttgatgcctacttccaggaggatgtgcccatgagcacagaggagcagtaccgcatccggcaggtgaacatctactactacctggaggatgacagcatgtctgtcatcgagcctgtggtggagaacagcggcatcctgcagggcaagctgatcaagaggcagaggctggccaagaatgacagaggagaccactaccactggaaggacctgaacagaggcatcaacatcaccatctacggcaagaccttccgggtggtggactgtgaccagttcacccaggtgttcctggagagccagggcatcgagctgaaccccccagagaagatggccctggacccctacacagagctgaggaagcagcccctgaggaaatatgtgacccccagcgactttgaccagctgaagcagttcctgacctttgacaagcaggtgctgcgcttctacgccatctgggatgacacagacagcatgtacggggagtgcaggacctacatcatccactactacctgatggatgacacagtggagatccgggaggtgcatgaaagaaatgatggccgggaccccttccccctgctgatgaaccggcagagggtgcccaaggtgctggtggagaatgccaagaacttcccccagtgtgtgctggagatcagtgaccaggaggtgctggagtggtacacagccaaggacttcatcgtgggcaagagcctgaccatcctgggccgcaccttcttcatctatgactgtgaccccttcacccggcgctactacaaggagaagtttggcatcacagacctgcccagaattgatgtgtccaagcgggagcccccacctgtgaagcaggagctgcccccctacaatggatttggcctggtggaggacagcgcccagaactgctttgccctgatccccaaggcccccaagaaggatgtgatcaagatgctggtgaatgacaacaaggtgctgcgctacctggccgtgctggagagccccatccctgaggacaaggacagaagatttgtgttctcctacttcctggccacagacatgatcagcatctttgagccccctgtgagaaattctggcatcatcggcggcaagtacctgggccgcaccaaggtggtgaagccctacagcacagtggacaaccctgtgtactacggccccagcgacttcttcatcggggccgtcatcgaggtgtttggccaccgcttcatcatcctggacacagatgaatatgtgctgaagtacatggagagcaatgctgcccagtacagccctgaggccctggccagcatccagaaccacgtgaggaagcgggaggccccagcccctgaggccgagagcaagcagacagagaaggaccccggggtgcaggagctggaggccctgattgacaccatccagaagcagctgaaggaccacagctgcaaggacaacatccgggaggccttccagatctatgacaaggaggccagcggctacgtggaccgggacatgttcttcaagatctgtgagagcctgaatgtgcctgtggatgacagcctggtgaaggagctgatccgcatgtgcagccacggggagggcaagatcaactactacaactttgtgcgggccttcagcaactag

SEQ ID NO: 150935 - DNA, 1653 bp, synthetic construct
  misc_feature 1..1653: note = Description of Artificial Sequence: Synthetic coding sequence
  source 1..1653: mol_type = other DNA
atgtcctggcctgtgctgaagtttgatgcctacttccaggaggatgtgcccatgagcacagaggagcagtaccgcatccggcaggtgaacatctactactacctggaggatgacagcatgtctgtgattgagcctgtggtggagaacagcggcatcctgcagggcaagctgatcaagaggcagaggctggccaagaatgacagaggagaccactaccactggaaggacctgaacagaggcatcaacatcaccatctacggcaagaccttccgggtggtggactgtgaccagttcacccaggtgttcctggagagccagggcatcgagctgaaccccccagagaagatggccctggacccctacacagagctgaggaagcagcccctgaggaaatatgtgacccccagcgactttgaccagctgaagcagttcctgacctttgacaagcaggtgctgcgcttctacgccatctgggatgacacagacagcatgtatggagaatgtaggacctacatcatccactactacctgatggatgacacagtggagatccgggaggtgcatgaaagaaatgatggccgggaccccttccccctgctgatgaaccggcagagggtgcccaaggtgctggtggagaatgccaagaacttcccccagtgtgtgctggagatcagtgaccaggaggtgctggagtggtacacagccaaggacttcatcgtgggcaagagcctgaccatcctgggccgcaccttcttcatctatgactgtgaccccttcacccggcgctactacaaggagaagtttggcatcacagacctgcccagaattgatgtgtccaagcgggagcccccacctgtgaagcaggagctgcccccctacaacggcttcggcctggtggaggacagcgcccagaactgctttgccctgatccccaaggcccccaagaaggatgtgatcaagatgctggtgaatgacaacaaggtgctgcgctacctggccgtgctggagagccccatccctgaggacaaggacagaagatttgtgttctcctacttcctggccacagacatgatcagcatctttgagccccctgtgaggaacagcggcatcattggaggcaagtacctgggccgcaccaaggtggtgaagccctacagcacagtggacaaccctgtgtactacggccccagcgacttcttcatcggggctgtgattgaggtgtttggccaccgcttcatcatcctggacacagatgaatatgtgctgaagtacatggagagcaatgctgcccagtacagccctgaggccctggccagcatccagaaccacgtgaggaagcgggaggccccagcccctgaggccgagagcaagcagacagagaaggaccccggggtgcaggagctggaggccctgattgacaccatccagaagcagctgaaggaccacagctgcaaggacaacatccgggaggccttccagatctatgacaaggaggccagcggctacgtggaccgggacatgttcttcaagatctgtgagagcctgaatgtgcctgtggatgacagcctggtgaaggaggtgacctgcaagaggctgctgctgcctgccttcaccttccccagccctgtgtggatccccctgtgtggcctgtag

SEQ ID NO: 150936 - DNA, 1866 bp, synthetic construct
  misc_feature 1..1866: note = Description of Artificial Sequence: Synthetic coding sequence
  source 1..1866: mol_type = other DNA
atgctgaagacagccttccacaggagccagaccctgagctacagaaatggctacgccatcgtgcggcggcccaccgtgggcatcggcggggaccggctgcagttcaaccagctgagccaggccgagctggatgagctggccagcaaggcccctgtgctgacctacggccagcccaagcaggcccccccagctgacttcatcccagcccacgtggcctttgacaagaaggtgctgaagtttgatgcctacttccaggaggatgtgcccatgagcacagaggagcagtaccgcatccggcaggtgaacatctactactacctggaggatgacagcatgtctgtgattgagcctgtggtggagaacagcggcatcctgcagggcaagctgatcaagaggcagaggctggccaagaatgacagaggagaccactaccactggaaggacctgaacagaggcatcaacatcaccatctacggcaagaccttccgggtggtggactgtgaccagttcacccaggtgttcctggagagccagggcatcgagctgaaccccccagagaagatggccctggacccctacacagagctgaggaagcagcccctgaggaaatatgtgacccccagcgactttgaccagctgaagcagttcctgacctttgacaagcaggtgctgcgcttctacgccatctgggatgacacagacagcatgtatggagaatgtaggacctacatcatccactactacctgatggatgacacagtggagatccgggaggtgcatgaaagaaatgatggccgggaccccttccccctgctgatgaaccggcagagggtgcccaaggtgctggtggagaatgccaagaacttcccccagtgtgtgctggagatcagtgaccaggaggtgctggagtggtacacagccaaggacttcatcgtgggcaagagcctgaccatcctgggccgcaccttcttcatctatgactgtgaccccttcacccggcgctactacaaggagaagtttggcatcacagacctgcccagaattgatgtgtccaagcgggagcccccacctgtgaagcaggagctgcccccctacaacggcttcggcctggtggaggacagcgcccagaactgctttgccctgatccccaaggcccccaagaaggatgtgatcaagatgctggtgaatgacaacaaggtgctgcgctacctggccgtgctggagagccccatccctgaggacaaggacagaagatttgtgttctcctacttcctggccacagacatgatcagcatctttgagccccctgtgaggaacagcggcatcattggaggcaagtacctgggccgcaccaaggtggtgaagccctacagcacagtggacaaccctgtgtactacggccccagcgacttcttcatcggggctgtgattgaggtgtttggccaccgcttcatcatcctggacacagatgaatatgtgctgaagtacatggagagcaatgctgcccagtacagccctgaggccctggccagcatccagaaccacgtgaggaagcgggaggccccagcccctgaggccgagagcaagcagacagagaaggaccccggggtgcaggagctggaggccctgattgacaccatccagaagcagctgaaggaccacagctgcaaggacaacatccgggaggccttccagatctatgacaaggaggccagcggctacgtggaccgggacatgttcttcaagatctgtgagagcctgaatgtgcctgtggatgacagcctggtgaaggagctgatccgcatgtgcagccatggagagggcaagatcaactactacaactttgtgcgggccttcagcaactag

SEQ ID NO: 150937 - DNA, 2250 bp, synthetic construct
  misc_feature 1..2250: note = Description of Artificial Sequence: Synthetic coding sequence
  source 1..2250: mol_type = other DNA
atggccctgcccctgctgcccggcaacagcttcaacagaaatgtgggcaaggagaagttccacaagagccagcactggggcttctgcaacaacgtgatgatgctggtgtctgatgagaagccaggcattggaggagagcccctgctgggccagaagatcaagcccaagtgcagcatctaccccaagggagatggcagtgatgtgcccagctgggtggcctttgacaagcaggtgctgagctttgatgcctacctggaggaggaggtgctggacaagagccagaccaactaccgcatccgctactacaagatctacttctacccagaagatgacaccatccaggtgaatgaacctgaggtgaagaacagcggcctgctgcagggcaccagcatccgccgccaccgcatcaccctgcccccaccagatgaggaccagttctacacagtgtaccacttcaacgtgggcacagaggtggtgttctacggccgcaccttcaagatctatgactgtgatgccttcaccaggaacttcctgaggaagattggagtgaaggtgaacccccctgtgcagtgcccagaggacccctacatgaagatccggcgggaggtggtggagcacgtggagcccctgcggccctatgagagcctggacaccctgaagcagttcctgcagtaccacggcaagatcctgtgcttcttctgcctgtgggatgattctgtgtccatgtttggagaccggcgggagctgatcctgcactacttcctgtgtgatgacaccatcgagatcaaggagctgctgccccacagcagcggcagagatgccctgaagatgttcctgcggcgcagcaagctgcccaagaactgccccccccgggtgtaccagcccggccagatcacagacagagctgtgctgaacagctatggagacttcatcaagaaccaggctgatggctacctgtttgaccgctacaagctgggcaaggtggaccaggagttctacaaggacagcgacctgagcctgggcgtgaccatcaacgtgtggggcaggaaggtgctgctgtatgactgtgatgagttcaccaagagctactacaagagcaaatatggaattgagaacttcacctctgtgtcctgcaagccacccagccccccacccaagattgaaaggaagttccccccctacaatggatttggaagtgaggaggacagcctgaggaactgcatcgacctgaagcccaccccccacagaagaaacttcaagaagttcatggagaaggacagctatggcagcaagagcaacatcctgcgcttctttgccaagctggtgacagacaagtgtgtggacctggacaggatgtttgtgatctcctactacctgggagatgacaccatctctgtgtttgagcccatcgagaggaacagcggcattgctgggggcatgttcctgaagaggagccgggtgaagaagccaggccaggaggtgttcaagtctgagctgtctgagtacatcaaggccgaggagctgtacatcggcgtgacagtgaatgtgaatggctacctgttccggctgctgaatgctgatgagtacaccctgaactacatggagcagaacacagacaagtaccccttcagcaacctgaagctggccctgcagaagctgaagcaggaggagggcaagagccgggagctgaagcaggtgttcaaggctgctgacagcaagcacaccaacatggtggactacaacaccttccgggacatcctgatgagcctgactgtgggcaacctggccgagcaggagtttgtgaccatcgcccggcactacagagtgcctgagggcacctgcagcgacatggacttcctgattgccctggcccacgagaagttcaagaagaacatgtttgagaactttgacaccttcatctacagctgtgtgtatgaggaccgggagaagaagaatgtgctgcccaccaaggacatcaagaggctgtgcaagagcagccggctgcccctgagtgatgacctgctggagagcctgctgagcagatttgaagattctgagaagcagattgactacaagagcttcttcagcgccctgaactggaggaagaaccctgtgcctgagctgcagcctgccagctacctgaaggagcgctgtgaagatgtgtggctgggcatgcccagccccatcccagccaagtacatcgactactggaccttcctgaaggatgccttcggcctggaggaggagtag

SEQ ID NO: 150938 - DNA, 489 bp, synthetic construct
  misc_feature 1..489: note = Description of Artificial Sequence: Synthetic coding sequence
  source 1..489: mol_type = other DNA
atgagcctgactgtgggcaacctggccgagcaggagtttgtgaccatcgcccggcactacagagtgcctgagggcacctgcagcgacatggacttcctgattgccctggcccacgagaagttcaagaagaacatgtttgaaaattttgacaccttcatctacagctgtgtgtatgaagatcgggagaagaagaatgtgctgcccaccaaggacatcaagaggctgtgcaagagcagccggctgcccctgagtgatgacctgctggagagcctgctgagcagatttgaggacagcgagaagcagattgactacaagagcttcttcagcgccctgaactggaggaagaaccctgtgcctgagctgcagcctgccagctacctgaaggagcgctgtgaagatgtgtggctgggcatgcccagccccatcccagccaagtacatcgactactggaccttcctgaaggatgccttcggcctggaggaggagtag

SEQ ID NO: 150939 - DNA, 753 bp, synthetic construct
  misc_feature 1..753: note = Description of Artificial Sequence: Synthetic coding sequence
  source 1..753: mol_type = other DNA
atgaagatccggcgggaggtggtggagcacgtggagcccctgcggccctatgagagcctggacaccctgaagcagttcctgcagtaccacggcaagatcctgtgcttcttctgcctgtgggatgattctgtgtccatgtttggagaccggcgggagctgatcctgcactacttcctgtgtgatgacaccatcgagatcaaggagctgctgccccacagcagcggcagagatgccctgaagatgttcctgcggcgcagcaagctgcccaagaactgccccccccgggtgtaccagcccggccagatcacagacagagctgtgctgaacagctatggagacttcatcaagaaccaggctgatggctacctgtttgaccgctacaagctgggcaaggtggaccaggagttctacaaggacagcgacctgagcctgggcgtgaccatcaacgtgtggggcaggaaggtgctgctgtatgactgtgatgagttcaccaagagctactacaagagcaaatatggaattgagaacttcacctctgtgtcctgcaagccacccagccccccacccaagattgaaaggaagttccccccctacaatggatttggaagtgaggaggacagcctgaggaactgcatcgacctgaagcccaccccccacagaagaaacttcaagaagttcatggagaaggacagctatggcagcaagagcaacatcctcttcttctgcaagaccagccaccggcagatgtgctag

SEQ ID NO: 150940 - DNA, 2334 bp, synthetic construct
  misc_feature 1..2334: note = Description of Artificial Sequence: Synthetic coding sequence
  source 1..2334: mol_type = other DNA
gggggccagaccaccaggcctggaggagctgctgcctgccgggccctgagcagcggcaccctggacttccgcaccctgagcgccatggccctgcccctgctgcccggcaacagcttcaacagaaatgtgggcaaggagaagttccacaagagccagcactggggcttctgcaacaacgtgatgatgctggtgtctgatgagaagccaggcattggaggagagcccctgctgggccagaagatcaagcccaagtgcagcatctaccccaagggagatggcagtgatgtgcccagctgggtggcctttgacaagcaggtgctgagctttgatgcctacctggaggaggaggtgctggacaagagccagaccaactaccgcatccgctactacaagatctacttctacccagaagatgacaccatccaggtgaatgaacctgaggtgaagaacagcggcctgctgcagggcaccagcatccgccgccaccgcatcaccctgcccccaccagatgaggaccagttctacacagtgtaccacttcaacgtgggcacagaggtggtgttctacggccgcaccttcaagatctatgactgtgatgccttcaccaggaacttcctgaggaagattggagtgaaggtgaacccccctgtgcagtgcccagaggacccctacatgaagatccggcgggaggtggtggagcacgtggagcccctgcggccctatgagagcctggacaccctgaagcagttcctgcagtaccacggcaagatcctgtgcttcttctgcctgtgggatgattctgtgtccatgtttggagaccggcgggagctgatcctgcactacttcctgtgtgatgacaccatcgagatcaaggagctgctgccccacagcagcggcagagatgccctgaagatgttcctgcggcgcagcaagctgcccaagaactgccccccccgggtgtaccagcccggccagatcacagacagagctgtgctgaacagctatggagacttcatcaagaaccaggctgatggctacctgtttgaccgctacaagctgggcaaggtggaccaggagttctacaaggacagcgacctgagcctgggcgtgaccatcaacgtgtggggcaggaaggtgctgctgtatgactgtgatgagttcaccaagagctactacaagagcaaatatggaattgagaacttcacctctgtgtcctgcaagccacccagccccccacccaagattgaaaggaagttccccccctacaatggatttggaagtgaggaggacagcctgaggaactgcatcgacctgaagcccaccccccacagaagaaacttcaagaagttcatggagaaggacagctatggcagcaagagcaacatcctgcgcttctttgccaagctggtgacagacaagtgtgtggacctggacaggatgtttgtgatctcctactacctgggagatgacaccatctctgtgtttgagcccatcgagaggaacagcggcattgctgggggcatgttcctgaagaggagccgggtgaagaagccaggccaggaggtgttcaagtctgagctgtctgagtacatcaaggccgaggagctgtacatcggcgtgacagtgaatgtgaatggctacctgttccggctgctgaatgctgatgagtacaccctgaactacatggagcagaacacagacaagtaccccttcagcaacctgaagctggccctgcagaagctgaagcaggaggagggcaagagccgggagctgaagcaggtgttcaaggctgctgacagcaagcacaccaacatggtggactacaacaccttccgggacatcctgatgagcctgactgtgggcaacctggccgagcaggagtttgtgaccatcgcccggcactacagagtgcctgagggcacctgcagcgacatggacttcctgattgccctggcccacgagaagttcaagaagaacatgtttgagaactttgacaccttcatctacagctgtgtgtatgaggaccgggagaagaagaatgtgctgcccaccaaggacatcaagaggctgtgcaagagcagccggctgcccctgagtgatgacctgctggagagcctgctgagcagatttgaagattctgagaagcagattgactacaagagcttcttcagcgccctgaactggaggaagaaccctgtgcctgagctgcagcctgccagctacctgaaggagcgctgtgaagatgtgtggctgggcatgcccagccccatcccagccaagtacatcgactactggaccttcctgaaggatgccttcggcctggaggaggagtag

SEQ ID NO: 150941 - DNA, 2193 bp, synthetic construct
  misc_feature 1..2193: note = Description of Artificial Sequence: Synthetic coding sequence
  source 1..2193: mol_type = other DNA
tgaaacaacacagctggaagaagacgctgcctgcccggccccctcttctgggaccccggcttcagtgacacagaaagacatggccctgccagcgctgctggccagcagctgcagccccagcgggagaagggagatggcagtgatgtgcccagctgggtggcctttgacaagcaggtgctgagctttgatgcctacctggaggaggaggtgctggacaagagccagaccaactaccgcatccgctactacaagatctacttctacccagaagatgacaccatccaggtgaatgaacctgaggtgaagaacagcggcctgctgcagggcaccagcatcagaagacaccgcatcaccctgcccccaccagatgaggaccagttctacacagtgtaccacttcaacgtgggcacagaggtggtgttctacggccgcaccttcaagatctatgactgtgatgccttcaccaggaacttcctgaggaagattggagtgaaggtgaacccccctgtgcagtgcccagaggacccctacatgaagatcagaagagaggtggtggagcacgtggagcccctgcggccctatgagagcctggacaccctgaagcagttcctgcagtaccacggcaagatcctgtgcttcttctgcctgtgggatgacagcgtgtccatgtttggagacagaagagagctgatcctgcactacttcctgtgtgatgacaccatcgagatcaaggagctgctgccccacagcagcggcagagatgccctgaagatgttcctgcggcgcagcaagctgcccaagaactgccccccccgggtgtaccagcccggccagatcacagacagagctgtgctgaacagctatggagacttcatcaagaaccaggctgatggctacctgtttgaccgctacaagctgggcaaggtggaccaggagttctacaaggacagcgacctgagcctgggcgtgaccatcaacgtgtggggcaggaaggtgctgctgtatgactgtgatgagttcaccaagagctactacaagagcaaatatggaattgagaacttcacctctgtgtcctgcaagccacccagccccccacccaagattgaaaggaagtttcctccctacaacggcttcggcagcgaggaggacagcctgaggaactgcatcgacctgaagcccaccccccacagaagaaacttcaagaagttcatggagaaggacagctatggcagcaagagcaacatcctgcgcttctttgccaagctggtgacagacaagtgtgtggacctggacaggatgtttgtgatctcctactacctgggagatgacaccatctctgtgtttgagcccattgaaagaaattctggaattgctgggggcatgttcctgaagaggagccgggtgaagaagccaggccaggaggtgttcaagtctgagctgtctgagtacatcaaggccgaggagctgtacatcggcgtgacagtgaatgtgaatggctacctgttccggctgctgaatgctgatgagtacaccctgaactacatggagcagaacacagacaagtaccccttcagcaacctgaagctggccctgcagaagctgaagcaggaggagggcaagagccgggagctgaagcaggtgttcaaggctgctgacagcaagcacaccaacatggtggactacaacaccttccgggacatcctgatgagcctgactgtgggcaacctggccgagcaggagtttgtgaccatcgcccggcactacagagtgcctgagggcacctgcagcgacatggacttcctgattgccctggcccacgagaagttcaagaagaacatgtttgaaaattttgacaccttcatctacagctgtgtgtatgaagatcgggagaagaagaatgtgctgcccaccaaggacatcaagaggctgtgcaagagcagccggctgcccctgagtgatgacctgctggagagcctgctgagcagatttgaggacagcgagaagcagattgactacaagagcttcttcagcgccctgaactggaggaagaaccctgtgcctgagctgcagcctgccagctacctgaaggagcgctgtgaagatgtgtggctgggcatgcccagccccatcccagccaagtacatcgactactggaccttcctgaaggatgccttcggcctggaggaggagtag

SEQ ID NO: 150942 - DNA, 720 bp, synthetic construct
  misc_feature 1..720: note = Description of Artificial Sequence: Synthetic coding sequence
  source 1..720: mol_type = other DNA
atggccagcgaggagctggcctgcaagctggagcggcggctgcggcgggaggaggccgaggagagcggcccccagctggcccccctgggcgccccagcccctgagcccaagccagagcctgagcccccagcccgggcccccacagccagcgcagatgctgagctgagcgcccagctgagccggcggctggacatcaatgaaggagctgcccggccccggcgctgcagggtcttcaacccctacacagagttccctgagttcagcagaagactcatcaaggacctggagagcatgttcaagctgtatgatgctggaagagatggcttcatcgacctgatggagctgaagctgatgatggagaagctgggcgccccccagacccacctgggcctgaagtccatgatcaaggaggtggatgaggactttgatggcaagctgtccttccgggagttcctgctgatcttccacaaggctgctgctggggagctgcaggaggacagcggcctgatggccctggccaagctgtctgaaattgatgtggccctggagggcgtgaagggggccaagaacttctttgaggccaaggtgcaggccctgagcagcgccagcaagtttgaagctgagctgaaggccgagcaggatgagaggaagcgggaggaggaggagcggcggctgcggcaggccgccttccagaagctgaaggccaacttcaacacctag

SEQ ID NO: 150943 - DNA, 432 bp, synthetic construct
  misc_feature 1..432: note = Description of Artificial Sequence: Synthetic coding sequence
  source 1..432: mol_type = other DNA
atgggagagctgcagtatgatgctggaagagatggcttcatcgacctgatggagctgaagctgatgatggagaagctgggcgccccccagacccacctgggcctgaagtccatgatcaaggaggtggatgaggactttgatggcaagctgtccttccgggagttcctgctgatcttccacaaggctgctgctggggagctgcaggaggacagcggcctgatggccctggccaagctgtctgaaattgatgtggccctggagggcgtgaagggggccaagaacttctttgaggccaaggtgcaggccctgagcagcgccagcaagtttgaagctgagctgaaggccgagcaggatgagaggaagcgggaggaggaggagcggcggctgcggcaggccgccttccagaagctgaaggccaacttcaacacctag

SEQ ID NO: 150944 - DNA, 384 bp, synthetic construct
  misc_feature 1..384: note = Description of Artificial Sequence: Synthetic coding sequence
  source 1..384: mol_type = other DNA
atggagctgaagctgatgatggagaagctgggcgccccccagacccacctgggcctgaagtccatgatcaaggaggtggatgaggactttgatggcaagctgtccttccgggagttcctgctgatcttccacaaggctgctgctggggagctgcaggaggacagcggcctgatggccctggccaagctgtctgaaattgatgtggccctggagggcgtgaagggggccaagaacttctttgaggccaaggtgcaggccctgagcagcgccagcaagtttgaagctgagctgaaggccgagcaggatgagaggaagcgggaggaggaggagcggcggctgcggcaggccgccttccagaagctgaaggccaacttcaacacctag

SEQ ID NO: 150945 - DNA, 384 bp, synthetic construct; identical to SEQ ID NO: 150944
  misc_feature 1..384: note = Description of Artificial Sequence: Synthetic coding sequence
  source 1..384: mol_type = other DNA

SEQ ID NO: 150946 - DNA, 429 bp, synthetic construct
  misc_feature 1..429: note = Description of Artificial Sequence: Synthetic coding sequence
  source 1..429: mol_type = other DNA
atgttcaagctgtatgatgctggaagagatggcttcatcgacctgatggagctgaagctgatgatggagaagctgggcgccccccagacccacctgggcctgaagtccatgatcaaggaggtggatgaagattttgatggcaagctgtccttccgggagttcctgctgatcttccacaaggctgctgctggggagctgcaggaggacagcggcctgatggccctggccaagctgtctgaaattgatgtggccctggagggcgtgaagggggccaagaacttctttgaggccaaggtgcaggccctgagcagcgccagcaagtttgaggccgagctgaaggccgagcaggatgagaggaagcgggaggaggaggagcggcggctgcggcaggccgccttccagaagctgaaggccaacttcaacacctag

SEQ ID NO: 150947 - DNA, 2466 bp, synthetic construct
  misc_feature 1..2466: note = Description of Artificial Sequence: Synthetic coding sequence
  source 1..2466: mol_type = other DNA
atgcccaccagggtgtgctgctgctgcagcgccctgcggccccgctacaagaggctggtggacaacatcttccctgaggaccccaaggatggcctggtgaagacagacatggagaagctgaccttctatgctgtgtctgcccctgagaagctggaccgcatcggcagctacctggccgagcggctgagcagagatgtggtgcgccacaggagcggctacgtgctgattgccatggaggccctggaccagctgctgatggcctgccacagccagagcatcaagccctttgtggagagcttcctgcacatggtggccaagctgctggagagcggggagcccaagctgcaggtgctgggcaccaacagctttgtgaagtttgccaacatcgaggaggacacccccagctaccaccggcgctatgacttctttgtgagccgcttcagcgccatgtgccacagctgccacagcgaccctgagatcagaacagagatcagaattgctggcatccggggcatccagggcgtggtgaggaagacagtgaatgatgagctgcgggccaccatctgggagccccagcacatggacaagatcgtgcccagcctgctcttcaacatgcagaagattgaggaggtggacagcagaattggcccccccagcagccccagcgccacagacaaggaggagaacccagctgtgctggccgagaactgcttccgggagctgctgggccgggccacctttggaaacatgaacaatgctgtgcggcctgtgtttgcccacctggaccaccacaagctgtgggaccccaatgaatttgctgtgcactgcttcaagatcatcatgtacagcatccaggcccagtacagccaccacgtgatccaggagatcctgggccacctggatgccaggaagaaggatgccccccgggtgcgggccggcatcatccaggtgctgctggaggccgtggccatcgccgccaagggcagcatcggccccaccgtgctggaggtgttcaacaccctgctgaagcacctgcggctgtctgtggagtttgaggccaatgacctgcagggcggctctgtgggctctgtgaacctgaacaccagcagcaaggacaatgatgagaagatcgtgcagaatgccatcatccagaccatcggcttcttcggcagcaacctgcctgactaccagaggtctgagatcatgatgttcatcatgggcaaggtgcctgtgtttggcaccagcacccacaccctggacatcagccagctgggggacctgggcacccggcgcatccagatcatgctgctgcggagcctgctgatggtgaccagcggctacaaggccaagaccatcgtgacagccctgcccggcagcttcctggaccccctgctgagccccagcctgatggaggactatgagctgcggcagctggtgctggaggtgatgcacaacctgatggacagacatgacaacagagccaagctgcggggcatccgcatcatcccagatgtggccgacctgaagatcaagcgggagaagatctgccggcaggacaccagcttcatgaagaagaatggccagcagctgtaccgccacatctacctgggctgcaaggaggaggacaacgtgcagaagaactatgagctgctgtacaccagcctggccctgatcaccatcgagctggccaatgaggaggtggtgattgacctgatccggctggccatcgccctgcaggacagcgccatcatcaatgaagacaacctgcccatgttccaccgctgtggcatcatggccctggtggccgcctacctgaactttgtgtcccagatgattgctgtgcctgccttctgccagcacgtgtccaaggtgattgagatccgcaccatggaggccccctacttcctgcctgagcacatcttccgggacaagtgcatgctgcccaagagcctggagaagcatgagaaggacctgtacttcctgaccaacaagattgctgagagcctgggcggcagcggctacagcgtggagcggctgtctgtgccctacgtgccccaggtgacagatgaggaccggctgagcaggaggaagagcatcgtggacacagtgtccatccaggtggacatcctgagcaacaacgtgcccagtgatgatgtggtgagcaacacagaggagatcacctttgaggccctgaagaaggccatcgacaccagcggcatggaggagcaggagaaggagaagaggcggctggtgattgagaagttccagaaggccccctttgaggagattgctgcccagtgtgagagcaaggccaacctgctgcatgaccggctggcccagatcctggagctgaccatccggcccccacccagccccagcggcaccctgaccatcaccagcggccacgcccagtaccagagcgtgcctgtgtatgagatgaagttcccagacctgtgtgtgtactag

SEQ ID NO: 150948 - DNA, 2466 bp, synthetic construct
  misc_feature 1..2466: note = Description of Artificial Sequence: Synthetic coding sequence
  source 1..2466: mol_type = other DNA
atgaagagccgggtgtgctgctgctgcagcgccctgcggccccgctacaagaggctggtggacaacatcttccctgaggaccccaaggatggcctggtgaagacagacatggagaagctgaccttctatgctgtgtctgcccctgagaagctggaccgcatcggcagctacctggccgagcggctgagcagagatgtggtgcgccacaggagcggctacgtgctgattgccatggaggccctggaccagctgctgatggcctgccacagccagagcatcaagccctttgtggagagcttcctgcacatggtggccaagctgctggagagcggggagcccaagctgcaggtgctgggcaccaacagctttgtgaagtttgccaacatcgaggaggacacccccagctaccaccggcgctatgacttctttgtgagccgcttcagcgccatgtgccacagctgccacagcgaccctgagatcagaacagagatcagaattgctggcatccggggcatccagggcgtggtgaggaagacagtgaatgatgagctgcgggccaccatctgggagccccagcacatggacaagatcgtgcccagcctgctcttcaacatgcagaagattgaggaggtggacagcagaattggcccccccagcagccccagcgccacagacaaggaggagaacccagctgtgctggccgagaactgcttccgggagctgctgggccgggccacctttggaaacatgaacaatgctgtgcggcctgtgtttgcccacctggaccaccacaagctgtgggaccccaatgaatttgctgtgcactgcttcaagatcatcatgtacagcatccaggcccagtacagccaccacgtgatccaggagatcctgggccacctggatgccaggaagaaggatgccccccgggtgcgggccggcatcatccaggtgctgctggaggccgtggccatcgccgccaagggcagcatcggccccaccgtgctggaggtgttcaacaccctgctgaagcacctgcggctgtctgtggagtttgaggccaatgacctgcagggcggctctgtgggctctgtgaacctgaacaccagcagcaaggacaatgatgagaagatcgtgcagaatgccatcatccagaccatcggcttcttcggcagcaacctgcctgactaccagaggtctgagatcatgatgttcatcatgggcaaggtgcctgtgtttggcaccagcacccacaccctggacatcagccagctgggggacctgggcacccggcgcatccagatcatgctgctgcggagcctgctgatggtgaccagcggctacaaggccaagaccatcgtgacagccctgcccggcagcttcctggaccccctgctgagccccagcctgatggaggactatgagctgcggcagctggtgctggaggtgatgcacaacctgatggacagacatgacaacagagccaagctgcggggcatccgcatcatcccagatgtggccgacctgaagatcaagcgggagaagatctgccggcaggacaccagcttcatgaagaagaatggccagcagctgtaccgccacatctacctgggctgcaaggaggaggacaacgtgcagaagaactatgagctgctgtacaccagcctggccctgatcaccatcgagctggccaatgaggaggtggtgattgacctgatccggctggccatcgccctgcaggacagcgccatcatcaatgaagacaacctgcccatgttccaccgctgtggcatcatggccctggtggccgcctacctgaactttgtgtcccagatgattgctgtgcctgccttctgccagcacgtgtccaaggtgattgagatccgcaccatggaggccccctacttcctgcctgagcacatcttccgggacaagtgcatgctgcccaagagcctggagaagcatgagaaggacctgtacttcctgaccaacaagattgctgagagcctgggcggcagcggctacagcgtggagcggctgtctgtgccctacgtgccccaggtgacagatgaggaccggctgagcaggaggaagagcatcgtggacacagtgtccatccaggtggacatcctgagcaacaacgtgcccagtgatgatgtggtgagcaacacagaggagatcacctttgaggccctgaagaaggccatcgacaccagcggcatggaggagcaggagaaggagaagaggcggctggtgattgagaagttccagaaggccccctttgaggagattgctgcccagtgtgagagcaaggccaacctgctgcatgaccggctggcccagatcctggagctgaccatccggcccccacccagccccagcggcaccctgaccatcaccagcggccacgcccagtaccagagcgtgcctgtgtatgagatgaagttcccagacctgtgtgtgtactag

SEQ ID NO: 150949 - DNA, 2334 bp, synthetic construct
  misc_feature 1..2334: note = Description of Artificial Sequence: Synthetic coding sequence
  source 1..2334: mol_type = other DNA
atgcccaagggcgtgtgctgctgctgcagcgccctgcggccccgctacaagaggctggtggacaacatcttccctgaggaccccaaggatggcctggtgaagacagacatggagaagctgaccttctatgctgtgtctgcccctgagaagctggaccgcatcggcagctacctggccgagcggctgagcagagatgtggtgcgccacaggagcggctacgtgctgattgccatggaggccctggaccagctgctgatggcctgccacagccagagcatcaagccctttgtggagagcttcctgcacatggtggccaagctgctggagagcggggagcccaagctgcaggtgctgggcaccaacagctttgtgaagtttgccaacatcgaggaggacacccccagctaccaccggcgctatgacttctttgtgagccgcttcagcgccatgtgccacagctgccacagcgaccctgagatcagaacagagatcagaattgctggcatccggggcatccagggcgtggtgaggaagacagtgaatgatgagctgcgggccaccatctgggagccccagcacatggacaagatcgtgcccagcctgctcttcaacatgcagaagattgaggaggtggacagcagaattggcccccccagcagccccagcgccacagacaaggaggagaacccagctgtgctggccgagaactgcttccgggagctgctgggccgggccacctttggaaacatgaacaatgctgtgcggcctgtgtttgcccacctggaccaccacaagctgtgggaccccaatgaatttgctgtgcactgcttcaagatcatcatgtacagcatccaggcccagtacagccaccacgtgatccaggagatcctgggccacctggatgccaggaagaaggatgccccccgggtgcgggccggcatcatccaggtgctgctggaggccgtggccatcgccgccaagggcagcatcggccccaccgtgctggaggtgttcaacaccctgctgaagcacctgcggctgtctgtggagtttgaggccaatgacctgcagggcggctctgtgggctctgtgaacctgaacaccagcagcaaggacaatgatgagaagatcgtgcagaatgccatcatccagaccatcggcttcttcggcagcaacctgcctgactaccagaggtctgagatcatgatgttcatcatgggcaaggtgcctgtgtttggcaccagcacccacaccctggacatcagccagctgggggacctgggcacccggcgcatccagatcatgctgctgcggagcctgctgatggtgaccagcggctacaaggccaagaccatcgtgacagccctgcccggcagcttcctggaccccctgctgagccccagcctgatggaggactatgagctgcggcagctggtgctggaggtgatgcacaacctgatggacagacatgacaacagagccaagctgcggggcatccgcatcatcccagatgtggccgacctgaagatcaagcgggagaagatctgccggcaggacaccagcttcatgaagaagaatggccagcagctgtaccgccacatctacctgggctgcaaggaggaggacaacgtgcagaagaactatgagctgctgtacaccagcctggccctgatcaccatcgagctggccaatgaggaggtggtgattgacctgatccggctggccatcgccctgcaggacagcgccatcatcaatgaagacaacctgcccatgttccaccgctgtggcatcatggccctggtggccgcctacctgaactttgtgtcccagatgattgctgtgcctgccttctgccacaagattgctgagagcctgggcggcagcggctacagcgtggagcggctgtctgtgccctacgtgccccaggtgacagatgaggaccggctgagcaggaggaagagcatcgtggacacagtgtccatccaggtggacatcctgagcaacaacgtgcccagtgatgatgtggtgagcaacacagaggagatcacctttgaggccctgaagaaggccatcgacaccagcggcatggaggagcaggagaaggagaagaggcggctggtgattgagaagttccagaaggccccctttgaggagattgctgcccagtgtgagagcaaggccaacctgctgcatgaccggctggcccagatcctggagctgaccatccggcccccacccagccccagcggcaccctgaccatcaccagcggccacgcccagtaccagagcgtgcctgtgtatgagatgaagttcccagacctgtgtgtgtactag

SEQ ID NO: 150950 - DNA, 603 bp, synthetic construct
  misc_feature 1..603: note = Description of Artificial Sequence: Synthetic coding sequence
  source 1..603: mol_type = other DNA
atgctggcccggctgctgaagtttgaggaggccccctacttcctgcctgagcacatcttccgggacaagtgcatgctgcccaagagcctggagaagcatgagaaggacctgtacttcctgaccaacaagattgctgagagcctgggcggcagcggctacagcgtggagcggctgtctgtgccctacgtgccccaggtgacagatgaagatcggctgagcaggaggaagagcatcgtggacacagtgtccatccaggtggacatcctgagcaacaacgtgcccagtgatgatgtggtgagcaacacagaggagatcacctttgaggccctgaagaaggccatcgacaccagcggcatggaggagcaggagaaggagaagaggcggctggtgattgagaagttccagaaggccccctttgaggagattgctgcccagtgtgagagcaaggccaacctgctgcatgaccggctggcccagatcctggagctgaccatccggcccccacccagccccagcggcaccctgaccatcaccagcggccacgcccagtaccagagcgtgcctgtgtatgagatgaagttcccagacctgtgtgtgtactag

SEQ ID NO: 150951 - DNA, 2358 bp, synthetic construct
  misc_feature 1..2358: note = Description of Artificial Sequence: Synthetic coding sequence
  source 1..2358: mol_type = other DNA
atggagaagctgaccttctatgctgtgtctgcccctgagaagctggaccgcatcggcagctacctggccgagcggctgagcagagatgtggtgcgccacaggagcggctacgtgctgattgccatggaggccctggaccagctgctgatggcctgccacagccagagcatcaagccctttgtggagagcttcctgcacatggtggccaagctgctggagagcggggagcccaagctgcaggtgctgggcaccaacagctttgtgaagtttgccaacatcgaggaggacacccccagctaccaccggcgctatgacttctttgtgagccgcttcagcgccatgtgccacagctgccacagcgaccctgagatcagaacagagatcagaattgctggcatccggggcatccagggcgtggtgaggaagacagtgaatgatgagctgcgggccaccatctgggagccccagcacatggacaagatcgtgcccagcctgctcttcaacatgcagaagattgaggaggtggacagcagaattggcccccccagcagccccagcgccacagacaaggaggagaacccagctgtgctggccgagaactgcttccgggagctgctgggccgggccacctttggaaacatgaacaatgctgtgcggcctgtgtttgcccacctggaccaccacaagctgtgggaccccaatgaatttgctgtgcactgcttcaagatcatcatgtacagcatccaggcccagtacagccaccacgtgatccaggagatcctgggccacctggatgccaggaagaaggatgccccccgggtgcgggccggcatcatccaggtgctgctggaggccgtggccatcgccgccaagggcagcatcggccccaccgtgctggaggtgttcaacaccctgctgaagcacctgcggctgtctgtggagtttgaggccaatgacctgcagggcggctctgtgggctctgtgaacctgaacaccagcagcaaggacaatgatgagaagatcgtgcagaatgccatcatccagaccatcggcttcttcggcagcaacctgcctgactaccagaggtctgagatcatgatgttcatcatgggcaaggtgcctgtgtttggcaccagcacccacaccctggacatcagccagctgggggacctgggcacccggcgcatccagatcatgctgctgcggagcctgctgatggtgaccagcggctacaaggccaagaccatcgtgacagccctgcccggcagcttcctggaccccctgctgagccccagcctgatggaggactatgagctgcggcagctggtgctggaggtgatgcacaacctgatggacagacatgacaacagagccaagctgcggggcatccgcatcatcccagatgtggccgacctgaagatcaagcgggagaagatctgccggcaggacaccagcttcatgaagaagaatggccagcagctgtaccgccacatctacctgggctgcaaggaggaggacaacgtgcagaagaactatgagctgctgtacaccagcctggccctgatcaccatcgagctggccaatgaggaggtggtgattgacctgatccggctggccatcgccctgcaggacagcgccatcatcaatgaagacaacctgcccatgttccaccgctgtggcatcatggccctggtggccgcctacctgaactttgtgtcccagatgattgctgtgcctgccttctgccagcacgtgtccaaggtgattgagatccgcaccatggaggccccctacttcctgcctgagcacatcttccgggacaagtgcatgctgcccaagagcctggagaagcatgagaaggacctgtacttcctgaccaacaagattgctgagagcctgggcggcagcggctacagcgtggagcggctgtctgtgccctacgtgccccaggtgacagatgaggaccggctgagcaggaggaagagcatcgtggacacagtgtccatccaggtggacatcctgagcaacaacgtgcccagtgatgatgtggtgagcaacacagaggagatcacctttgaggccctgaagaaggccatcgacaccagcggcatggaggagcaggagaaggagaagaggcggctggtgattgagaagttccagaaggccccctttgaggagattgctgcccagtgtgagagcaaggccaacctgctgcatgaccggctggcccagatcctggagctgaccatccggcccccacccagccccagcggcaccctgaccatcaccagcggccacgcccagtaccagagcgtgcctgtgtatgagatgaagttcccagacctgtgtgtgtactag

SEQ ID NO: 150952 - DNA, 1482 bp, synthetic construct
  misc_feature 1..1482: note = Description of Artificial Sequence: Synthetic coding sequence
  source 1..1482: mol_type = other DNA
atgctgaaggccctcttcctgaccatgctgaccctggccctggtgaagagccaggacacagaggagaccatcacctacacccagtgcacagatggctatgagtgggaccctgtgcggcagcagtgcaaggacattgatgaatgtgacatcgtgcctgatgcctgcaagggcggcatgaagtgtgtgaaccactatggaggctacctgtgcctgcccaagacagcccagatcatcgtgaacaatgagcagccccagcaggagacccagcctgctgagggcaccagcggggccaccactggagtggtggccgccagctccatggccaccagcggcgtgctgcccggcggcggctttgtggccagcgctgctgctgtggccggccctgagatgcagacaggcaggaacaactttgtgatcagaagaaatcctgctgacccccagaggatccccagcaaccccagccaccgcatccagtgtgccgccggctatgagcagagcgagcacaacgtgtgccaggacattgatgagtgcacagctggcacccacaactgcagagctgaccaggtgtgcatcaacctgcggggcagctttgcctgccagtgccccccaggctaccagaagagaggagagcagtgtgtggacattgatgaatgtaccatccccccctactgccaccagagatgtgtgaacaccccaggcagcttctactgccagtgcagccctggcttccagctggccgccaacaactacacctgtgtggacatcaatgaatgtgatgccagcaaccagtgtgcccagcagtgctacaacatcctgggcagcttcatctgccagtgcaaccagggctatgagctgagcagtgaccggctgaactgtgaagatattgatgaatgtaggaccagcagctacctgtgccagtaccagtgtgtgaatgaacctgggaagttcagctgcatgtgcccccagggctaccaggtggtgcgcagcaggacctgccaggacatcaatgaatgtgagaccaccaatgaatgtcgggaggatgagatgtgctggaactaccacggcggcttccgctgctaccccaggaacccctgccaggacccctacatcctgaccccagagaacagatgtgtgtgccctgtgtccaatgccatgtgccgggagctgccccagagcatcgtgtacaagtacatgagcatccgcagtgacagatctgtgcccagcgacatcttccagatccaggccaccaccatctatgccaacaccatcaacaccttccgcatcaagtctggaaatgaaaatggagagttctacctgcggcagaccagccctgtgtctgccatgctggtgctggtgaagagcctgagcggcccccgggagcacatcgtggacctggagatgctgactgtgagcagcatcggcaccttccgcaccagctctgtgctgcggctgaccatcatcgtgggccccttctccttctag

SEQ ID NO: 150953 - DNA, 1482 bp, synthetic construct; identical to SEQ ID NO: 150952
  misc_feature 1..1482: note = Description of Artificial Sequence: Synthetic coding sequence
  source 1..1482: mol_type = other DNA

SEQ ID NO: 150954 - DNA, 1482 bp, synthetic construct; identical to SEQ ID NO: 150952
  misc_feature 1..1482: note = Description of Artificial Sequence: Synthetic coding sequence
  source 1..1482: mol_type = other DNA

SEQ ID NO: 150955 - DNA, 1050 bp, synthetic construct
  misc_feature 1..1050: note = Description of Artificial Sequence: Synthetic coding sequence
  source 1..1050: mol_type = other DNA
atggaggacaccagcgccttcaggaagcagccccggctgctgagcatcatgaacagcctgagcagcgagcacaacgtgtgccaggacattgatgagtgcacagctggcacccacaactgcagagctgaccaggtgtgcatcaacctgcggggcagctttgcctgccagtgccccccaggctaccagaagagaggagagcagtgtgtggacattgatgaatgtaccatccccccctactgccaccagagatgtgtgaacaccccaggcagcttctactgccagtgcagccctggcttccagctggccgccaacaactacacctgtgtggacatcaatgaatgtgatgccagcaaccagtgtgcccagcagtgctacaacatcctgggcagcttcatctgccagtgcaaccagggctatgagctgagcagtgaccggctgaactgtgaagatattgatgaatgtaggaccagcagctacctgtgccagtaccagtgtgtgaatgaacctgggaagttcagctgcatgtgcccccagggctaccaggtggtgcgcagcaggacctgccaggacatcaatgaatgtgagaccaccaatgaatgtcgggaggatgagatgtgctggaactaccacggcggcttccgctgctaccccaggaacccctgccaggacccctacatcctgaccccagagaacagatgtgtgtgccctgtgtccaatgccatgtgccgggagctgccccagagcatcgtgtacaagtacatgagcatccgcagtgacagatctgtgcccagcgacatcttccagatccaggccaccaccatctatgccaacaccatcaacaccttccgcatcaagtctggaaatgaaaatggagagttctacctgcggcagaccagccctgtgtctgccatgctggtgctggtgaagagcctgagcggcccccgggagcacatcgtggacctggagatgctgactgtgagcagcatcggcaccttccgcaccagctctgtgctgcggctgaccatcatcgtgggccccttctccttctag

SEQ ID NO: 150956 - DNA, 159 bp, synthetic construct
  misc_feature 1..159: note = Description of Artificial Sequence: Synthetic coding sequence
  source 1..159: mol_type = other DNA
atgctgaaggccctcttcctgaccatgctgaccctggccctggtgaagagccaggacacagaggagaccatcacctacacccagtgcacagatggctatgagtgggaccctgtgcggcagcagtgcaaggacattgatgaatgtgacatcgtgccctag

SEQ ID NO: 150957 - DNA, 84 bp, synthetic construct
  misc_feature 1..84: note = Description of Artificial Sequence: Synthetic coding sequence
  source 1..84: mol_type = other DNA
atgctgaaggccctcttcctgaccatgctgaccctggccctggtgaagagccaggacacagaggagaccatcacctacacctag

SEQ ID NO: 150958 - DNA, 1068 bp, synthetic construct
  misc_feature 1..1068: note = Description of Artificial Sequence: Synthetic coding sequence
  source 1..1068: mol_type = other DNA
atgaagtgtgtgaaccactatggaggctacctgtgcctgcccaagacagcccagatcatcgtgaacaatgagcagccccagcaggagacccagcctgctgagggcaccagcggggccaccactggagtggtggccgccagctccatggccaccagcggcgtgctgcccggcggcggctttgtggccagcgctgctgctgtggccggccctgagatgcagacaggcaggaacaactttgtgatcagaagaaatcctgctgacccccagaggatccccagcaaccccagccaccgcatccagtgtgccgccggctatgagcagagcgagcacaacgtgtgccaggacattgatgagtgcacagctggcacccacaactgcagagctgaccaggtgtgcatcaacctgcggggcagctttgcctgccagtgccccccaggctaccagaagagaggagagcagtgtgtggacattgatgaatgtaggaccagcagctacctgtgccagtaccagtgtgtgaatgaacctgggaagttcagctgcatgtgcccccagggctaccaggtggtgcgcagcaggacctgccaggacatcaatgaatgtgagaccaccaatgaatgtcgggaggatgagatgtgctggaactaccacggcggcttccgctgctaccccaggaacccctgccaggacccctacatcctgaccccagagaacagatgtgtgtgccctgtgtccaatgccatgtgccgggagctgccccagagcatcgtgtacaagtacatgagcatccgcagtgacagatctgtgcccagcgacatcttccagatccaggccaccaccatctatgccaacaccatcaacaccttccgcatcaagtctggaaatgaaaatggagagttctacctgcggcagaccagccctgtgtctgccatgctggtgctggtgaagagcctgagcggcccccgggagcacatcgtggacctggagatgctgactgtgagcagcatcggcaccttccgcaccagctctgtgctgcggctgaccatcatcgtgggccccttctccttctag

SEQ ID NO: 150959 - DNA, 264 bp, synthetic construct
  misc_feature 1..264: note = Description of Artificial Sequence: Synthetic coding sequence
  source 1..264: mol_type = other DNA
atgctgaaggccctcttcctgaccatgctgaccctggccctggtgaagagccaggacacagaggagaccatcacctacacccagtgcacagatggctatgagtgggaccctgtgcggcagcagtgcaaggacattgatgaatgtgacatcgtgcctgatgcctgcaagggcggcatgaagtgtgtgaaccactatggaggctacctgtgcctgcccaagacagcccagatcatcgtgaacaatgagcagccccagcaggagtag

SEQ ID NO: 150960 - DNA, 519 bp, synthetic construct
  misc_feature 1..519: note = Description of Artificial Sequence: Synthetic coding sequence
  source 1..519: mol_type = other DNA
atgctgaaggccctcttcctgaccatgctgaccctggccctggtgaagagccaggacacagaggagaccatcacctacacccagtgcacagatggctatgagtgggaccctgtgcggcagcagtgcaaggacattgatgaatgtgacatcgtgcctgatgcctgcaagggcggcatgaagtgtgtgaaccactatggaggctacctgtgcctgcccaagacagcccagatcatcgtgaacaatgagcagccccagcaggagacccagcctgctgagggcaccagcggggccaccactggagtggtggccgccagctccatggccaccagcggcgtgctgcccggcggcggctttgtggccagcgctgctgctgtggccggccctgagatgcagacaggcaggaacaactttgtgatcagaagaaatcctgctgacccccagaggatccccagcaaccccagccaccgcatccagtgtgccgccggctatgagcagagcgagcacaacgtgtgccagtag

SEQ ID NO: 150961 - DNA, 360 bp, synthetic construct
  misc_feature 1..360: note = Description of Artificial Sequence: Synthetic coding sequence
  source 1..360: mol_type = other DNA
atgctgaaggccctcttcctgaccatgctgaccctggccctggtgaagagccaggacacagaggagaccatcacctacacccagtgcacagatggctatgagtgggaccctgtgcggcagcagtgcaaggacattgatgaatgtgacatcgtgcctgatgcctgcaagggcggcatgaagtgtgtgaaccactatggaggctacctgtgcctgcccaagacagcccagatcatcgtgaacaatgagcagccccagcaggagacccagcctgctgagggcaccagcggggccaccactggagtggtggccgccagctccatggccaccagcggcgtgctgcccggcggcggctttgtgtag

SEQ ID NO: 150962 - DNA, 321 bp, synthetic construct
  misc_feature 1..321: note = Description of Artificial Sequence: Synthetic coding sequence
  source 1..321: mol_type = other DNA
atgctgaaggccctcttcctgaccatgctgaccctggccctggtgaagagccaggacacagaggagaccatcacctacacccagtgcacagatggctatgagtgggaccctgtgcggcagcagtgcaaggacattgatgaatgtgacatcgtgcctgatgcctgcaagggcggcatgaagtgtgtgaaccactatggaggctacctgtgcctgcccaagacagcccagatcatcgtgaacaatgagcagccccagcaggagacccagcctgctgagggcaccagcggggccaccactggagtggtggccgccagcagctag

SEQ ID NO: 150963 - DNA, 189 bp, synthetic construct
  misc_feature 1..189: note = Description of Artificial Sequence: Synthetic coding sequence
  source 1..189: mol_type = other DNA
atgctgaaggccctcttcctgaccatgctgaccctggccctggtgaagagccaggacacagaggagaccatcacctacacccagtgcacagatggctatgagtgggaccctgtgcggcagcagtgcaaggacattgatgaatgtgacatcgtgcctgatgcctgcaagggcggcatgaagtgtgtgtag

SEQ ID NO: 150964 - DNA, 1332 bp, synthetic construct
  misc_feature 1..1332: note = Description of Artificial Sequence: Synthetic coding sequence
  source 1..1332: mol_type = other DNA
atgctgccctgtgccagctgcctgcccggcagcctgctgctgtgggccctgctgctgctgctgctgggcagcgccagcccccaggacagcgaggagccagacagctacacagagtgcacagatggctatgagtgggaccctgacagccagcactgcagagatgtgaatgaatgtctgaccatccctgaggcctgcaagggggagatgaagtgcatcaaccactatggaggctacctgtgcctgcccaggtctgctgctgtgatcaatgacctgcacggggagggccccccacctcctgtgcccccagcccagcaccccaacccctgccccccaggctatgagccagatgaccaggacagctgtgtggatgtggatgaatgtgcccaggccctgcatgactgccggcccagccaggactgccacaacctgcccggcagctaccagtgcacctgcccagatggctacaggaagattggaccagaatgtgtggacattgatgaatgtcgctaccgctactgccagcaccgctgtgtgaacctgcccggcagcttccgctgccagtgtgagcccggcttccagctgggccccaacaacagaagctgtgtggatgtgaatgaatgtgacatgggcgccccctgtgagcagcgctgcttcaacagctatggcaccttcctgtgccgctgccaccagggctatgagctgcacagagatggcttcagctgcagcgacattgatgagtgcagctacagcagctacctgtgccagtaccgctgcatcaatgagcccggccgcttcagctgccactgcccccagggctaccagctgctggccacccggctgtgccaggacattgatgaatgtgagagcggggcccaccagtgcagcgaggcccagacctgtgtgaacttccacggcggctaccgctgtgtggacaccaacagatgtgtggagccctacatccaggtgtctgagaaccgctgcctgtgcccagccagcaaccccctgtgccgggagcagcccagcagcatcgtgcaccgctacatgaccatcaccagcgagaggtctgtgcctgcagatgtgttccagatccaggccacctctgtgtacccaggggcctacaatgccttccagatccgggccggcaacagccagggcgacttctacatccggcagatcaacaacgtgtctgccatgctggtgctggcccggcctgtgacaggcccccgggagtatgtgctggacctggagatggtgaccatgaacagcctgatgagctaccgggccagctctgtgctgcggctgactgtgtttgtgggcgcctacaccttctag

SEQ ID NO: 150965 - DNA, 609 bp, synthetic construct
  misc_feature 1..609: note = Description of Artificial Sequence: Synthetic coding sequence
  source 1..609: mol_type = other DNA
atgctgccctgtgccagctgcctgcccggcagcctgctgctgtgggccctgctgctgctgctgctgggcagcgccagcccccaggacagcgaggagccagacagctacacagagtgcacagatggctatgagtgggaccctgacagccagcactgcagagatgtgaatgaatgtctgaccatccctgaggcctgcaagggggagatgaagtgcatcaaccactatggaggctacctgtgcctgcccaggtctgctgctgtgatcaatgacctgcacggggagggccccccacctcctgtgcccccagcccagcaccccaacccctgccccccaggctatgagccagatgaccaggacagctgtgtggatgtggatgaatgtgcccaggccctgcatgactgccggcccagccaggactgccacaacctgcccggcagctaccagtgcacctgcccagatggctacaggaagattggaccagaatgtgtggacattgatgaatgtcgctaccgctactgccagcaccgctgtgtgaacctgcccggcagcttccgctgccagtgtgagcccggcttccagctgggccccaacaacagaagctgtgtgtag

SEQ ID NO: 150966 - DNA, 552 bp, synthetic construct
  misc_feature 1..552: note = Description of Artificial Sequence: Synthetic coding sequence
  source 1..552: mol_type = other DNA
atgctgccctgtgccagctgcctgcccggcagcctgctgctgtgggccctgctgctgctgctgctgggcagcgccagcccccaggacagcgaggagccagacagctacacagagtgcacagatggctatgagtgggaccctgacagccagcactgcagagatgtgaatgaatgtctgaccatccctgaggcctgcaagggggagatgaagtgcatcaaccactatggaggctacctgtgcctgcccaggtctgctgctgtgatcaatgacctgcacggggagggccccccacctcctgtgcccccagcccagcaccccaacccctgccccccaggctatgagccagatgaccaggacagctgtgtggatgtggatgaatgtgcccaggccctgcatgactgccggcccagccaggactgccacaacctgcccggcagctaccagtgcacctgcccagatggctacaggaagattggaccagaatgtgtggacattgatgaatgtcgctaccgctactgccagcaccgctgtgtgaacctgcccggcagctag

SEQ ID NO: 150967 - DNA, 1332 bp, synthetic construct; identical to SEQ ID NO: 150964
  misc_feature 1..1332: note = Description of Artificial Sequence: Synthetic coding sequence
  source 1..1332: mol_type = other DNA

SEQ ID NO: 150968 - DNA, 2466 bp, synthetic construct
  misc_feature 1..2466: note = Description of Artificial Sequence: Synthetic coding sequence
  source 1..2466: mol_type = other DNA
atgaggggcttcaacctgctgctcttctggggctgctgcgtgatgcacagctgggagggccacatccggcccaccaggaagcccaacaccaagggcaacaactgccgggacagcaccctgtgcccagcctatgccacctgcaccaacacagtggacagctactactgtgcctgcaagcagggcttcctgagcagcaatggccagaaccacttcaaggaccccggggtgcgctgcaaggacattgatgaatgttcccagagcccccagccctgtggccccaacagcagctgcaagaacctgagcggccgctacaagtgcagctgcctggatggcttcagcagccccactggaaatgactgggtgcctgggaagccaggcaacttcagctgcacagacatcaatgaatgtctgaccagctctgtgtgcccagagcacagcgactgtgtgaacagcatgggcagctacagctgcagctgccaggtgggcttcatcagcaggaacagcacctgtgaagatgtggatgaatgtgccgacccccgggcctgcccagagcacgccacctgcaacaacacagtgggcaactacagctgcttctgcaaccctggctttgagagcagcagcggccacctgtccttccagggcctgaaggccagctgtgaggacattgatgagtgcacagagatgtgccccatcaacagcacctgcaccaacaccccaggcagctacttctgcacctgccaccctggctttgcccccagcaatggccagctgaacttcacagaccagggcgtggagtgccgggacattgatgaatgtcggcaggaccccagcacctgtggccccaacagcatctgcaccaatgccctgggcagctacagctgtggctgcatcgccggcttccaccccaaccctgagggcagccagaaggatggcaacttcagctgccagagggtgctcttcaagtgcaaggaggatgtgatcccagacaacaagcagatccagcagtgccaggagggcacagctgtgaagccagcctacgtgtccttctgtgcccagatcaacaacatcttctctgtgctggacaaggtgtgtgagaacaagaccaccgtggtgtccctgaagaacaccacagagagctttgtgcctgtgctgaagcagatcagcacctggaccaagttcaccaaggaggagaccagcagcctggccaccgtcttcctggagagcgtggagagcatgaccctggccagcttctggaagcccagcgccaacatcaccccagctgtgaggacagagtacctggacatcgagagcaaggtgatcaacaaggaatgttctgaagaaaatgtgaccctggacctggtggccaagggggacaagatgaagattggctgcagcaccatcgaggagagcgagagcacagagaccaccggggtggcctttgtgtcctttgtgggcatggagagcgtgctgaatgaacgcttcttcaaggaccaccaggcccccctgaccaccagcgagatcaagctgaagatgaacagccgggtggtgggcggcatcatgactggagagaagaaggatggcttcagtgaccccatcatctacaccctggagaacatccagcccaagcagaagtttgagcggcccatctgtgtgtcctggagcacagatgtgaagggcggccgctggaccagctttggctgtgtgatcctggaggccagcgagacctacaccatctgcagctgcaaccagatggccaacctggccgtcatcatggccagcggggagctgaccatgggctgtgccatcatcgccggcttcctgcactacctgttcctggcctgcttcttctggatgctggtggaggccgtcatcctcttcctgatggtgaggaacctgaaggtggtgaactacttcagcagcaggaacatcaagatgctgcacatctgtgccttcggctacggcctgcccatgctggtggtggtgatcagcgcctctgtgcagccccagggctacggcatgcacaaccgctgctggctgaacacagaaacaggcttcatctggagcttcctgggccctgtgtgcaccgtgattgtcatcaacagcctgctgctgacctggaccctgtggatcctgcggcagaggctgagctctgtgaatgctgaggtgtccaccctgaaggacacccggctgctgaccttcaaggcctttgcccagctgttcatcctgggctgctcctgggtgctgggcatcttccagatcggccctgtggccggcgtgatggcctacctgttcaccatcatcaacagcctgcagggcgccttcatcttcctgatccactgcctgctgaatggccaggtgcgggaggagtacaagcgctggatcaccgggaagaccaagcccagcagccagagccagaccagccgcatcctgctgagctccatgcccagcgccagcaagacaggatag

SEQ ID NO: 150969 - DNA, 2661 bp, synthetic construct
  misc_feature 1..2661: note = Description of Artificial Sequence: Synthetic coding sequence
  source 1..2661: mol_type = other DNA
atgaggggcttcaacctgctgctcttctggggctgctgcgtgatgcacagctgggagggccacatccggcccaccaggaagcccaacaccaagggcaacaactgccgggacagcaccctgtgcccagcctatgccacctgcaccaacacagtggacagctactactgtgcctgcaagcagggcttcctgagcagcaatggccagaaccacttcaaggaccccggggtgcgctgcaaggacattgatgaatgttcccagagcccccagccctgtggccccaacagcagctgcaagaacctgagcggccgctacaagtgcagctgcctggatggcttcagcagccccactggaaatgactgggtgcctgggaagccaggcaacttcagctgcacagacatcaatgaatgtctgaccagctctgtgtgcccagagcacagcgactgtgtgaacagcatgggcagctacagctgcagctgccaggtgggcttcatcagcaggaacagcacctgtgaagatgtggatgaatgtgccgacccccgggcctgcccagagcacgccacctgcaacaacacagtgggcaactacagctgcttctgcaaccctggctttgagagcagcagcggccacctgtccttccagggcctgaaggccagctgtgaggacattgatgagtgcacagagatgtgccccatcaacagcacctgcaccaacaccccaggcagctacttctgcacctgccaccctggctttgcccccagcaatggccagctgaacttcacagaccagggcgtggagtgccgggacattgatgaatgtcggcaggaccccagcacctgtggccccaacagcatctgcaccaatgccctgggcagctacagctgtggctgcatcgccggcttccaccccaaccctgagggcagccagaaggatggcaacttcagctgccagagggtgctcttcaagtgcaaggaggatgtgatcccagacaacaagcagatccagcagtgccaggagggcacagctgtgaagccagcctacgtgtccttctgtgcccagatcaacaacatcttctctgtgctggacaaggtgtgtgagaacaagaccaccgtggtgtccctgaagaacaccacagagagctttgtgcctgtgctgaagcagatcagcacctggaccaagttcaccaaggaggagaccagcagcctggccaccgtcttcctggagagcgtggagagcatgaccctggccagcttctggaagcccagcgccaacatcaccccagctgtgaggacagagtacctggacatcgagagcaaggtgatcaacaaggaatgttctgaagaaaatgtgaccctggacctggtggccaagggggacaagatgaagattggctgcagcaccatcgaggagagcgagagcacagagaccaccggggtggcctttgtgtcctttgtgggcatggagagcgtgctgaatgaacgcttcttcaaggaccaccaggcccccctgaccaccagcgagatcaagctgaagatgaacagccgggtggtgggcggcatcatgactggagagaagaaggatggcttcagtgaccccatcatctacaccctggagaacatccagcccaagcagaagtttgagcggcccatctgtgtgtcctggagcacagatgtgaagggcggccgctggaccagctttggctgtgtgatcctggaggccagcgagacctacaccatctgcagctgcaaccagatggccaacctggccgtcatcatggccagcggggagctgaccatggacttcagcctgtacatcatcagccacgtgggcatcatcatcagcctggtgtgcctggtgctggccatcgccaccttcctgctgtgccgcagcatccggaaccacaacacctacctgcacctgcacctgtgtgtgtgcctgctgctggccaagaccctcttcctggccggcatccacaagacagacaacaagatgggctgtgccatcatcgccggcttcctgcactacctgttcctggcctgcttcttctggatgctggtggaggccgtcatcctcttcctgatggtgaggaacctgaaggtggtgaactacttcagcagcaggaacatcaagatgctgcacatctgtgccttcggctacggcctgcccatgctggtggtggtgatcagcgcctctgtgcagccccagggctacggcatgcacaaccgctgctggctgaacacagagaccggcttcatctggagcttcctgggccctgtgtgcaccgtcatcgtcatcaacagcctgctgctgacctggaccctgtggatcctgcggcagaggctgagctctgtgaatgctgaggtgtccaccctgaaggacacccggctgctgaccttcaaggcctttgcccagctgttcatcctgggctgctcctgggtgctgggcatcttccagatcggccctgtggccggcgtgatggcctacctgttcaccatcatcaacagcctgcagggcgccttcatcttcctgatccactgcctgctgaatggccaggtgcgggaggagtacaagcgctggatcaccgggaagaccaagcccagcagccagagccagaccagccgcatcctgctgagctccatgcccagcgccagcaagacaggatag

SEQ ID NO: 150970 - DNA, 2604 bp, synthetic construct
  misc_feature 1..2604: note = Description of Artificial Sequence: Synthetic coding sequence
  source 1..2604: mol_type = other DNA
atgaggggcttcaacctgctgctcttctggggctgctgcgtgatgcacagctgggagggccacatccggcccaccaggaagcccaacaccaagggcaacaactgccgggacagcaccctgtgcccagcctatgccacctgcaccaacacagtggacagctactactgtgcctgcaagcagggcttcctgagcagcaatggccagaaccacttcaaggaccccggggtgcgctgcaaggacatcaatgaatgtctgaccagctctgtgtgcccagagcacagcgactgtgtgaacagcatgggcagctacagctgcagctgccaggtgggcttcatcagcaggaacagcacctgtgaagatgtggatgaatgtgccgacccccgggcctgcccagagcacgccacctgcaacaacacagtgggcaactacagctgcttctgcaaccctggctttgagagcagcagcggccacctgtccttccagggcctgaaggccagctgtgaggacattgatgagtgcacagagatgtgccccatcaacagcacctgcaccaacaccccaggcagctacttctgcacctgccaccctggctttgcccccagcaatggccagctgaacttcacagaccagggcgtggagtgccgggacattgatgaatgtcggcaggaccccagcacctgtggccccaacagcatctgcaccaatgccctgggcagctacagctgtggctgcatcgccggcttccaccccaaccctgagggcagccagaaggatggcaacttcagctgccagagggtgctcttcaagtgcaaggaggatgtgatcccagacaacaagcagatccagcagtgccaggagggcacagctgtgaagccagcctacgtgtccttctgtgcccagatcaacaacatcttctctgtgctggacaaggtgtgtgagaacaagaccaccgtggtgtccctgaagaacaccacagagagctttgtgcctgtgctgaagcagatcagcacctggaccaagttcaccaaggaggagaccagcagcctggccaccgtcttcctggagagcgtggagagcatgaccctggccagcttctggaagcccagcgccaacatcaccccagctgtgaggacagagtacctggacatcgagagcaaggtgatcaacaaggaatgttctgaagaaaatgtgaccctggacctggtggccaagggggacaagatgaagattggctgcagcaccatcgaggagagcgagagcacagagaccaccggggtggcctttgtgtcctttgtgggcatggagagcgtgctgaatgaacgcttcttcaaggaccaccaggcccccctgaccaccagcgagatcaagctgaagatgaacagccgggtggtgggcggcatcatgactggagagaagaaggatggcttcagtgaccccatcatctacaccctggagaacatccagcccaagcagaagtttgagcggcccatctgtgtgtcctggagcacagatgtgaagggcggccgctggaccagctttggctgtgtgatcctggaggccagcgagacctacaccatctgcagctgcaaccagatggccaacctggccgtcatcatggccagcggggagctgaccatggacttcagcctgtacatcatcagccacgtgggcatcatcatcagcctggtgtgcctggtgctggccatcgccaccttcctgctgtgccgcagcatccggaaccacaacacctacctgcacctgcacctgtgtgtgtgcctgctgctggccaagaccctcttcctggccggcatccacaagacagacaacaagatgggctgtgccatcatcgccggcttcctgcactacctgttcctggcctgcttcttctggatgctggtggaggccgtcatcctcttcctgatggtgaggaacctgaaggtggtgaactacttcagcagcaggaacatcaagatgctgcacatctgtgccttcggctacggcctgcccatgctggtggtggtgatcagcgcctctgtgcagccccagggctacggcatgcacaaccgctgctggctgaacacagagaccggcttcatctggagcttcctgggccctgtgtgcaccgtcatcgtggtgtccaagtactacaacagcctggccaagtgtgtgctgaaggaggagcagggcgacctgcgggacctggagttccctggcacctgtgccgctgagcgcatcaacagcctgctgctgacctggaccctgtggatcctgcggcagaggctgagctctgtgaatgctgaggtgtccaccctgaaggacacccggctgctgaccttcaaggcctttgcccagctgttcatcctgggctgctcctgggtgctgggcatcttccagatcggccctgtggccggcgtgatggcctacctgttcaccatcatcaacagcctgcagggcgccttcatcttcctgatccactgcctgctgaatggccaggtgcgggaggagtacaagcgctggatcaccgggaagaccaagcccagcagccagagccagaccagccgcatcctgctgagctccatgcccagcgccagcaagacaggatag

SEQ ID NO: 150971 - DNA, 2238 bp, synthetic construct
  misc_feature 1..2238: note = Description of Artificial Sequence: Synthetic coding sequence
  source 1..2238: mol_type = other DNA
atgaggggcttcaacctgctgctcttctggggctgctgcgtgatgcacagctgggagggccacatccggcccaccaggaagcccaacaccaagggcaacaactgccgggacagcaccctgtgcccagcctatgccacctgcaccaacacagtggacagctactactgtgcctgcaagcagggcttcctgagcagcaatggccagaaccacttcaaggaccccggggtgcgctgcaaggacattgatgaatgtacagagatgtgccccatcaacagcacctgcaccaacaccccaggcagctacttctgcacctgccaccctggctttgcccccagcaatggccagctgaacttcacagaccagggcgtggagtgccgggacattgatgagtgccggcaggaccccagcacctgtggccccaacagcatctgcaccaatgccctgggcagctacagctgtggctgcatcgccggcttccaccccaaccctgagggcagccagaaggatggcaacttcagctgccagagggtgctcttcaagtgcaaggaggatgtgatcccagacaacaagcagatccagcagtgccaggagggcacagctgtgaagccagcctacgtgtccttctgtgcccagatcaacaacatcttctctgtgctggacaaggtgtgtgagaacaagaccaccgtggtgtccctgaagaacaccacagagagctttgtgcctgtgctgaagcagatcagcacctggaccaagttcaccaaggaggagaccagcagcctggccaccgtcttcctggagagcgtggagagcatgaccctggccagcttctggaagcccagcgccaacatcaccccagctgtgaggacagagtacctggacatcgagagcaaggtgatcaacaaggagtgcagcgaggagaatgtgaccctggacctggtggccaagggggacaagatgaagattggctgcagcaccatcgaggagagcgagagcacagagaccactggagtggcctttgtgtcctttgtgggcatggagagcgtgctgaatgaacgcttcttcaaggaccaccaggcccccctgaccaccagcgagatcaagctgaagatgaacagccgggtggtgggcggcatcatgaccggggagaagaaggatggcttcagtgaccccatcatctacaccctggagaacatccagcccaagcagaagtttgagcggcccatctgtgtgtcctggagcacagatgtgaagggcggccgctggaccagctttggctgcgtcatcctggaggccagcgagacctacaccatctgcagctgcaaccagatggccaacctggccgtcatcatggccagcggggagctgaccatggacttcagcctgtacatcatcagccacgtgggcatcatcatcagcctggtgtgcctggtgctggccatcgccaccttcctgctgtgccgcagcatccggaaccacaacacctacctgcacctgcacctgtgtgtgtgcctgctgctggccaagaccctcttcctggccggcatccacaagacagacaacaagatgggctgtgccatcatcgccggcttcctgcactacctgttcctggcctgcttcttctggatgctggtggaggccgtcatcctcttcctgatggtgaggaacctgaaggtggtgaactacttcagcagcaggaacatcaagatgctgcacatctgtgccttcggctacggcctgcccatgctggtggtggtgatcagcgcctctgtgcagccccagggctacggcatgcacaaccgctgctggctgaacacagaaacaggcttcatctggagcttcctgggccctgtgtgcaccgtgattgtcatcaacagcctgctgctgacctggaccctgtggatcctgcggcagaggctgagctctgtgaatgctgaggtgtccaccctgaaggacacccggctgctgaccttcaaggcctttgcccagctgttcatcctgggctgctcctgggtgctgggcatcttccagatcggccctgtggccggcgtgatggcctacctgttcaccatcatcaacagcctgcagggcgccttcatcttcctgatccactgcctgctgaatggccaggtgcgggaggagtacaagcgctggatcaccgggaagaccaagcccagcagccagagccagaccagccgcatcctgctgagctccatgcccagcgccagcaagacaggatag

SEQ ID NO: 150972 - DNA, 2130 bp, synthetic construct
  misc_feature 1..2130: note = Description of Artificial Sequence: Synthetic coding sequence
  source 1..2130: mol_type = other DNA
atgaggggcttcaacctgctgctcttctggggctgctgcgtgatgcacagctgggagggccacatccggcccaccaggaagcccaacaccaagggcaacaactgccgggacagcaccctgtgcccagcctatgccacctgcaccaacacagtggacagctactactgtgcctgcaagcagggcttcctgagcagcaatggccagaaccacttcaaggaccccggggtgcgctgcaaggacattgatgaatgttcccagagcccccagccctgtggccccaacagcagctgcaagaacctgagcggccgctacaagtgcagctgcctggatggcttcagcagccccactggaaatgactgggtgcctgggaagccaggcaacttcagctgcacagacatcaatgaatgtctgaccagccgggtgctcttcaagtgcaaggaggatgtgatcccagacaacaagcagatccagcagtgccaggagggcacagctgtgaagccagcctacgtgtccttctgtgcccagatcaacaacatcttctctgtgctggacaaggtgtgtgagaacaagaccaccgtggtgtccctgaagaacaccacagagagctttgtgcctgtgctgaagcagatcagcacctggaccaagttcaccaaggaggagaccagcagcctggccaccgtcttcctggagagcgtggagagcatgaccctggccagcttctggaagcccagcgccaacatcaccccagctgtgaggacagagtacctggacatcgagagcaaggtgatcaacaaggagtgcagcgaggagaatgtgaccctggacctggtggccaagggggacaagatgaagattggctgcagcaccatcgaggagagcgagagcacagagaccactggagtggcctttgtgtcctttgtgggcatggagagcgtgctgaatgaacgcttcttcaaggaccaccaggcccccctgaccaccagcgagatcaagctgaagatgaacagccgggtggtgggcggcatcatgaccggggagaagaaggatggcttcagtgaccccatcatctacaccctggagaacatccagcccaagcagaagtttgagcggcccatctgtgtgtcctggagcacagatgtgaagggcggccgctggaccagctttggctgcgtcatcctggaggccagcgagacctacaccatctgcagctgcaaccagatggccaacctggccgtcatcatggccagcggggagctgaccatggacttcagcctgtacatcatcagccacgtgggcatcatcatcagcctggtgtgcctggtgctggccatcgccaccttcctgctgtgccgcagcatccggaaccacaacacctacctgcacctgcacctgtgtgtgtgcctgctgctggccaagaccctcttcctggccggcatccacaagacagacaacaagatgggctgtgccatcatcgccggcttcctgcactacctgttcctggcctgcttcttctggatgctggtggaggccgtcatcctcttcctgatggtgaggaacctgaaggtggtgaactacttcagcagcaggaacatcaagatgctgcacatctgtgccttcggctacggcctgcccatgctggtggtggtgatcagcgcctctgtgcagccccagggctacggcatgcacaaccgctgctggctgaacacagaaacaggcttcatctggagcttcctgggccctgtgtgcaccgtgattgtcatcaacagcctgctgctgacctggaccctgtggatcctgcggcagaggctgagctctgtgaatgctgaggtgtccaccctgaaggacacccggctgctgaccttcaaggcctttgcccagctgttcatcctgggctgctcctgggtgctgggcatcttccagatcggccctgtggccggcgtgatggcctacctgttcaccatcatcaacagcctgcagggcgccttcatcttcctgatccactgcctgctgaatggccaggtgcgggaggagtacaagcgctggatcaccgggaagaccaagcccagcagccagagccagaccagccgcatcctgctgagctccatgcccagcgccagcaagacaggatag

SEQ ID NO: 150973 - DNA, 2466 bp, synthetic construct; identical to SEQ ID NO: 150968
  misc_feature 1..2466: note = Description of Artificial Sequence: Synthetic coding sequence
  source 1..2466: mol_type = other DNA

SEQ ID NO: 150974 - DNA, 1662 bp, synthetic construct
  misc_feature 1..1662: note = Description of Artificial Sequence: Synthetic coding sequence
  source 1..1662: mol_type = other DNA
atgcccctgccctggagcctggccctgcccctgctgctgtcctgggtggccggcggctttggaaatgctgccagcgcccggcaccacggcctgctggccagcgcccggcagcccggggtgtgccactacggcaccaagctggcctgctgctacggctggaggaggaacagcaagggcgtgtgtgaggccacctgtgagcccggctgcaagtttggagaatgtgtgggccccaacaagtgccgctgcttccctggctacacaggcaagacctgcagccaggatgtgaatgaatgtggcatgaagccccggccctgccagcaccgctgtgtgaacacccacggcagctacaagtgcttctgcctgagcggccacatgctgatgccagatgccacctgtgtgaacagcaggacctgtgccatgatcaactgccagtacagctgtgaggacacagaggagggcccccagtgcctgtgccccagcagcggcctgcggctggcccccaacggccgggactgcctggacattgatgaatgtgccagcggcaaggtgatctgcccctacaacagaagatgtgtgaacaccttcggcagctactactgcaagtgccacatcggctttgagctgcagtacatcagcggccgctatgactgcatcgacatcaatgaatgtaccatggacagccacacctgcagccaccacgccaactgcttcaacacccagggcagcttcaagtgcaagtgcaagcagggctacaagggaaatggcctgcgctgcagcgccatcccagaaaattctgtgaaggaggtgctgcgggcccctggcaccatcaaggaccgcatcaagaagctgctggcccacaagaacagcatgaagaagaaggccaagatcaagaatgtgaccccagagcccaccaggacccccacccccaaggtgaacctgcagcccttcaactatgaggagatcgtgtccagaggaggcaacagccatggaggcaagaagggaaatgaggagaagatgaaggagggcctggaggatgagaagcgggaggagaaggccctgaagaatgacatcgaggagaggagcctgcggggagatgtgttcttccccaaggtgaatgaggccggggagtttggcctcatcctggtgcagaggaaggccctgaccagcaagctggagcacaaggacctgaacatctctgtggactgcagcttcaaccacggcatctgtgactggaagcaggaccgggaggatgactttgactggaacccagctgaccgggacaatgccatcggcttctacatggctgtgcctgccctggccggccacaagaaggacatcggccgcctgaagctgctgctgcctgacctgcagccccagagcaacttctgcctgctgtttgactaccgcctggccggggacaaggtgggcaagctgcgggtgtttgtgaagaacagcaacaatgccctggcctgggagaagaccaccagtgaagatgagaagtggaagacaggcaagatccagctgtaccagggcacagatgccaccaagagcatcatctttgaggccgagcggggcaagggcaagacaggagaaattgctgtggatggagtgctgctggtgtctggcctgtgcccagacagcctgctgtctgtggatgactag

SEQ ID NO: 150975 - DNA, 1665 bp, synthetic construct
  misc_feature 1..1665: note = Description of Artificial Sequence: Synthetic coding sequence
  source 1..1665: mol_type = other DNA
atgcccctgccctggagcctggccctgcccctgctgctgtcctgggtggccggcggctttggaaatgctgccagcgcccggcaccacggcctgctggccagcgcccggcagcccggggtgtgccactacggcaccaagctggcctgctgctacggctggaggaggaacagcaagggcgtgtgtgaggccacctgtgagcccggctgcaagtttggagaatgtgtgggccccaacaagtgccgctgcttccctggctacacaggcaagacctgcagccaggatgtgaatgaatgtggcatgaagccccggccctgccagcaccgctgtgtgaacacccacggcagctacaagtgcttctgcctgagcggccacatgctgatgccagatgccacctgtgtgaacagcaggacctgtgccatgatcaactgccagtacagctgtgaggacacagaggagggcccccagtgcctgtgccccagcagcggcctgcggctggcccccaacggccgggactgcctggacattgatgaatgtgccagcggcaaggtgatctgcccctacaacagaagatgtgtgaacaccttcggcagctactactgcaagtgccacatcggctttgagctgcagtacatcagcggccgctatgactgcatcgacatcaatgaatgtaccatggacagccacacctgcagccaccacgccaactgcttcaacacccagggcagcttcaagtgcaagtgcaagcagggctacaagggaaatggcctgcgctgcagcgccatcccagaaaattctgtgaaggaggtgctgcgggcccctggcaccatcaaggaccgcatcaagaagctgctggcccacaagaacagcatgaagaagaaggccaagatcaagaatgtgaccccagagcccaccaggacccccacccccaaggtgaacctgcagcccttcaactatgaggagatcgtgtccagaggaggcaacagccatggaggcaagaagggaaatgaggagaagatgaaggagggcctggaggatgagaagcgggaggagaaggccctgaagaatgacatcgaggagaggagcctgcggggagatgtgttcttccccaaggtgaatgaggccggggagtttggcctcatcctggtgcagaggaaggccctgaccagcaagctggagcacaaggctgacctgaacatctctgtggactgcagcttcaaccacggcatctgtgactggaagcaggacagagaagatgactttgactggaacccagctgaccgggacaatgccatcggcttctacatggctgtgcctgccctggccggccacaagaaggacatcggccgcctgaagctgctgctgcctgacctgcagccccagagcaacttctgcctgctgtttgactaccgcctggccggggacaaggtgggcaagctgcgggtgtttgtgaagaacagcaacaatgccctggcctgggagaagaccaccagtgaagatgagaagtggaagacaggcaagatccagctgtaccagggcacagatgccaccaagagcatcatctttgaagctgagcggggcaagggcaagacaggagaaattgctgtggatggagtgctgctggtgtctggcctgtgcccagacagcctgctgtctgtggatgactag

SEQ ID NO: 150976 - DNA, 822 bp, synthetic construct
  misc_feature 1..822: note = Description of Artificial Sequence: Synthetic coding sequence
  source 1..822: mol_type = other DNA
atgaggggcagccaggaggtgctgctgatgtggctgctggtgctggccgtgggcggcacagagcacgcctaccggcccggccggcgggtgtgtgctgtgcgggcccacggggaccctgtgtctgagagctttgtgcagagggtgtaccagcccttcctgaccacctgtgatggccaccgggcctgcagcacctaccgcaccatctacagaacagcctaccgccgcagccctggcctggccccagcccggcccaggtatgcctgctgccccggctggaagaggaccagcggcctgcccggggcctgtggggccgccatctgccagcccccctgcagaaatggaggcagctgtgtgcagcccggccgctgccgctgcccagctggctggaggggggacacctgccagagtgatgtggatgagtgcagcgcccggcggggcggctgcccccagagatgtgtgaacacagctggcagctactggtgccagtgctgggagggccacagcctgtctgcagatggcaccctgtgtgtgcccaagggcggccccccccgggtggcccccaaccccaccggggtggacagcgccatgaaggaggaggtgcagaggctgcagagccgggtggacctgctggaggagaagctgcagctggtgctggcccccctgcacagcctggccagccaggccctggagcacggcctgcctgaccccggcagcctgctggtgcacagcttccagcagctgggcagaattgacagcctgtctgagcagatctccttcctggaggagcagctgggcagctgcagctgcaagaaggacagctag

SEQ ID NO: 150977 - DNA, 822 bp, synthetic construct; identical to SEQ ID NO: 150976
  misc_feature 1..822: note = Description of Artificial Sequence: Synthetic coding sequence
  source 1..822: mol_type = other DNA

SEQ ID NO: 150978 - DNA, 822 bp, synthetic construct; identical to SEQ ID NO: 150976
  misc_feature 1..822: note = Description of Artificial Sequence: Synthetic coding sequence
  source 1..822: mol_type = other DNA

SEQ ID NO: 150979 - DNA, 822 bp, synthetic construct; identical to SEQ ID NO: 150976
  misc_feature 1..822: note = Description of Artificial Sequence: Synthetic coding sequence
  source 1..822: mol_type = other DNA

SEQ ID NO: 150980 - DNA, 882 bp, synthetic construct
  misc_feature 1..882: note = Description of Artificial Sequence: Synthetic coding sequence
  source 1..882: mol_type = other DNA
atgggcagcagagctgagctgtgcaccctgctgggcggcttctccttcctgctgctgctgatccctggagagggcgccaagggcggcagcctgcgggagagccagggcgtgtgcagcaagcagaccctggtggtgcccctgcactacaatgaaagctacagccagcctgtgtacaagccctacctgaccctgtgtgccggccgccgcatctgcagcacctaccgcaccatgtacagagtgatgtggagggaggtgcggcgggaggtgcagcagacccatgctgtgtgctgccagggctggaagaagaggcaccctggggccctgacctgtgaggccatctgtgccaagccctgcctgaatggaggagtgtgtgtgcggccagaccagtgtgaatgtgcccctggctggggcggcaagcactgccacgtggatgtggatgaatgtaggaccagcatcaccctgtgcagccaccactgcttcaacacagctggcagcttcacctgtggctgcccccatgacctggtgctgggcgtggatggccgcacctgcatggagggcagccctgagccccccaccagcgccagcatcctgtctgtggccgtgcgggaggccgagaaggatgagcgggccctgaagcaggagatccacgagctgcggggccgcctggagcggctggagcagtgggccggccaggccggggcctgggtgcgggctgtgctgcctgtgcccccagaggagctgcagcctgagcaggtggccgagctgtggggccgcggggaccgcatcgagagcctgagtgaccaggtgctgctgctggaggagcggctgggcgcctgcagctgtgaggacaacagcctgggcctgggcgtgaaccacaggtag

SEQ ID NO: 150981 - DNA, 882 bp, synthetic construct; identical to SEQ ID NO: 150980
  misc_feature 1..882: note = Description of Artificial Sequence: Synthetic coding sequence
  source 1..882: mol_type = other DNA

SEQ ID NO: 150982 - DNA, 882 bp, synthetic construct
  misc_feature 1..882: note = Description of Artificial Sequence: Synthetic coding sequence
  source 1..882: mol_type = other DNA
atgggcagcagagctgagctgtgcaccctgctgggcggcttctccttcctgctgctgctgatccctggagagggcgccaagggcggcagcctgcgggagagccagggcgtgtgcagcaagcagaccctggtggtgcccctgcactacaatgaaagctacagccagcctgtgtacaagccctacctgaccctgtgtgccggccgccgcatctgcagcacctaccgcaccatgtacagagtgatgtggagggaggtgaagcgggaggtgcagcagacccatgctgtgtgctgccagggctggaagaagaggcaccctggggccctgacctgtgaggccatctgtgccaagccctgcctgaatggaggagtgtgtgtgcggccagaccagtgtgaatgtgcccctggctggggcggcaagcactgccacgtggatgtggatgaatgtaggaccagcatcaccctgtgcagccaccactgcttcaacacagctggcagcttcacctgtggctgcccccatgacctggtgctgggcgtggatggccgcacctgcatggagggcagccctgagccccccaccagcgccagcatcctgtctgtggccgtgcgggaggccgagaaggatgagcgggccctgaagcaggagatccacgagctgcggggccgcctggagcggctggagcagtgggccggccaggccggggcctgggtgcgggctgtgctgcctgtgcccccagaggagctgcagcctgagcaggtggccgagctgtggggccgcggggaccgcatcgagagcctgagtgaccaggtgctgctgctggaggagcggctgggcgcctgcagctgtgaggacaacagcctgggcctgggcgtgaaccacaggtag

SEQ ID NO: 150983 - DNA, 777 bp, synthetic construct
  misc_feature 1..777: note = Description of Artificial Sequence: Synthetic coding sequence
  source 1..777: mol_type = other DNA
atgggcagcagagctgagctgtgcaccctgctgggcggcttctccttcctgctgctgctgatccctggagagggcgccaagggcggcagcctgcgggagagccagggcgtgtgcagcaagcagaccctggtggtgcccctgcactacaatgaaagctacagccagcctgtgtacaagccctacctgaccctgtgtgccggccgccgcatctgcagcacctaccgcaccatgtacagagtgatgtggagggaggtgcggcgggaggtgcagcagacccatgctgtgtgctgccagggctggaagaagaggcaccctggggccctgacctgtgaggccatctgtgccaagccctgcctgaatggaggagtgtgtgtgcggccagaccagtgtgaatgtgcccctggctggggcggcaagcactgccacgtgggcagcttcacctgtggctgcccccatgacctggtgctgggcgtggatggccgcacctgcatggagggcagccctgagccccccaccagcgccagcatcctgtctgtggccgtgcgggaggccgagaaggatgagcgggccctgaagcaggagatccacgagctgcggggccgcctggagcggctggagcagtgggccggccaggccggggcctgggtgcgggctgtgctgcctgtgcccccagaggagctgcagcctgagcaggtggccgagctgtggggccgcggggaccgcatcgagagcctgagtgaccaggtgctgctgctggaggagcggctgggcgcctag

SEQ ID NO: 150984 - DNA, 882 bp, synthetic construct; identical to SEQ ID NO: 150980
  misc_feature 1..882: note = Description of Artificial Sequence: Synthetic coding sequence
  source 1..882: mol_type = other DNA

SEQ ID NO: 150985 - DNA, 882 bp, synthetic construct; identical to SEQ ID NO: 150980
  misc_feature 1..882: note = Description of Artificial Sequence: Synthetic coding sequence
  source 1..882: mol_type = other DNA

SEQ ID NO: 150986 - DNA, 882 bp, synthetic construct; identical to SEQ ID NO: 150980
  misc_feature 1..882: note = Description of Artificial Sequence: Synthetic coding sequence
  source 1..882: mol_type = other DNA

SEQ ID NO: 150987 - DNA, 777 bp, synthetic construct; identical to SEQ ID NO: 150983
  misc_feature 1..777: note = Description of Artificial Sequence: Synthetic coding sequence
  source 1..777: mol_type = other DNA

SEQ ID NO: 150988 - DNA, 777 bp, synthetic construct; identical to SEQ ID NO: 150983
  misc_feature 1..777: note = Description of Artificial Sequence: Synthetic coding sequence
  source 1..777: mol_type = other DNA

SEQ ID NO: 150989 - DNA, 777 bp, synthetic construct
  misc_feature 1..777: note = Description of Artificial Sequence: Synthetic coding sequence
  source 1..777: mol_type = other DNA
atgggcagcagagctgagctgtgcaccctgctgggcggcttctccttcctgctgctgctgatccctggagagggcgccaagggcggcagcctgcgggagagccagggcgtgtgcagcaagcagaccctggtggtgcccctgcactacaatgaaagctacagccagcctgtgtacaagccctacctgaccctgtgtgccggccgccgcatctgcagcacctaccgcaccatgtacagagtgatgtggagggaggtgaagcgggaggtgcagcagacccatgctgtgtgctgccagggctggaagaagaggcaccctggggccctgacctgtgaggccatctgtgccaagccctgcctgaatggaggagtgtgtgtgcggccagaccagtgtgaatgtgcccctggctggggcggcaagcactgccacgtgggcagcttcacctgtggctgcccccatgacctggtgctgggcgtggatggccgcacctgcatggagggcagccctgagccccccaccagcgccagcatcctgtctgtggccgtgcgggaggccgagaaggatgagcgggccctgaagcaggagatccacgagctgcggggccgcctggagcggctggagcagtgggccggccaggccggggcctgggtgcgggctgtgctgcctgtgcccccagaggagctgcagcctgagcaggtggccgagctgtggggccgcggggaccgcatcgagagcctgagtgaccaggtgctgctgctggaggagcggctgggcgcctag

SEQ ID NO: 150990 - DNA, 882 bp, synthetic construct; identical to SEQ ID NO: 150980
  misc_feature 1..882: note = Description of Artificial Sequence: Synthetic coding sequence
  source 1..882: mol_type = other DNA

SEQ ID NO: 150991 - DNA, 882 bp, synthetic construct; identical to SEQ ID NO: 150980
  misc_feature 1..882: note = Description of Artificial Sequence: Synthetic coding sequence
  source 1..882: mol_type = other DNA

SEQ ID NO: 150992 - DNA, 882 bp, synthetic construct; identical to SEQ ID NO: 150980
  misc_feature 1..882: note = Description of Artificial Sequence: Synthetic coding sequence
  source 1..882: mol_type = other DNA

SEQ ID NO: 150993 - DNA, 882 bp, synthetic construct; identical to SEQ ID NO: 150982
  misc_feature 1..882: note = Description of Artificial Sequence: Synthetic coding sequence
  source 1..882: mol_type = other DNA

SEQ ID NO: 150994 - DNA, 882 bp, synthetic construct; identical to SEQ ID NO: 150980
  misc_feature 1..882: note = Description of Artificial Sequence: Synthetic coding sequence
  source 1..882: mol_type = other DNA

SEQ ID NO: 150995 - DNA, 882 bp, synthetic construct; identical to SEQ ID NO: 150980
  misc_feature 1..882: note = Description of Artificial Sequence: Synthetic coding sequence
  source 1..882: mol_type = other DNA

SEQ ID NO: 150996 - DNA, 882 bp, synthetic construct; identical to SEQ ID NO: 150980
  misc_feature 1..882: note = Description of Artificial Sequence: Synthetic coding sequence
  source 1..882: mol_type = other DNA

SEQ ID NO: 150997 - DNA, 777 bp, synthetic construct; identical to SEQ ID NO: 150983
  misc_feature 1..777: note = Description of Artificial Sequence: Synthetic coding sequence
  source 1..777: mol_type = other DNA

SEQ ID NO: 150998 - DNA, 882 bp, synthetic construct; identical to SEQ ID NO: 150980
  misc_feature 1..882: note = Description of Artificial Sequence: Synthetic coding sequence
  source 1..882: mol_type = other DNA

SEQ ID NO: 150999 - DNA, 1281 bp, synthetic construct
  misc_feature 1..1281: note = Description of Artificial Sequence: Synthetic coding sequence
  source 1..1281: mol_type = other DNA
atggccaatgattctgggggccctgggggccccagccccagcgagcgggaccggcagtactgtgagctgtgtgggaagatggagaacctgctgcgctgcagccgctgccgcagcagcttctactgctgcaaggagcaccagaggcaggactggaagaagcacaagctggtgtgccagggcagcgagggcgccctgggccatggagtgggcccccaccagcacagcggccctgcccctcctgctgctgtgcccccaccccgggccggggcccgggagcccaggaaggctgctgcccggcgggacaatgccagcggagatgctgccaagggcaaggtgaaggccaagcccccagctgaccctgctgctgctgccagcccctgcagagctgctgctgggggccagggcagcgctgtggccgctgaggccgagcccgggaaggaggagcccccagcccggagcagcctcttccaggagaaggccaacctgtacccacccagcaacaccccaggagatgccctgagccctgggggcggcctgcggcccaacggccagaccaagcccctgcctgccctgaagctggccctggagtacatcgtgccctgcatgaacaagcacggcatctgtgtggtggatgacttcctgggcaaggagaccggccagcagattggagatgaggtgcgggccctgcatgacaccgggaagttcacagatggccagctggtgtcccagaagagtgacagcagcaaggacatccggggggacaagatcacctggattgagggcaaggagcccggctgtgagaccatcggcctgctgatgagctccatggatgacctgatccgccactgcaatggcaagctgggcagctacaagatcaatggaagaaccaaggccatggtggcctgctacccaggaaatggcaccggctacgtgagacatgtggacaaccccaatggagatggccgctgtgtgacctgcatctactacctgaacaaggactgggatgccaaggtgtctgggggcatcctgcgcatcttccctgagggcaaggcccagtttgctgacatcgagcccaagtttgaccggctgctcttcttctggagcgacagaagaaacccccatgaggtgcagcctgcctatgccaccaggtatgccatcaccgtgtggtactttgatgctgatgagcgggcccgggccaaggtgaagtacctgactggagagaagggcgtgcgggtggagctgaacaagcccagcgacagcgtgggcaaggatgtgttctag

SEQ ID NO: 151000 - DNA, 216 bp, synthetic construct
  misc_feature 1..216: note = Description of Artificial Sequence: Synthetic coding sequence
  source 1..216: mol_type = other DNA
atgaacaagcacggcatctgtgtggtggatgacttcctgggcaaggagaccggccagcagattggagatgaggtgcgggccctgcatgacaccgggaagttcacagatggctcctggagcgcccggcgggtgacccggcccaggaccagcgaggccatccgcagccctggcagccgggcccggagccctgctgccaagcccctgggctgcagctag

SEQ ID NO: 151001 - DNA, 1224 bp, synthetic construct
  misc_feature 1..1224: note = Description of Artificial Sequence: Synthetic coding sequence
  source 1..1224: mol_type = other DNA
atggacagcccctgccagccccagcccctgagccaggccctgccccagctgcccggcagcagcagcgagcccctggagcctgagcccggccgggccaggatgggcgtggagagctacctgccctgccccctgctgcccagctaccactgccctggggtgcccagcgaggccagcgctggcagcggcaccccccgggccacagccaccagcaccacagccagccccctgagagatggctttggaggccaggacggcggggagctgcggcccctgcagagcgagggcgctgctgccctggtgaccaagggctgccagaggctggccgcccagggcgcccggcctgaggcccccaagaggaagtgggccgaggatggaggagatgcccccagccccagcaagaggccctgggcccggcaggagaaccaggaggccgagcgggagggcggcatgagctgcagctgcagcagcggcagcggggaggccagcgctggcctgatggaggaggccctgcccagcgcccctgagcggctggccctggactacatcgtgccctgcatgagatactacggcatctgtgtgaaggacagcttcctgggcgccgccctgggcggccgggtgctggccgaggtggaggccctgaagaggggcggccgcctgagagatggccagctggtgtcccagagggccatccccccaagaagcatccggggggaccagatcgcctgggtggagggccacgagcccggctgccgcagcattggagccctgatggcccacgtggatgctgtgatccgccactgtgccggccgcctgggcagctatgtgatcaatggaagaaccaaggccatggtggcctgctacccaggaaatggcctgggctacgtgagacatgtggacaacccccatggagatggccgctgcatcacctgcatctactacctgaaccagaactgggatgtgaaggtgcatggaggcctgctgcagatcttccctgagggccggcctgtggtggccaacatcgagcccctgtttgaccggctgctgatcttctggagcgacagaagaaacccccatgaggtgaagccagcctatgccaccaggtatgccatcaccgtgtggtactttgatgccaaggagagagctgctgccaaggacaagtaccagctggccagcggccagaagggcgtgcaggtgcctgtgtcccagccccccacccccacctag

SEQ ID NO: 151002 - DNA, 1224 bp, synthetic construct; identical to SEQ ID NO: 151001
  misc_feature 1..1224: note = Description of Artificial Sequence: Synthetic coding sequence
  source 1..1224: mol_type = other DNA

SEQ ID NO: 151003 - DNA, 720 bp, synthetic construct
  misc_feature 1..720: note = Description of Artificial Sequence: Synthetic coding sequence
  source 1..720: mol_type = other DNA
atgcccctgggccacatcatgaggctggacctggagaagatcgccctggagtacatcgtgccctgcctgcacgaggtgggcttctgctacctggacaacttcctgggggaggtggtgggggactgtgtgctggagcgggtgaagcagctgcactgcacaggagccctgagagatggccagctggccggcccccgggccggcgtgtccaagaggcacctgcggggggaccagatcacctggattggaggaaatgaggagggctgtgaggccatctccttcctgctgagcctgattgaccggctggtgctgtactgcggcagccggctgggcaagtactacgtgaaggagaggagcaaggccatggtggcctgctacccaggaaatggcaccggctacgtgagacatgtggacaaccccaatggagatggccgctgcatcacctgcatctactacctgaacaagaactgggatgccaagctgcatggaggcatcctgcgcatcttccctgagggcaagagcttcatcgcagatgtggagcccatctttgaccggctgctcttcttctggagcgacagaagaaacccccatgaggtgcagcccagctatgccaccaggtatgccatgacagtgtggtactttgatgctgaggagagagctgaggccaagaagaagttcaggaacctgaccaggaagacagagagcgccctgacagaggactag

SEQ ID NO: 151004 - DNA, 720 bp, synthetic construct; identical to SEQ ID NO: 151003
  misc_feature 1..720: note = Description of Artificial Sequence: Synthetic coding sequence
  source 1..720: mol_type = other DNA

SEQ ID NO: 151005 - DNA, 1605 bp, synthetic construct
  misc_feature 1..1605: note = Description of Artificial Sequence: Synthetic coding sequence
  source 1..1605: mol_type = other DNA
atgttctcctgggtgtccaaggatgcccggaggaagaaggagcctgagctgttccagacagtggccgagggcctgcggcagctgtatgcccagaagctgctgcccctggaggagcactaccgcttccacgagttccacagccctgccctggaggatgctgactttgacaacaagcccatggtgctgctggtgggccagtacagcacaggcaagaccaccttcatccgccacctgattgagcaggacttccctggcatgagaattggccctgagcccaccacagacagcttcatcgctgtgatgcacggccccacagaaggagtggtgcctggaaatgccctggtggtggacccccggcggcccttcaggaagctgaatgcctttggaaatgccttcctgaaccgcttcatgtgtgcccagctgcccaaccctgtgctggacagcatcagcatcatcgacaccccaggcatcctgtctggagagaagcagaggatcagccggggctatgactttgctgctgtgctggagtggtttgctgagcgggtggaccgcatcatcctgctgtttgatgcccacaagctggacatcagtgatgagttcagcgaggtgatcaaggccctgaagaaccacgaggacaagatccgggtggtgctgaacaaggctgaccagatcgagacccagcagctgatgagggtgtatggagccctgatgtggagcctgggcaagatcatcaacaccccagaggtggtgcgggtgtacatcggcagcttctggagccaccccctgctgatcccagacaacaggaagctgtttgaagctgaggagcaggacctcttcaaggacatccagagcctgcccagaaatgctgccctgaggaagctgaatgacctgatcaagagggcccggctggccaaggtgcacgcctacatcatcagcagcctgaagaaggagatgcccaacgtgtttgggaaggagagcaagaagaaggagctggtgaacaacctgggggagatctaccagaagattgaaagagagcaccagatcagccctggggacttccccagcctgaggaagatgcaggagctgctgcagacccaggacttcagcaagttccaggccctgaagcccaagctgctggacacagtggatgacatgctggccaatgacatcgcccggctgatggtgatggtgcggcaggaggagagcctgatgcccagccaggtggtgaagggcggggcctttgatggcaccatgaatggccccttcggccacggctacggggagggcgctggggagggcattgatgatgtggagtgggtggtgggcaaggacaagcccacctatgatgagatcttctacaccctgagccctgtgaatggcaagatcactggagccaatgccaagaaggagatggtgaagagcaagctgcccaacacagtgctgggcaagatctggaagctggctgatgtggacaaggatggcctgctggatgatgaggagtttgccctggccaaccacctgatcaaggtgaagctggagggccacgagctgcctgctgacctgcccccccacctggtgccccccagcaagagaagacatgaatag

SEQ ID NO: 151006 - DNA, 1605 bp, synthetic construct; identical to SEQ ID NO: 151005
  misc_feature 1..1605: note = Description of Artificial Sequence: Synthetic coding sequence
  source 1..1605: mol_type = other DNA

SEQ ID NO: 151007 - DNA, 438 bp, synthetic construct
  misc_feature 1..438: note = Description of Artificial Sequence: Synthetic coding sequence
  source 1..438: mol_type = other DNA
atgttctcctgggtgtccaaggatgcccggaggaagaaggagcctgagctgttccagacagtggccgagggcctgcggcagctgtatgcccagaagctgctgcccctggaggagcactaccgcttccacgagttccacagccctgccctggaggatgctgactttgacaacaagcccatggtgctgctggtgggccagtacagcacaggcaagaccaccttcatccgccacctgattgagcaggacttccctggcatgagaattggccctgagcccaccacagacagcttcatcgctgtgatgcacggccccacagaaggagtggtgcctggaaatgccctggtggtggacccccggcggcccttcaggaagctgaatgcctttggaaatgccttcctgaaccgcttcatgtgtgcccagctgcccaaccctgtgtag

SEQ ID NO: 151008 - DNA, 1296 bp, synthetic construct
  misc_feature 1..1296: note = Description of Artificial Sequence: Synthetic coding sequence
  source 1..1296: mol_type = other DNA
atggagcagcccggcacagctgccagccctgtgtctggctccatgttctcctgggtgtccaaggatgcccggaggaagaaggagcctgagctgttccagacagtggccgagggcctgcggcagctgtatgcccagaagctgctgcccctggaggagcactaccgcttccacgagttccacagccctgccctggaggatgctgactttgacaacaagcccatggtgctgctggtgggccagtacagcacaggcaagaccaccttcatccgccacctgattgagcaggacttccctggcatgagaattggccctgagcccaccacagacagcttcatcgctgtgatgcacggccccacagaaggagtggtgcctggaaatgccctggtggtggacccccggcggcccttcaggaagctgaatgcctttggaaatgccttcctgaaccgcttcatgtgtgcccagctgcccaaccctgtgctggacagcatcagcatcatcgacaccccaggcatcctgtctggagagaagcagaggatcagccggggctatgactttgctgctgtgctggagtggtttgctgagcgggtggaccgcatcatcctgctgtttgatgcccacaagctggacatcagtgatgagttcagcgaggtgatcaaggccctgaagaaccacgaggacaagatccgggtggtgctgaacaaggctgaccagatcgagacccagcagctgatgagggtgtatggagccctgatgtggagcctgggcaagatcatcaacaccccagaggtggtgcgggtgtacatcggcagcttctggagccaccccctgctgatcccagacaacaggaagctgtttgaagctgaggagcaggacctcttcaaggacatccagagcctgcccagaaatgctgccctgaggaagctgaatgacctgatcaagagggcccggctggccaaggtgcacgcctacatcatcagcagcctgaagaaggagatgcccaacgtgtttgggaaggagagcaagaagaaggagctggtgaacaacctgggggagatctaccagaagattgaaagagagcaccagatcagccctggggacttccccagcctgaggaagatgcaggagctgctgcagacccaggacttcagcaagttccaggccctgaagcccaagctgctggatgatgaggagtttgccctggccaaccacctgatcaaggtgaagctggagggccacgagctgcctgctgacctgcccccccacctggtgccccccagcaagagaagacatgaatag

SEQ ID NO: 151009 - DNA, 447 bp, synthetic construct
  misc_feature 1..447: note = Description of Artificial Sequence: Synthetic coding sequence
  source 1..447: mol_type = other DNA
atgttctcctgggtgtccaaggatgcccggaggaagaaggagcctgagctgttccagacagtggccgagggcctgcggcagctgtatgcccagaagctgctgcccctggaggagcactaccgcttccacgagttccacagccctgccctggaggatgctgactttgacaacaagcccatggtgctgctggtgggccagtacagcacaggcaagaccaccttcatccgccacctgattgagcaggacttccctggcatgagaattggccctgagcccaccacagacagcttcatcgctgtgatgcacggccccacagaaggagtggtgcctggaaatgccctggtggtggacccccggcggcccttcaggaagctgaatgcctttggaaatgccttcctgaaccgcttcatgtgtgcccagctgcccaaccctgtgctggacagctag

SEQ ID NO: 151010 - DNA, 1533 bp, synthetic construct
  misc_feature 1..1533: note = Description of Artificial Sequence: Synthetic coding sequence
  source 1..1533: mol_type = other DNA
atgttctcctgggtgtccaaggatgcccggaggaagaaggagcactaccgcttccacgagttccacagccctgccctggaggatgctgactttgacaacaagcccatggtgctgctggtgggccagtacagcacaggcaagaccaccttcatccgccacctgattgagcaggacttccctggcatgagaattggccctgagcccaccacagacagcttcatcgctgtgatgcacggccccacagaaggagtggtgcctggaaatgccctggtggtggacccccggcggcccttcaggaagctgaatgcctttggaaatgccttcctgaaccgcttcatgtgtgcccagctgcccaaccctgtgctggacagcatcagcatcatcgacaccccaggcatcctgtctggagagaagcagaggatcagccggggctatgactttgctgctgtgctggagtggtttgctgagcgggtggaccgcatcatcctgctgtttgatgcccacaagctggacatcagtgatgagttcagcgaggtgatcaaggccctgaagaaccacgaggacaagatccgggtggtgctgaacaaggctgaccagatcgagacccagcagctgatgagggtgtatggagccctgatgtggagcctgggcaagatcatcaacaccccagaggtggtgcgggtgtacatcggcagcttctggagccaccccctgctgatcccagacaacaggaagctgtttgaagctgaggagcaggacctcttcaaggacatccagagcctgcccagaaatgctgccctgaggaagctgaatgacctgatcaagagggcccggctggccaaggtgcacgcctacatcatcagcagcctgaagaaggagatgcccaacgtgtttgggaaggagagcaagaagaaggagctggtgaacaacctgggggagatctaccagaagattgaaagagagcaccagatcagccctggggacttccccagcctgaggaagatgcaggagctgctgcagacccaggacttcagcaagttccaggccctgaagcccaagctgctggacacagtggatgacatgctggccaatgacatcgcccggctgatggtgatggtgcggcaggaggagagcctgatgcccagccaggtggtgaagggcggggcctttgatggcaccatgaatggccccttcggccacggctacggggagggcgctggggagggcattgatgatgtggagtgggtggtgggcaaggacaagcccacctatgatgagatcttctacaccctgagccctgtgaatggcaagatcactggagccaatgccaagaaggagatggtgaagagcaagctgcccaacacagtgctgggcaagatctggaagctggctgatgtggacaaggatggcctgctggatgatgaggagtttgccctggccaaccacctgatcaaggtgaagctggagggccacgagctgcctgctgacctgcccccccacctggtgccccccagcaagagaagacatgaatag

SEQ ID NO: 151011 - DNA, 1632 bp, synthetic construct
  misc_feature 1..1632: note = Description of Artificial Sequence: Synthetic coding sequence
  source 1..1632: mol_type = other DNA
atgttctcctggctgaagaggggcggggcccggggccagcagcctgaggccatcagaacagtgaccagcgccctgaaggagctgtaccgcaccaagctgctgcccctggaggagcactacagatttggagccttccacagccctgccctggaggatgctgactttgatggcaagcccatggtgctggtggccggccagtacagcacaggcaagaccagcttcatccagtacctgctggagcaggaggtgcccggcagccgggtgggccctgagcccaccacagactgctttgtggccgtgatgcacggggacacagagggcaccgtgcctggaaatgccctggtggtggaccctgacaagcccttcaggaagctgaaccccttcggcaacaccttcctgaaccgcttcatgtgtgcccagctgcccaaccaggtgctggagagcatcagcatcatcgacaccccaggcatcctgagcggggccaagcagagggtgtcccggggctatgacttccctgctgtgctgcgctggtttgctgagcgggtggacctgatcatcctgctgtttgatgcccacaagctggagatcagtgatgagttcagcgaggccatcggggccctgcggggccacgaggacaagatccgggtggtgctgaacaaggctgacatggtggagacccagcagctgatgagggtgtatggagccctgatgtgggccctgggcaaggtggtgggcaccccagaggtgctgcgggtgtacatcggcagcttctggagccagcccctgctggtgcctgacaacagaaggctgtttgagctggaggagcaggacctcttccgggacatccagggcctgcccaggcatgctgccctgaggaagctgaatgacctggtgaagagggcccggctggtgcgggtgcacgcctacatcatctcctacctgaagaaggagatgcccagcgtgtttgggaaggagaacaagaagaagcagctgatcctgaagctgcccgtcatctttgccaagatccagctggagcaccacatcagccctggggacttcccagactgccagaagatgcaggagctgctgatggcccatgacttcaccaagttccacagcctgaagcccaagctgctggaggccctggatgagatgctgacccatgacatcgccaagctgatgcccctgctgcggcaggaggagctggagagcacagaggtgggcgtgcagggcggggcctttgagggcacccacatgggcccctttgtggagcggggcccagatgaggccatggaggatggagaggagggcagtgatgatgaggccgagtgggtggtgaccaaggacaagagcaaatatgatgagatcttctacaacctggccccagcagatggcaagctgagcggcagcaaggccaagacctggatggtgggcaccaagctgcccaacagcgtgctgggccgcatctggaagctgagtgatgtggacagagatggcatgctggatgatgaggagtttgccctggccagccacctgattgaggccaagctggagggccacggcctgcctgccaacctgccccggcggctggtgccccccagcaagaggaggcacaagggcagcgctgagtag

SEQ ID NO: 151012 - DNA, 516 bp, synthetic construct
  misc_feature 1..516: note = Description of Artificial Sequence: Synthetic coding sequence
  source 1..516: mol_type = other DNA
atgcccagcgtgtttgggaaggagaacaagaagaagcagctgatcctgaagctgcctgtgatctttgccaagatccagctggagcaccacatcagccctggggacttcccagactgccagaagatgcaggagctgctgatggcccatgacttcaccaagttccacagcctgaagcccaagctgctggaggccctggatgagatgctgacccatgacatcgccaagctgatgcccctgctgcggcaggaggagctggagagcacagaggtgggcgtgcagggcggggcctttgagggcacccacatgggcccctttgtggagcggggcccagatgaggccatggaggaccagggccaggtgcagatcagaagagacctgctgcagcccggggcctgccggcggcaggccgagcggctgcagggccaggacctggatggaggagaccaggccccccagctgtctgctggggcccacctggaggcccagagatgtggccccaggagacatgctggatag

SEQ ID NO: 151013 - DNA, 1224 bp, synthetic construct
  misc_feature 1..1224: note = Description of Artificial Sequence: Synthetic coding sequence
  source 1..1224: mol_type = other DNA
atgtgtgcccagctgcccaaccaggtgctggagagcatcagcatcatcgacaccccaggcatcctgagcggggccaagcagagggtgtcccggggctatgacttccctgctgtgctgcgctggtttgctgagcgggtggacctgatcatcctgctgtttgatgcccacaagctggagatcagtgatgagttcagcgaggccatcggggccctgcggggccacgaggacaagatccgggtggtgctgaacaaggctgacatggtggagacccagcagctgatgagggtgtatggagccctgatgtgggccctgggcaaggtggtgggcaccccagaggtgctgcgggtgtacatcggcagcttctggagccagcccctgctggtgcctgacaacagaaggctgtttgagctggaggagcaggacctcttccgggacatccagggcctgcccaggcatgctgccctgaggaagctgaatgacctggtgaagagggcccggctggtgcgggtgcacgcctacatcatctcctacctgaagaaggagatgcccagcgtgtttgggaaggagaacaagaagaagcagctgatcctgaagctgcccgtcatctttgccaagatccagctggagcaccacatcagccctggggacttcccagactgccagaagatgcaggagctgctgatggcccatgacttcaccaagttccacagcctgaagcccaagctgctggaggccctggatgagatgctgacccatgacatcgccaagctgatgcccctgctgcggcaggaggagctggagagcacagaggtgggcgtgcagggcggggcctttgagggcacccacatgggcccctttgtggagcggggcccagatgaggccatggaggatggagaggagggcagtgatgatgaggccgagtgggtggtgaccaaggacaagagcaaatatgatgagatcttctacaacctggccccagcagatggcaagctgagcggcagcaaggccaagacctggatggtgggcaccaagctgcccaacagcgtgctgggccgcatctggaagctgagtgatgtggacagagatggcatgctggatgatgaggagtttgccctggccagccacctgattgaggccaagctggagggccacggcctgcctgccaacctgccccggcggctggtgccccccagcaagaggaggcacaagggcagcgctgagtag

SEQ ID NO: 151014 - DNA, 1242 bp, synthetic construct
  misc_feature 1..1242: note = Description of Artificial Sequence: Synthetic coding sequence
  source 1..1242: mol_type = other DNA
atgttctcctggctgaagaggggcggggcccggggccagcagcctgaggccatcagaacagtgaccagcgccctgaaggagctgtaccgcaccaagctgctgcccctggaggagcactacagatttggagccttccacagccctgccctggaggatgctgactttgatggcaagcccatggtgctggtggccggccagtacagcacaggcaagaccagcttcatccagtacctgctggagcaggaggtgcccggcagccgggtgggccctgagcccaccacagactgctttgtggccgtgatgcacggggacacagagggcaccgtgcctggaaatgccctggtggtggaccctgacaagcccttcaggaagctgaaccccttcggcaacaccttcctgaaccgcttcatgtgtgcccagctgcccaaccaggtgctggagagcatcagcatcatcgacaccccaggcatcctgagcggggccaagcagagggtgtcccggggctatgacttccctgctgtgctgcgctggtttgctgagcgggtggacctgatcatcctgctgtttgatgcccacaagctggagatcagtgatgagttcagcgaggccatcggggccctgcggggccacgaggacaagatccgggtggtgctgaacaaggctgacatggtggagacccagcagctgatgagggtgtatggagccctgatgtgggccctgggcaaggtggtgggcaccccagaggtgctgcgggtgtacatcggcagcttctggagccagcccctgctggtgcctgacaacagaaggctgtttgagctggaggagcaggacctcttccgggacatccagggcctgcccaggcatgctgccctgaggaagctgaatgacctggtgaagagggcccggctggtgcgggtgcacgcctacatcatctcctacctgaagaaggagatgcccagcgtgtttgggaaggagaacaagaagaagcagctgatcctgaagctgcccgtcatctttgccaagatccagctggagcaccacatcagccctggggacttcccagactgccagaagatgcaggagctgctgatggcccatgacttcaccaagttccacagcctgaagcccaagctgctggaggccctggatgagatgctgacccatgacatcgccaagctgatgcccctgctgcggcaggaggagctggagagcagccctgtggccgagatgaccagcaggtag

SEQ ID NO: 151015 - DNA, 1602 bp, synthetic construct
  misc_feature 1..1602: note = Description of Artificial Sequence: Synthetic coding sequence
  source 1..1602: mol_type = other DNA
atgttctcctggctgaagaggggcggggcccggggccagcagcctgaggccatcagaacagtgaccagcgccctgaaggagctgtaccgcaccaagctgctgcccctggaggagcactacagatttggagccttccacagccctgccctggaggatgctgactttgatggcaagcccatggtgctggtggccggccagtacagcacaggcaagaccagcttcatccagtacctgctggagcaggaggtgcccggcagccgggtggccgtgatgcacggggacacagagggcaccgtgcctggaaatgccctggtggtggaccctgacaagcccttcaggaagctgaaccccttcggcaacaccttcctgaaccgcttcatgtgtgcccagctgcccaaccaggtgctggagagcatcagcatcatcgacaccccaggcatcctgagcggggccaagcagagggtgtcccggggctatgacttccctgctgtgctgcgctggtttgctgagcgggtggacctgatcatcctgctgtttgatgcccacaagctggagatcagtgatgagttcagcgaggccatcggggccctgcggggccacgaggacaagatccgggtggtgctgaacaaggctgacatggtggagacccagcagctgatgagggtgtatggagccctgatgtgggccctgggcaaggtggtgggcaccccagaggtgctgcgggtgtacatcggcagcttctggagccagcccctgctggtgcctgacaacagaaggctgtttgagctggaggagcaggacctcttccgggacatccagggcctgcccaggcatgctgccctgaggaagctgaatgacctggtgaagagggcccggctggtgcgggtgcacgcctacatcatctcctacctgaagaaggagatgcccagcgtgtttgggaaggagaacaagaagaagcagctgatcctgaagctgcccgtcatctttgccaagatccagctggagcaccacatcagccctggggacttcccagactgccagaagatgcaggagctgctgatggcccatgacttcaccaagttccacagcctgaagcccaagctgctggaggccctggatgagatgctgacccatgacatcgccaagctgatgcccctgctgcggcaggaggagctggagagcacagaggtgggcgtgcagggcggggcctttgagggcacccacatgggcccctttgtggagcggggcccagatgaggccatggaggatggagaggagggcagtgatgatgaggccgagtgggtggtgaccaaggacaagagcaaatatgatgagatcttctacaacctggccccagcagatggcaagctgagcggcagcaaggccaagacctggatggtgggcaccaagctgcccaacagcgtgctgggccgcatctggaagctgagtgatgtggacagagatggcatgctggatgatgaggagtttgccctggccagccacctgattgaggccaagctggagggccacggcctgcctgccaacctgccccggcggctggtgccccccagcaagaggaggcacaagggcagcgctgagtag

SEQ ID NO: 151016 - DNA, 681 bp, synthetic construct
  misc_feature 1..681: note = Description of Artificial Sequence: Synthetic coding sequence
  source 1..681: mol_type = other DNA
atgcccagcgtgtttgggaaggagaacaagaagaagcagctgatcctgaagctgcctgtgatctttgccaagatccagctggagcaccacatcagccctggggacttcccagactgccagaagatgcaggagctgctgatggcccatgacttcaccaagttccacagcctgaagcccaagctgctggaggccctggatgagatgctgacccatgacatcgccaagctgatgcccctgctgcggcaggaggagctggagagcacagaggtgggcgtgcagggcggggcctttgagggcacccacatgggcccctttgtggagcggggcccagatgaggccatggaggatggagaggagggcagtgatgatgaagctgagtgggtggtgaccaaggacaagagcaaatatgatgagatcttctacaacctggccccagcagatggcaagctgagcggcagcaaggccaagacctggatggtgggcaccaagctgcccaacagcgtgctgggccgcatctggaagctgagtgatgtggacagagatggcatgctggatgatgaggagtttgccctggccagccacctgattgaggccaagctggagggccacggcctgcctgccaacctgccccggcggctggtgccccccagcaagagaagacacaagggcagcgctgagtag

SEQ ID NO: 151017 - DNA, 1608 bp, synthetic construct
  misc_feature 1..1608: note = Description of Artificial Sequence: Synthetic coding sequence
  source 1..1608: mol_type = other DNA
atgttctcctggctgggcacagatgacagaagaaggaaggaccctgaggtgttccagacagtgtctgagggcctgaagaagctgtacaagagcaagctgctgcccctggaggagcactaccgcttccacgagttccacagccctgccctggaggatgctgactttgacaacaagcccatggtgctgctggtgggccagtacagcacaggcaagaccaccttcatccgctacctgctggagcaggacttccctggcatgagaattggccctgagcccaccacagacagcttcatcgctgtgatgcagggcgacatggagggcatcatccctggaaatgccctggtggtggaccccaagaagcccttcaggaagctgaatgcctttggaaatgccttcctgaacagatttgtgtgtgcccagctgcccaaccctgtgctggagagcatcagcgtcatcgacaccccaggcatcctgtctggagagaagcagaggatcagccggggctatgactttgctgctgtgctggagtggtttgctgagcgggtggaccgcatcatcctgctgtttgatgcccacaagctggacatcagtgatgagttcagcgaggtgatcaaggccctgaagaaccacgaggacaagatgagggtggtgctgaacaaggctgaccagatcgagacccagcagctgatgagggtgtatggagccctgatgtggagcctgggcaagatcgtgaacaccccagaggtgatccgggtgtacatcggcagcttctggagccaccccctgctgatcccagacaacaggaagctgtttgaagctgaggagcaggacctcttccgggacatccagagcctgcccagaaatgctgccctgaggaagctgaatgacctgatcaagagggcccggctggccaaggtgcacgcctacatcatcagcagcctgaagaaggagatgcccagcgtgtttgggaaggacaacaagaagaaggagctggtgaacaacctggccgagatctacggccgcatcgagcgggagcaccagatcagccctggggacttccccaacctgaagaggatgcaggaccagctgcaggcccaggacttcagcaagttccagcccctgaagagcaagctgctggaggtggtggatgacatgctggcccatgacatcgcccagctgatggtgctggtgcggcaggaggagagccagaggcccatccagatggtgaagggcggggcctttgagggcaccctgcacggccccttcggccacggctacggggagggcgctggggagggcattgatgatgctgagtgggtggtggcccgggacaagcccatgtatgatgagatcttctacaccctgagccctgtggatggcaagatcactggagccaatgccaagaaggagatggtgcgcagcaagctgcccaacagcgtgctgggcaagatctggaagctggccgacatcgacaaggatggcatgctggatgatgatgaatttgccctggccaaccacctgatcaaggtgaagctggagggccacgagctgcccaatgagctgcctgcccacctgctgccccccagcaagaggaaggtggccgagtag

SEQ ID NO: 151018 - DNA, 528 bp, synthetic construct
  misc_feature 1..528: note = Description of Artificial Sequence: Synthetic coding sequence
  source 1..528: mol_type = other DNA
atgttctcctggctgggcacagatgacagaagaaggaaggaccctgaggtgttccagacagtgtctgagggcctgaagaagctgtacaagagcaagctgctgcccctggaggagcactaccgcttccacgagttccacagccctgccctggaggatgctgactttgacaacaagcccatggtgctgctggtgggccagtacagcacaggcaagaccaccttcatccgctacctgctggagcaggacttccctggcatgagaattggccctgagcccaccacagacagcttcatcgctgtgatgcagggcgacatggagggcatcatccctggaaatgccctggtggtggaccccaagaagcccttcaggaagctgaatgcctttggaaatgccttcctgaacagatttgtgtgtgcccagctgcccaaccctgtgctggagagcatcagcgtcatcgacaccccaggcatcctgtctggagagaagcagaggatcagccggggccctgctgctggccctggcctgtag

SEQ ID NO: 151019 - DNA, 4086 bp, synthetic construct
  misc_feature 1..4086: note = Description of Artificial Sequence: Synthetic coding sequence
  source 1..4086: mol_type = other DNA
atgggcgccgccggccggcaggacttcctgttcaaggccatgctgaccatctcctggctgaccctgacctgcttccctggggccaccagcacagtggccgccggctgcccagaccagagccctgagctgcagccctggaaccctggccatgaccaggaccaccacgtgcacatcggccagggcaagaccctgctgctgaccagcagcgccaccgtgtacagcatccacatcagcgagggcggcaagctggtgatcaaggaccatgatgagcccatcgtgctgcggaccaggcacatcctgattgacaatggaggagagctgcatgctggcagcgccctgtgccccttccagggcaacttcaccatcatcctgtatggccgggcagatgagggcatccagcctgacccctactacggcctgaagtacatcggcgtgggcaaaggaggagccctggagctgcacggccagaagaagctgtcctggaccttcctgaacaagaccctgcaccctgggggcatggccgagggcggctacttctttgagaggtcctggggccaccggggcgtcatcgtgcacgtgattgaccccaagagcggcaccgtcatccacagcgacagatttgacacctaccgcagcaagaaggagagcgagcggctggtgcagtacctgaatgctgtgcctgatggccgcatcctgtctgtggccgtgaatgatgagggcagcaggaacctggatgacatggccaggaaggccatgaccaagctgggcagcaagcacttcctgcacctgggcttccgccacccctggagcttcctgactgtgaagggcaaccccagcagctctgtggaggaccacatcgagtaccacggccaccggggcagcgctgctgcccgggtcttcaagctgttccagacagaacatggagagtacttcaacgtgtccctgagcagcgagtgggtgcaggatgtggagtggacagagtggtttgaccatgacaaggtgtcccagaccaagggcggggagaagatcagtgacctgtggaaggcccaccctgggaagatctgcaaccggcccatcgacatccaggccaccaccatggatggagtgaacctgagcacagaggtggtgtacaagaagggccaggactacagatttgcctgctatgaccggggccgggcctgccgcagctacagagtgcgcttcctgtgtgggaagcctgtgcggcccaagctgactgtgaccatcgacaccaacgtgaacagcaccatcctgaacctggaggacaacgtgcagagctggaagccaggggacaccctggtgattgccagcacagactacagcatgtaccaggccgaggagttccaggtgctgccctgccgcagctgtgcccccaaccaggtgaaggtggccggcaagcccatgtacctgcacatcggggaggagattgatggagtggacatgagagctgaggtgggcctgctgagcaggaacatcatcgtgatgggagagatggaggacaagtgctacccctacagaaaccacatctgcaacttctttgattttgacaccttcggcggccacatcaagtttgccctgggcttcaaggccgcccacctggagggcacagagctgaagcacatgggccagcagctggtgggccagtaccccatccacttccacctggccggagatgtggatgagcggggcggctatgacccccccacctacatccgggacctgagcatccaccacaccttcagccgctgtgtgacagtgcacggcagcaatggcctgctgatcaaggatgtggtgggctacaacagcctgggccactgcttcttcacagaagatggccctgaggagaggaacacctttgaccactgcctgggcctgctggtgaagagcggcaccctgctgcccagcgaccgggacagcaagatgtgcaagatgatcacagaagattcctacccaggctacatccccaagccccggcaggactgcaatgctgtgtccaccttctggatggccaaccccaacaacaacctgatcaactgtgccgccgccggcagcgaggagaccggcttctggttcatcttccaccacgtgcccaccggccccagcgtgggcatgtacagccctggctacagcgagcacatccccctgggcaagttctacaacaacagagcccacagcaactacagagctggcatgatcatcgacaatggagtgaagaccacagaggccagcgccaaggacaagaggcccttcctgagcatcatcagcgcccgctacagcccccaccaggatgctgaccccctgaagccccgggagcccgccatcatccgccacttcatcgcctacaagaaccaggaccacggggcctggctgcggggaggagatgtgtggctggacagctgccgctttgctgacaatggaattggcctgaccctggccagcggcggcaccttcccctatgatgatggcagcaagcaggagatcaagaacagcctgtttgtgggggagagcggaaatgtgggcacagagatgatggacaaccgcatctggggccctgggggcctggaccacagcggccgcaccctgcccatcggccagaacttccccatccggggcatccagctgtatgatggccccatcaacatccagaactgcaccttcaggaagtttgtggccctggagggccgccacaccagcgccctggccttccggctgaacaatgcctggcagagctgcccccacaacaacgtgactggaattgcctttgaagatgtgcccatcaccagcagggtcttcttcggggagcccggcccctggttcaaccagctggacatggatggagacaagaccagcgtcttccatgatgtggatggctctgtgtctgagtacccaggcagctacctgaccaagaatgacaactggctggtgcgccacccagactgcatcaacgtgcctgactggaggggggccatctgcagcggctgctacgcccagatgtacatccaggcctacaagaccagcaacctgaggatgaagatcatcaagaatgacttccccagccaccccctgtacctggagggcgccctgaccaggagcacccactaccagcagtaccagcctgtggtgaccctgcagaagggctacaccatccactgggaccagacagccccagctgagctggccatctggctgatcaacttcaacaagggggactggatccgggtgggcctgtgctacccccggggcaccaccttcagcatcctgagtgatgtgcacaaccggctgctgaagcagaccagcaagacaggagtgtttgtgaggaccctgcagatggacaaggtggagcagagctacccaggccgcagccactactactgggatgaagattctggcctgctcttcctgaagctgaaggcccagaatgaaagagagaagtttgccttctgcagcatgaagggctgtgagcgcatcaagatcaaggccctgatccccaagaatgctggggtgtctgactgcacagccacagcctaccccaagttcacagaaagagctgtggtggatgtgcccatgcccaagaagctgtttggcagccagctgaagaccaaggaccacttcctggaggtgaagatggagagcagcaagcagcacttcttccacctgtggaatgactttgcctacatcgaggtggatggcaagaagtaccccagcagtgaagatggcatccaggtggtggtgattgatggcaaccagggccgggtggtgagccacaccagcttcagaaattccatcctgcagggcatcccctggcagctgttcaactacgtggccaccatcccagacaacagcatcgtgctgatggccagcaagggccgctacgtgtcccggggcccctggaccagggtgctggagaagctgggcgctgaccggggcctgaagctgaaggagcagatggcctttgtgggcttcaagggcagcttccggcccatctgggtgaccctggacacagaggaccacaaggccaagatcttccaggtggtgcccatccctgtggtgaagaagaagaagctgtag

SEQ ID NO: 151020 - DNA, 1092 bp, synthetic construct
  misc_feature 1..1092: note = Description of Artificial Sequence: Synthetic coding sequence
  source 1..1092: mol_type = other DNA
atgtccatggatgtgaccttcctgggcaccggggccgcctaccccagccccaccaggggggccagcgctgtggtgctgcgctgtgaaggagagtgctggctgtttgactgtggggagggcacccagacccagctgatgaagagccagctgaaggccggccgcatcaccaagatcttcatcacccacctgcacggggaccacttcttcggcctgcccggcctgctgtgcaccatcagcctgcagagcggctccatggtgtccaagcagcccatcgagatctacggccctgtgggcctgcgggacttcatctggaggaccatggagctgagccacacagagctggtgttccactacgtggtgcatgagctggtgcccacagctgaccagtgcccagctgaggagctgaaggagtttgcccacgtgaacagagctgacagcccccccaaggaggagcagggccgcaccatcctgctggacagcgaggagaacagctacctgctgtttgatgatgagcagtttgtggtgaaggccttccgcctcttccaccgcatccccagctttggcttctctgtggtggagaagaagaggcctgggaagctgaatgcccagaagctgaaggacctgggcgtgcccccaggccctgcctacggcaagctgaagaatggcatctctgtggtgctggagaatggagtgaccatcagcccccaggatgtgctgaagaagcccatcgtgggcaggaagatctgcatcctgggggactgcagcggcgtggtgggagatggcggcgtgaagctgtgctttgaagctgacctgctgatccacgaggccaccctggatgatgcccagatggacaaggccaaggagcacggccacagcaccccccagatggccgccacctttgccaagctgtgccgggccaagaggctggtgctgacccacttcagccagcgctacaagcctgtggccctggcccgggagggggagacagatggcattgctgagctgaagaagcaggccgagagcgtgctggacctgcaggaggtgaccctggccgaggacttcatggtgatcagcatccccatcaagaagtag

SEQ ID NO: 151021 - DNA, 2481 bp, synthetic construct
  misc_feature 1..2481: note = Description of Artificial Sequence: Synthetic coding sequence
  source 1..2481: mol_type = other DNA
atgtgggccctgtgcagcctgctgcggtctgctgctggccgcaccatgagccagggccgcaccatcagccaggccccagcccggcgggagcggcccaggaaggaccccctgcggcacctgcggacccgggagaagaggggccccagcggctgcagcggcggccccaacacagtgtacctgcaggtggtggccgccggcagccgggacagcggggccgccctgtatgtgttcagcgagttcaaccgctacctgttcaactgtggggagggcgtgcagaggctgatgcaggagcacaagctgaaggtggcccggctggacaacatcttcctgaccaggatgcactggagcaatgtgggcggcctgagcggcatgatcctgaccctgaaggagaccggcctgcccaagtgtgtgctgagcggccccccccagctggagaagtacctggaggccatcaagatcttcagcggccccctgaagggcatcgagctggccgtgcggccccacagcgccccagaatatgaagatgagaccatgacagtgtaccagatccccatccacagcgagcagaggcggggcaagcaccagccctggcagagccctgagcggcccctgagccggctgagccctgagaggagcagtgacagcgagagcaatgaaaatgagccccacctgccccacggcgtgtcccagaggagaggagtgcgggacagcagcctggtggtggccttcatctgcaagctgcacctgaagaggggcaacttcctggtgctgaaggccaaggagatgggcctgcctgtgggcacagctgccatcgcccccatcatcgctgctgtgaaggatggcaagagcatcacccatgagggccgggagatcctggccgaggagctgtgcaccccaccagaccccggggccgcctttgtggtggtggagtgcccagatgagagcttcatccagcccatctgtgaaaatgccaccttccagcgctaccagggcaaggcagatgcccctgtggccctggtggtgcacatggccccagcctctgtgctggtggacagccgctaccagcagtggatggagagatttggaccagacacccagcacctggtgctgaatgaaaactgtgcctctgtgcacaacctgcggagccacaagatccagacccagctgaacctgatccacccagacatcttccccctgctgaccagcttccgctgcaagaaggagggccccaccctgtctgtgcccatggtgcagggcgagtgcctgctgaagtaccagctgcggccccggcgggagtggcagagagatgccatcatcacctgcaaccctgaggagttcatcgtggaggccctgcagctgcccaacttccagcagagcgtgcaggagtaccgccgcagcgcccaggacggccctgccccagctgagaagaggagccagtacccagagatcatcttcctgggcaccggcagcgccatccccatgaagatcagaaatgtgtctgccaccctggtgaacatcagcccagacaccagcctgctgctggactgtggggagggcaccttcggccagctgtgccgccactacggggaccaggtggacagagtgctgggcaccctggccgctgtgtttgtgagccacctgcatgctgaccaccacacaggcctgcccagcatcctgctgcagcgggagcgggccctggccagcctgggcaagcccctgcaccccctgctggtggtggcccccaaccagctgaaggcctggctgcagcagtaccacaaccagtgccaggaggtgctgcaccacatctccatgatcccagccaagtgcctgcaggagggcgctgagatcagcagccctgctgtggagcggctcatcagcagcctgctgcggacctgtgacctggaggagttccagacctgcctggtgcgccactgcaagcacgccttcggctgtgccctggtgcacaccagcggctggaaggtggtgtacagcggggacaccatgccctgtgaggccctggtgaggatgggcaaggatgccaccctgctgattcatgaggccaccctggaggatggcctggaggaggaggccgtggagaagacccacagcaccaccagccaggccatctctgtgggcatgaggatgaatgctgagttcatcatgctgaaccacttcagccagagatatgccaaggtgcccctcttcagccccaacttcagcgagaaggtgggcgtggcctttgaccacatgaaggtgtgcttcggggacttccccaccatgcccaagctgatcccccccctgaaggccctgtttgctggggacatcgaggagatggaggagcggcgggagaagcgggagctgcggcaggtgcgggccgccctgctgagccgggagctggccggcggcctggaggatggagagccccagcagaagagggcccacacagaggagccccaggccaagaaggtgcgggcccagtag

SEQ ID NO: 151022 - DNA, 2424 bp, synthetic construct
  misc_feature 1..2424: note = Description of Artificial Sequence: Synthetic coding sequence
  source 1..2424: mol_type = other DNA
atgtgggccctgtgcagcctgctgcggtctgctgctggccgcaccatgagccagggccgcaccatcagccaggccccagcccggcgggagcggcccaggaaggaccccctgcggcacctgcggacccgggagaagaggggccccagcggctgcagcggcggccccaacacagtgtacctgcaggtggtggccgccggcagccgggacagcggcgtgcagaggctgatgcaggagcacaagctgaaggtggcccggctggacaacatcttcctgaccaggatgcactggagcaatgtgggcggcctgagcggcatgatcctgaccctgaaggagaccggcctgcccaagtgtgtgctgagcggccccccccagctggagaagtacctggaggccatcaagatcttcagcggccccctgaagggcatcgagctggccgtgcggccccacagcgccccagaatatgaagatgagaccatgacagtgtaccagatccccatccacagcgagcagaggcggggcaagcaccagccctggcagagccctgagcggcccctgagccggctgagccctgagaggagcagtgacagcgagagcaatgaaaatgagccccacctgccccatggagtgtcccagaggcggggcgtgcgggacagcagcctggtggtggccttcatctgcaagctgcacctgaagaggggcaacttcctggtgctgaaggccaaggagatgggcctgcctgtgggcacagctgccatcgcccccatcatcgctgctgtgaaggatggcaagagcatcacccatgagggccgggagatcctggccgaggagctgtgcaccccaccagaccctggagctgcctttgtggtggtggagtgcccagatgagagcttcatccagcccatctgtgaaaatgccaccttccagcgctaccagggcaaggcagatgcccctgtggccctggtggtgcacatggccccagcctctgtgctggtggacagccgctaccagcagtggatggagcgcttcggccctgacacccagcacctggtgctgaatgaaaactgtgcctctgtgcacaacctgcggagccacaagatccagacccagctgaacctgatccacccagacatcttccccctgctgaccagcttccgctgcaagaaggagggccccaccctgtctgtgcccatggtgcagggagaatgtctgctgaagtaccagctgcggccccggcgggagtggcagagagatgccatcatcacctgcaaccctgaggagttcatcgtggaggccctgcagctgcccaacttccagcagagcgtgcaggagtacagaagaagtgcccaggacggccctgccccagctgagaagaggagccagtacccagagatcatcttcctgggcactggaagtgccatccccatgaagatcagaaatgtgtctgccaccctggtgaacatcagcccagacaccagcctgctgctggactgtggggagggcaccttcggccagctgtgccgccactatggagaccaggtggacagagtgctgggcaccctggccgctgtgtttgtgagccacctgcacgccgaccaccacacaggcctgcccagcatcctgctgcagcgggagcgggccctggccagcctgggcaagcccctgcaccccctgctggtggtggcccccaaccagctgaaggcctggctgcagcagtaccacaaccagtgccaggaggtgctgcaccacatctccatgatcccagccaagtgcctgcaggagggcgctgagatcagcagccctgctgtggagcggctcatcagcagcctgctgcggacctgtgacctggaggagttccagacctgcctggtgcgccactgcaagcacgccttcggctgtgccctggtgcacaccagcggctggaaggtggtgtacagcggggacaccatgccctgtgaggccctggtgaggatgggcaaggatgccaccctgctgatccacgaggccaccctggaggatggcctggaggaggaggccgtggagaagacccacagcaccaccagccaggccatctctgtgggcatgaggatgaatgctgagttcatcatgctgaaccacttcagccagagatatgccaaggtgcccctcttcagccccaacttcagcgagaaggtgggcgtggcctttgaccacatgaaggtgtgctttggagacttccccaccatgcccaagctgatcccccccctgaaggccctgtttgctggggacatcgaggagatggaggagcggcgggagaagcgggagctgcggcaggtgcgggccgccctgctgagccgggagctggccggcggcctggaggatggagagccccagcagaagagggcccacacagaggagccccaggccaagaaggtgcgggcccagtag

SEQ ID NO: 151023 - DNA, 2361 bp, synthetic construct
  misc_feature 1..2361: note = Description of Artificial Sequence: Synthetic coding sequence
  source 1..2361: mol_type = other DNA
atgtgggccctgtgcagcctgctgcggtctgctgctggccgcaccatgagccagggccgcaccatcagccaggccccagcccggcgggagcggcccaggaaggaccccctgcggcacctgcggacccgggagaagaggggccccagcggctgcagcggcggccccaacacagtgtacctgcaggtggtggccgccggcagccgggacagcggggccgccctgtatgtgttcagcgagttcaaccgctacctgttcaactgtggggagggcgtgcagaggctgatgcaggagcacaagctgaaggtggcccggctggacaacatcttcctgaccaggatgcactggagcaatgtgggcggcctgagcggcatgatcctgaccctgaaggagaccggcctgcccaagtgtgtgctgagcggccccccccagctggagaagtacctggaggccatcaagatcttcagcggccccctgaagggcatcgagctggccgtgcggccccacagcgccccagaatatgaagatgagaccatgacagtgtaccagatccccatccacagcgtgtcccagaggagaggagtgcgggacagcagcctggtggtggccttcatctgcaagctgcacctgaagaggggcaacttcctggtgctgaaggccaaggagatgggcctgcctgtgggcacagctgccatcgcccccatcatcgctgctgtgaaggatggcaagagcatcacccatgagggccgggagatcctggccgaggagctgtgcaccccaccagaccccggggccgcctttgtggtggtggagtgcccagatgagagcttcatccagcccatctgtgaaaatgccaccttccagcgctaccagggcaaggcagatgcccctgtggccctggtggtgcacatggccccagcctctgtgctggtggacagccgctaccagcagtggatggagagatttggaccagacacccagcacctggtgctgaatgaaaactgtgcctctgtgcacaacctgcggagccacaagatccagacccagctgaacctgatccacccagacatcttccccctgctgaccagcttccgctgcaagaaggagggccccaccctgtctgtgcccatggtgcagggcgagtgcctgctgaagtaccagctgcggccccggcgggagtggcagagagatgccatcatcacctgcaaccctgaggagttcatcgtggaggccctgcagctgcccaacttccagcagagcgtgcaggagtaccgccgcagcgcccaggacggccctgccccagctgagaagaggagccagtacccagagatcatcttcctgggcaccggcagcgccatccccatgaagatcagaaatgtgtctgccaccctggtgaacatcagcccagacaccagcctgctgctggactgtggggagggcaccttcggccagctgtgccgccactacggggaccaggtggacagagtgctgggcaccctggccgctgtgtttgtgagccacctgcatgctgaccaccacacaggcctgcccagcatcctgctgcagcgggagcgggccctggccagcctgggcaagcccctgcaccccctgctggtggtggcccccaaccagctgaaggcctggctgcagcagtaccacaaccagtgccaggaggtgctgcaccacatctccatgatcccagccaagtgcctgcaggagggcgctgagatcagcagccctgctgtggagcggctcatcagcagcctgctgcggacctgtgacctggaggagttccagacctgcctggtgcgccactgcaagcacgccttcggctgtgccctggtgcacaccagcggctggaaggtggtgtacagcggggacaccatgccctgtgaggccctggtgaggatgggcaaggatgccaccctgctgattcatgaggccaccctggaggatggcctggaggaggaggccgtggagaagacccacagcaccaccagccaggccatctctgtgggcatgaggatgaatgctgagttcatcatgctgaaccacttcagccagagatatgccaaggtgcccctcttcagccccaacttcagcgagaaggtgggcgtggcctttgaccacatgaaggtgtgcttcggggacttccccaccatgcccaagctgatcccccccctgaaggccctgtttgctggggacatcgaggagatggaggagcggcgggagaagcgggagctgcggcaggtgcgggccgccctgctgagccgggagctggccggcggcctggaggatggagagccccagcagaagagggcccacacagaggagccccaggccaagaaggtgcgggcccagtag

SEQ ID NO: 151024 - DNA, 861 bp, synthetic construct
  misc_feature 1..861: note = Description of Artificial Sequence: Synthetic coding sequence
  source 1..861: mol_type = other DNA
tgaccacatggagtgtcccagaggcggggcgtgcgggacagcagcctggtggtggccttcatctgcaagctgcacctgaagaggggcaacttcctggtgctgaaggccaaggagatgggcctgcctgtgggcacagctgccatcgcccccatcatcgctgctgtgaaggatggcaagagcatcacccatgagggccgggaggtgctgcagatcctggccgaggagctgtgcaccccaccagaccccggggccgcctttgtggtggtggagtgcccagatgagagcttcatccagcccatctgtgaaaatgccaccttccagcgctaccagggcaaggcagatgcccctgtggccctggtggtgcacatggccccagcctctgtgctggtggacagccgctaccagcagtggatggagagatttggaccagacacccagcacctggtgctgaatgaaaactgtgcctctgtgcacaacctgcggagccacaagatccagacccagctgaacctgatccacccagacatcttccccctgctgaccagcttccgctgcaagaaggagggccccaccctgtctgtgcccatggtgcagggcgagtgcctgctgaagtaccagctgcggccccggcgggagtggcagagagatgccatcatcacctgcaaccctgaggagttcatcgtggaggccctgcagctgcccaacttccagcagagcgtgcaggagtaccgccgcagcgcccaggacggccctgccccagctgagaagaggagccagtacccagagatcatcttcctgggcaccggcagcgccatccccatgaagatcagaaatgtgtctgccaccctggtgaacatctag

SEQ ID NO: 151025 - DNA, 837 bp, synthetic construct
  misc_feature 1..837: note = Description of Artificial Sequence: Synthetic coding sequence
  source 1..837: mol_type = other DNA
atcctggccgaggagctgtgcaccccaccagaccccggggccgcctttgtggtggtggagtgcccagatgagagcttcatccagcccatctgtgaaaatgccaccttccagagatttggaccagacacccagcacctggtgctgaatgaaaactgtgcctctgtgcacaacctgcggagccacaagatccagacccagctgaacctgatccacccagacatcttccccctgctgaccagcttccgctgcaagaaggagggccccaccctgtctgtgcccatggtgcagggcgagtgcctgctgaagtaccagctgcggccccggcgggagtggcagagagatgccatcatcacctgcaaccctgaggagttcatcgtggaggccctgcagctgcccaacttccagcagagcgtgcaggagtaccgccgcagcgcccaggacggccctgccccagctgagaagaggagccagtacccagagatcatcttcctgggcaccggcagcgccatccccatgaagatcagaaatgtgtctgccaccctggtgaacatcagcccagacaccagcctgctgctggactgtggggagggcaccttcggccagctgtgccgccactacggggaccaggtggacagagtgctgggcaccctggccgctgtgtttgtgagccacctgcatgctgaccaccacacaggcctgcccagcatcctgctgcagcgggagcgggccctggccagcctgggcaagcccctgcaccccctgctggtggtggcccccaaccagctgaaggcctggctgcagcagtaccacaaccagtgccaggaggtgctgcactag

SEQ ID NO: 151026 - DNA, 804 bp, synthetic construct
  misc_feature 1..804: note = Description of Artificial Sequence: Synthetic coding sequence
  source 1..804: mol_type = other DNA
atgaccctgggccgccgcctggcctgcctcttcctggcctgtgtgctgcctgccctgctgctgggcggcacagccctggccagcgagatcgtgggcggccggcgggcccggccccacgcctggcccttcatggtgtccctgcagctgcggggcggccacttctgtggggccaccctcatcgcccccaactttgtgatgtctgctgcccactgtgtggccaacgtgaatgtgcgggctgtgcgggtggtgctgggcgcccacaacctgagcagaagagagcccacccggcaggtgtttgctgtgcagaggatctttgaaaatggctatgaccctgtgaacctgctgaatgacatcgtcatcctgcagctgaatggcagcgccaccatcaatgccaacgtgcaggtggcccagctgcctgcccagggccgccgcctgggcaatggagtgcagtgcctggccatgggctggggcctgctgggcaggaacagaggaattgcctctgtgctgcaggagctgaatgtgacagtggtgaccagcctgtgccgccgcagcaatgtgtgcaccctggtgcggggccggcaggccggcgtgtgctttggagacagcggcagccccctggtgtgcaatggcctcatccatggaattgccagctttgtgcggggcggctgtgccagcggcctgtacccagatgcctttgcccctgtggcccagtttgtgaactggattgacagcatcatccagaggtctgaggacaacccctgcccccacccccgggaccctgaccctgccagcaggacccactag

SEQ ID NO: 151027 - DNA, 804 bp, synthetic construct; identical to SEQ ID NO: 151026
  misc_feature 1..804: note = Description of Artificial Sequence: Synthetic coding sequence
  source 1..804: mol_type = other DNA

SEQ ID NO: 151028 - DNA, 3051 bp, synthetic construct
  misc_feature 1..3051: note = Description of Artificial Sequence: Synthetic coding sequence
  source 1..3051: mol_type = other DNA
atggcccccaggaccctgtggagctgctacctgtgctgcctgctgacagctgctgctggagctgccagctacccaccccggggcttcagcctgtacacaggcagcagcggggccctgagccctgggggcccccaggcccagatcgcccccaggcctgccagccgccacaggaactggtgtgcctacgtggtgaccaggacagtgtcctgtgtgctggaggatggagtggagacctacgtgaagtaccagccctgtgcctggggccagccccagtgcccccagagcatcatgtaccgccgcttcctgcggccccgctacagagtggcctacaagacagtgacagacatggagtggcgctgctgccagggctatggaggagatgactgtgccgagagccctgccccagccctgggccctgccagcagcaccccccggcccctggcccagcctgcccggcccaacctgagcggcagcagcgctggcagccccctgagcggcctgggcggggagggccctggagagagcgagaaggtgcagcagctggaggagcaggtgcagagcctgaccaaggagctgcagggcctgcggggcgtgctgcagggcctgagcggccgcctggccgaggatgtgcagagagctgtggagacagccttcaacggccggcagcagcctgcagatgctgctgcccggcctggggtgcatgagaccctgaatgagatccagcaccagctgcagctgctggacaccagggtgtccacccatgaccaggagctgggccacctgaacaaccaccacggcggcagcagcagcagcggcggcagccgggccccagccccagccagcgcccctcctggccccagcgaggagctgctgcggcagctggagcagaggctgcaggagagctgcagcgtgtgcctggccggcctggatggcttccggcggcagcagcaggaggaccgggagcggctgcgggccatggagaagctgctggcctctgtggaggagcggcagaggcacctggccggcctggccgtgggcagaagaccaccccaggagtgctgcagccctgagctgggccggcggctggccgagctggagcggcggctggatgtggtggccggctctgtgacagtgctgagcggccggcggggcacagagctgggcggcgctgctggccagggcggccaccccccaggctacaccagcctggccagccggctgagccggctggaggaccgcttcaacagcaccctgggccccagcgaggagcaggaggagagctggccaggggcccctgggggcctgagccactggctgcctgctgcccggggccgcctggagcagctgggcggcctgctggccaacgtgtctggagagctgggcggccgcctggacctgctggaggagcaggtggccggggccatgcaggcctgtggccagctgtgcagcggggcccctggagagcaggacagccaggtgtctgagatcctgagcgccctggagcggcgggtgctggacagcgagggccagctgcggctggtgggcagcggcctgcacacagtggaggccgccggggaggcccggcaggccaccctggagggcctgcaggaggtggtgggccgcctgcaggacagagtggatgcccaggatgaaacagctgctgagttcaccctgcggctgaacctgacagctgcccggctgggccagctggagggcctgctgcaggcccatggagatgagggctgtggggcctgtggcggcgtgcaggaggagctgggccgcctgagagatggagtggagcgctgcagctgccccctgctgcccccccggggccctggggccggccctggggtgggcggccccagccggggccccctggatggcttctctgtgtttggaggcagcagcggcagcgccctgcaggccctgcagggcgagctgtctgaggtgatcctgtccttcagcagcctgaatgacagcctgaatgagctgcagaccaccgtggagggccagggcgctgacctggccgacctgggcgccaccaaggaccgcatcatcagcgagatcaaccggctgcagcaggaggccacagaacatgccacagaaagtgaggagcgcttccggggcctggaggagggccaggcccaggccggccagtgccccagcctggagggccgcctgggccgcctggagggcgtgtgtgagcggctggacacagtggccggcggcctgcagggcctgcgggagggcctgagccgccacgtggccggcctgtgggccggcctgcgggagaccaacaccaccagccagatgcaggccgccctgctggagaagctggtgggcggccaggccggcctgggccggcggctgggcgccctgaacagcagcctgcagctgctggaggaccggctgcaccagctgagcctgaaggacctgactggacctgctggggaggccggccccccaggccccccaggcctgcagggccccccaggccctgctggccccccaggcagccctgggaaggatggccaggagggccccatcggccccccaggcccccagggcgagcagggcgtggagggcgccccagctgcccctgtgccccaggtggccttctctgctgccctgagcctgcccaggtctgagcccggcaccgtgccctttgacagagtgctgctgaatgatggcggctactatgaccctgagaccggggtcttcaccgcccccctggccggccgctacctgctgtctgctgtgctgaccggccacagacatgagaaggtggaggccgtgctgagccgcagcaaccagggcgtggcccgggtggacagcggcggctatgagcctgagggcctggagaacaagcctgtggccgagagccagcccagccctggcaccctgggcgtcttcagcctcatcctgcccctgcaggccggggacacagtgtgtgtggacctggtgatgggccagctggcccacagcgaggagcccctgaccatcttcagcggggccctgctgtatggagaccctgagctggagcacgcctag

SEQ ID NO: 151029 - DNA, 1044 bp, synthetic construct
  misc_feature 1..1044: note = Description of Artificial Sequence: Synthetic coding sequence
  source 1..1044: mol_type = other DNA
atggctgacctgggcgccaccaaggaccgcatcatcagcgagatcaaccggctgcagcaggaggccacagaacatgccacagaaagtgaggagcgcttccggggcctggaggagggccaggcccaggccggccagtgccccagcctggagggccgcctgggccgcctggagggcgtgtgtgagcggctggacacagtggccggcggcctgcagggcctgcgggagggcctgagccgccacgtggccggcctgtgggccggcctgcgggagaccaacaccaccagccagatgcaggccgccctgctggagaagctggtgggcggccaggccggcctgggccggcggctgggcgccctgaacagcagcctgcagctgctggaggaccggctgcaccagctgagcctgaaggacctgactggagagggcaccaagggccctgctggggaggccggccccccaggccccccaggcctgcagggccccccaggccctgctggccccccaggcagccctgggaaggatggccaggagggccccatcggccccccaggcccccagggcgagcagggcgtggagggcgccccagctgcccctgtgccccaggtggccttctctgctgccctgagcctgcccaggtctgagcccggcaccgtgccctttgacagagtgctgctgaatgatggcggctactatgaccctgagactggagtcttcaccgcccccctggccggccgctacctgctgtctgctgtgctgaccggccacagacatgagaaggtggaggccgtgctgagccgcagcaaccagggcgtggcccgggtggacagcggcggctatgagcctgagggcctggagaacaagcctgtggccgagagccagcccagccctggcaccctgggcgtcttcagcctcatcctgcccctgcaggccggggacacagtgtgtgtggacctggtgatgggccagctggcccacagcgaggagcccctgaccatcttcagcggggccctgctgtatggagaccctgagctggagcacgcctag

SEQ ID NO: 151030 - DNA, 1062 bp, synthetic construct
  misc_feature 1..1062: note = Description of Artificial Sequence: Synthetic coding sequence
  source 1..1062: mol_type = other DNA
atgggcagcggcggccgcagcgcccaggtgtccacaggccagagggcctggctgctgccctgccgcttcctgaagaacaccatgagcaatggctatgaggaccacatggccgaggactgccgcggggacatcggccgcaccaacctgattgtgaactacctgccccagaacatgacccaggatgagctgcggagcctcttcagcagcatcggggaggtggagagcgccaagctgatccgggacaaggtggccggccacagcctgggctacggctttgtgaactacgtgacagccaaggatgctgagcgggccatcaacaccctgaatggcctgcggctgcagagcaagaccatcaaggtgtcctatgcccggcccagcagcgaggtgatcaaggatgccaacctgtacatcagcggcctgcccaggaccatgacccagaaggatgtggaggacatgttcagccgcttcggccgcatcatcaacagccgggtgctggtggaccagaccaccggcctgagcagaggagtggccttcatccgctttgacaagaggtctgaggccgaggaggccatcaccagcttcaacggccacaagcccccaggcagcagcgagcccatcaccgtgaagtttgctgccaaccccaaccagaacaagaatgtggccctgctgagccagctgtaccacagccctgccaggagatttggaggccctgtgcaccaccaggcccagcgcttccgcttcagccccatgggcgtggaccacatgagcggcctgtctggagtgaatgtgcctggaaatgccagcagcggctggtgcatcttcatctacaacctgggccaggatgctgatgagggcatcctgtggcagatgtttggcccctttggagctgtgaccaacgtgaaggtgatccgggacttcaacaccaacaagtgcaagggcttcggctttgtgaccatgaccaactatgaggaggccgccatggccatcgccagcctgaatggctaccgcctgggggacaagatcctgcaggtgtccttcaagaccaacaagagccacaagtag

SEQ ID NO: 151031 - DNA, 981 bp, synthetic construct
  misc_feature 1..981: note = Description of Artificial Sequence: Synthetic coding sequence
  source 1..981: mol_type = other DNA
atgagcaatggctatgaggaccacatggccgaggactgccgcggggacattggaagaaccaacctgattgtgaactacctgccccagaacatgacccaggatgagctgcggagcctcttcagcagcattggagaggtggagagcgccaagctgatccgggacaaggtggccggccacagcctgggctacggctttgtgaactacgtgacagccaaggatgctgagcgggccatcaacaccctgaatggcctgcggctgcagagcaagaccatcaaggtgtcctatgcccggcccagcagcgaggtgatcaaggatgccaacctgtacatcagcggcctgcccaggaccatgacccagaaggatgtggaggacatgttcagcagatttggccgcatcatcaacagccgggtgctggtggaccagaccaccggcctgagccggggcgtggccttcatccgctttgacaagaggtctgaggccgaggaggccatcaccagcttcaacggccacaagcccccaggcagcagcgagcccatcaccgtgaagtttgctgccaaccccaaccagaacaagaatgtggccctgctgagccagctgtaccacagccctgccaggagatttggaggccctgtgcaccaccaggcccagcgcttccgcttcagccccatgggcgtggaccacatgagcggcctgagcggcgtgaatgtgcctggaaatgccagcagcggctggtgcatcttcatctacaacctgggccaggatgctgatgagggcatcctgtggcagatgtttggcccctttggagctgtgaccaacgtgaaggtgatccgggacttcaacaccaacaagtgcaagggctttggatttgtgaccatgaccaactatgaggaggccgccatggccatcgccagcctgaatggctaccgcctgggggacaagatcctgcaggtgtccttcaagaccaacaagagccacaagtag

SEQ ID NO: 151032 - DNA, 828 bp, synthetic construct
  misc_feature 1..828: note = Description of Artificial Sequence: Synthetic coding sequence
  source 1..828: mol_type = other DNA
atgagcagcctgcacaagagcagaattgctgacttccaggatgtgctgaaggagcccagcatcgccctggagaagctgcgggagctgtccttcagcggcatcccctgtgagggcggcctgcgctgcctgtgctggaagatcctgctgaactacctgcccctggagcgggcctcctggaccagcatcctggccaagcagcgggagctgtatgcccagttcctgcgggagatgatcatccagcccggcatcgccaaggccaacatgggcgtgtccagagaagatgtgacctttgaggaccaccccctgaaccccaacccagacagccgctggaacacctacttcaaggacaatgaggtgctgctgcagattgacaaggatgtgcggcggctgtgcccagacatctccttcttccagagggccacagactacccctgcctgctgatcctggacccccagaatgaatttgagaccctgaggaagagggtggagcagaccaccctgaagagccagacagtggccaggaacagaagtggagtgaccaaccaggagcagaacatcaagccccagttctttgccttccgctggctgaccctgctgctgagccaggagttcctgctgcctgatgtgatccgcatctgggacagcctgtttgctgatgacaacagatttgacttcctgctgctggtgtgctgtgccatgctgatgctgatccgggagcagctgctggagggggacttcaccgtgaacatgaggctgctgcaggactaccccatcacagatgtgtgccagatcctgcagaaggccaaggagctgcaggacagcaagtag

SEQ ID NO: 151033 - DNA, 1164 bp, synthetic construct
  misc_feature 1..1164: note = Description of Artificial Sequence: Synthetic coding sequence
  source 1..1164: mol_type = other DNA
atggctgtgcggctgtgtgatgtggccagcctgctgcggagcggctcctgggccgctgagccctggacaggagtgattgctgccatggagacccagctgagcaatggccccacctgcaacaacacagccaacggccccaccaccatcaacaacaactgcagcagccctgtggacagcggcaacacagaggacagcaagaccaacctgattgtgaactacctgccccagaacatgacccaggaggagctgaagagcctgtttggcagcatcggggagattgagagctgcaagctggtgcgggacaagatcaccggccagagcctgggctacggctttgtgaactacatcgaccccaaggatgctgagaaggccatcaacaccctgaatggcctgcggctgcagaccaagaccatcaaggtgtcctatgcccggcccagcagcgccagcatcagagatgccaacctgtatgtgtctggcctgcccaagaccatgacccagaaggagctggagcagctgttcagccagtatggccgcatcatcaccagccgcatcctggtggaccaggtgacaggcatcagcagaggagtgggcttcatccgctttgacaagagaattgaagctgaggaggccatcaagggcctgaatggccagaagcccccaggggccacagagcccatcaccgtgaagtttgccaacaaccccagccagaagaccaaccaggccatcctgagccagctgtaccagagccccaacagacgctacccaggccccctggcccagcaggcccagcgcttccggctggacaacctgctgaacatggcctatggagtgaagcgcttcagccccatgaccattgatggcatgaccagcctggccggcatcaacatccctggccaccctggcaccggctggtgcatctttgtgtacaacctggccccagatgctgatgagagcatcctgtggcagatgtttggcccctttggagctgtgaccaacgtgaaggtgatccgggacttcaacaccaacaagtgcaagggctttggatttgtgaccatgaccaactatgatgaggccgccatggccatcgccagcctgaatggctaccgcctgggggacagagtgctgcaggtgtccttcaagaccaacaagacccacaaggcctag

SEQ ID NO: 151034 - DNA, 1041 bp, synthetic construct
  misc_feature 1..1041: note = Description of Artificial Sequence: Synthetic coding sequence
  source 1..1041: mol_type = other DNA
atggagacccagctgagcaatggccccacctgcaacaacacagccaacggccccaccaccatcaacaacaactgcagcagccctgtggacagcggcaacacagaggacagcaagaccaacctgattgtgaactacctgccccagaacatgacccaggaggagctgaagagcctgtttggcagcatcggggagattgagagctgcaagctggtgcgggacaagatcaccggccagagcctgggctacggctttgtgaactacatcgaccccaaggatgctgagaaggccatcaacaccctgaatggcctgcggctgcagaccaagaccatcaaggtgtcctatgcccggcccagcagcgccagcatcagagatgccaacctgtatgtgtctggcctgcccaagaccatgacccagaaggagctggagcagctgttcagccagtatggccgcatcatcaccagccgcatcctggtggaccaggtgacaggcatcagcagaggagtgggcttcatccgctttgacaagagaattgaagctgaggaggccatcaagggcctgaatggccagaagcccccaggggccacagagcccatcaccgtgaagtttgccaacaaccccagccagaagaccaaccaggccatcctgagccagctgtaccagagccccaacagacgctacccaggccccctggcccagcaggcccagcgcttccgcttcagccccatgaccattgatggcatgaccagcctggccggcatcaacatccctggccaccctggcaccggctggtgcatctttgtgtacaacctggccccagatgctgatgagagcatcctgtggcagatgtttggcccctttggagctgtgaccaacgtgaaggtgatccgggacttcaacaccaacaagtgcaagggcttcggctttgtgaccatgaccaactatgatgaagctgccatggccatcgccagcctgaatggctaccgcctgggggacagagtgctgcaggtgtccttcaagaccaacaagacccacaaggcctag

SEQ ID NO: 151035 - DNA, 1080 bp, synthetic construct
  misc_feature 1..1080: note = Description of Artificial Sequence: Synthetic coding sequence
  source 1..1080: mol_type = other DNA
atggagacccagctgagcaatggccccacctgcaacaacacagccaacggccccaccaccatcaacaacaactgcagcagccctgtggacagcggcaacacagaggacagcaagaccaacctgattgtgaactacctgccccagaacatgacccaggaggagctgaagagcctgtttggcagcatcggggagattgagagctgcaagctggtgcgggacaagatcaccggccagagcctgggctacggctttgtgaactacatcgaccccaaggatgctgagaaggccatcaacaccctgaatggcctgcggctgcagaccaagaccatcaaggtgtcctatgcccggcccagcagcgccagcatcagagatgccaacctgtatgtgtctggcctgcccaagaccatgacccagaaggagctggagcagctgttcagccagtatggccgcatcatcaccagccgcatcctggtggaccaggtgacaggcatcagcagaggagtgggcttcatccgctttgacaagagaattgaagctgaggaggccatcaagggcctgaatggccagaagcccccaggggccacagagcccatcaccgtgaagtttgccaacaaccccagccagaagaccaaccaggccatcctgagccagctgtaccagagccccaacagacgctacccaggccccctggcccagcaggcccagcgcttccggctggacaacctgctgaacatggcctatggagtgaagcgcttcagccccatgaccattgatggcatgaccagcctggccggcatcaacatccctggccaccctggcaccggctggtgcatctttgtgtacaacctggccccagatgctgatgagagcatcctgtggcagatgtttggcccctttggagctgtgaccaacgtgaaggtgatccgggacttcaacaccaacaagtgcaagggctttggatttgtgaccatgaccaactatgatgaggccgccatggccatcgccagcctgaatggctaccgcctgggggacagagtgctgcaggtgtccttcaagaccaacaagacccacaaggcctag

SEQ ID NO: 151036 - DNA, 1080 bp, synthetic construct; identical to SEQ ID NO: 151035
  misc_feature 1..1080: note = Description of Artificial Sequence: Synthetic coding sequence
  source 1..1080: mol_type = other DNA

SEQ ID NO: 151037 - DNA, 273 bp, synthetic construct
  misc_feature 1..273: note = Description of Artificial Sequence: Synthetic coding sequence
  source 1..273: mol_type = other DNA
atgacccagaaggagctggagcagctgttcagccagtatggccgcatcatcaccagccgcatcctggtggaccaggtgacaggcatcagccggggcgtgggcttcatccgctttgacaagagaattgaggccgaggaggccatcaagggcctgaatggccagaagcccccaggggccacagagcccatcaccgtgaagtttgccaacaaccccagccagaagaccaaccaggccatcctgagccagctgtaccagagccccaacagaagatag

SEQ ID NO: 151038 - DNA, 570 bp, synthetic construct
  misc_feature 1..570: note = Description of Artificial Sequence: Synthetic coding sequence
  source 1..570: mol_type = other DNA
atggagacccagctgagcaatggccccacctgcaacaacacagccaacggccccaccaccatcaacaacaactgcagcagccctgtggacagcggcaacacagaggacagcaagaccaacctgattgtgaactacctgccccagaacatgacccaggaggagctgaagagcctgtttggcagcatcggggagattgagagctgcaagctggtgcgggacaagatcaccggccagagcctgggctacggctttgtgaactacatcgaccccaaggatgctgagaaggccatcaacaccctgaatggcctgcggctgcagaccaagaccatcaaggtgtcctatgcccggcccagcagcgccagcatcagagatgccaacctgtatgtgtctggcctgcccaagaccatgacccagaaggagctggagcagctgttcagccagtatggccgcatcatcaccagccgcatcctggtggaccaggtgacaggcatcagcagaggagtgggcttcatccgctttgacaagagaattgaagctgaggaggccatcaagggcctgaatggccagtag

SEQ ID NO: 151039 - DNA, 1080 bp, synthetic construct; identical to SEQ ID NO: 151035
  misc_feature 1..1080: note = Description of Artificial Sequence: Synthetic coding sequence
  source 1..1080: mol_type = other DNA

SEQ ID NO: 151040 - DNA, 1104 bp, synthetic construct
  misc_feature 1..1104: note = Description of Artificial Sequence: Synthetic coding sequence
  source 1..1104: mol_type = other DNA
atggtgacccagatcctgggcgccatggagagccaggtgggcggcggccctgctggccctgccctgcccaacggccccctgctgggcaccaatggagccacagatgacagcaagaccaacctgattgtgaactacctgccccagaacatgacccaggatgagttcaagagcctgtttggcagcatcggggacatcgagagctgcaagctggtgcgggacaagatcaccggccagagcctgggctacggctttgtgaactacagcgaccccaatgatgctgacaaggccatcaacaccctgaatggcctgaagctgcagaccaagaccatcaaggtgtcctatgcccggcccagcagcgccagcatcagagatgccaacctgtatgtgtctggcctgcccaagaccatgagccagaaggagatggagcagctgttcagccagtatggccgcatcatcaccagccgcatcctggtggaccaggtgactggagtgtccagaggagtgggcttcatccgctttgacaagagaattgaagctgaggaggccatcaagggcctgaatggccagaagcccctgggcgctgctgagcccatcaccgtgaagtttgccaacaaccccagccagaagacaggccaggccctgctgacccacctgtaccagagcagcgcccggcgctatgccggccccctgcaccaccagacccagcgcttccggctggacaacctgctgaacatggcctatggagtgaagagccccctgagcctcatcgcccgcttcagccccatcgccattgatggcatgagcggcctggccggcgtgggcctgagcggcggggccgccggggccggctggtgcatctttgtgtacaacctgagccctgaggctgatgagagcgtgctgtggcagctgtttggcccctttggagctgtgaccaacgtgaaggtgatccgggacttcaccaccaacaagtgcaagggctttggatttgtgaccatgaccaactatgatgaggccgccatggccatcgccagcctgaatggctaccgcctgggggagcgggtgctgcaggtgtccttcaagaccagcaagcagcacaaggcctag

SEQ ID NO: 151041 - DNA, 1083 bp, synthetic construct
  misc_feature 1..1083: note = Description of Artificial Sequence: Synthetic coding sequence
  source 1..1083: mol_type = other DNA
atggtgacccagatcctgggcgccatggagagccaggtgggcggcggccctgctggccctgccctgcccaacggccccctgctgggcaccaatggagccacagatgacagcaagaccaacctgattgtgaactacctgccccagaacatgacccaggatgagttcaagagcctgtttggcagcatcggggacatcgagagctgcaagctggtgcgggacaagatcaccggccagagcctgggctacggctttgtgaactacagcgaccccaatgatgctgacaaggccatcaacaccctgaatggcctgaagctgcagaccaagaccatcaaggtgtcctatgcccggcccagcagcgccagcatcagagatgccaacctgtatgtgtctggcctgcccaagaccatgagccagaaggagatggagcagctgttcagccagtatggccgcatcatcaccagccgcatcctggtggaccaggtgactggagtgtccagaggagtgggcttcatccgctttgacaagagaattgaagctgaggaggccatcaagggcctgaatggccagaagcccctgggcgctgctgagcccatcaccgtgaagtttgccaacaaccccagccagaagacaggccaggccctgctgacccacctgtaccagagcagcgcccggcgctatgccggccccctgcaccaccagacccagcgcttccggctggacaacctgctgaacatggcctatggagtgaagcgcttcagccccatcgccattgatggcatgagcggcctggccggcgtgggcctgtctggaggagctgctggagctggctggtgcatctttgtgtacaacctgagccctgaggctgatgaatctgtgctgtggcagctgtttggcccctttggagctgtgaccaacgtgaaggtgatccgggacttcaccaccaacaagtgcaagggcttcggctttgtgaccatgaccaactatgatgaagctgccatggccatcgccagcctgaatggctaccgcctgggggagcgggtgctgcaggtgtccttcaagaccagcaagcagcacaaggcctag

SEQ ID NO: 151042 - DNA, 1152 bp, synthetic construct
  misc_feature 1..1152: note = Description of Artificial Sequence: Synthetic coding sequence
  source 1..1152: mol_type = other DNA
atgaggctgctgctgctgcgggagatcgtcatcaatgaaagcaggaactgcagcttcatgatcatcagcaccatggagccccaggtgtccaatggccccaccagcaacaccagcaatggccccagcagcaacaacagaaactgccccagccccatgcagacaggagccaccacagatgacagcaagaccaacctgattgtgaactacctgccccagaacatgacccaggaggagttccgcagcctgtttggcagcatcggggagattgagagctgcaagctggtgcgggacaagatcaccggccagagcctgggctacggctttgtgaactacatcgaccccaaggatgctgagaaggccatcaacaccctgaatggcctgcggctgcagaccaagaccatcaaggtgtcctatgcccggcccagcagcgccagcatcagagatgccaacctgtatgtgtctggcctgcccaagaccatgacccagaaggagctggagcagctgttcagccagtatggccgcatcatcaccagccgcatcctggtggaccaggtgactggagtgtccagaggagtgggcttcatccgctttgacaagagaattgaagctgaggaggccatcaagggcctgaatggccagaagcccagcggggccacagagcccatcaccgtgaagtttgccaacaaccccagccagaagagcagccaggccctgctgagccagctgtaccagagccccaacagacgctacccaggccccctgcaccaccaggcccagcgcttccggctggacaacctgctgaacatggcctatggagtgaagcgcttcagccccatcaccattgatggcatgaccagcctggtgggcatgaacatccctggccacacaggcaccggctggtgcatctttgtgtacaacctgagcccagacagtgatgagagcgtgctgtggcagctgtttggcccctttggagctgtgaacaacgtgaaggtgatccgggacttcaacaccaacaagtgcaagggctttggatttgtgaccatgaccaactatgatgaggccgccatggccatcgccagcctgaatggctaccgcctgggggacagagtgctgcaggtgtccttcaagaccaacaaggcccacaagagctag

SEQ ID NO: 151043 - DNA, 1116 bp, synthetic construct
  misc_feature 1..1116: note = Description of Artificial Sequence: Synthetic coding sequence
  source 1..1116: mol_type = other DNA
atggagtggaatggcctgaagatgatcatcagcaccatggagccccaggtgtccaatggccccaccagcaacaccagcaatggccccagcagcaacaacagaaactgccccagccccatgcagacaggagccaccacagatgacagcaagaccaacctgattgtgaactacctgccccagaacatgacccaggaggagttccgcagcctgtttggcagcatcggggagattgagagctgcaagctggtgcgggacaagatcaccggccagagcctgggctacggctttgtgaactacatcgaccccaaggatgctgagaaggccatcaacaccctgaatggcctgcggctgcagaccaagaccatcaaggtgtcctatgcccggcccagcagcgccagcatcagagatgccaacctgtatgtgtctggcctgcccaagaccatgacccagaaggagctggagcagctgttcagccagtatggccgcatcatcaccagccgcatcctggtggaccaggtgactggagtgtccagaggagtgggcttcatccgctttgacaagagaattgaagctgaggaggccatcaagggcctgaatggccagaagcccagcggggccacagagcccatcaccgtgaagtttgccaacaaccccagccagaagagcagccaggccctgctgagccagctgtaccagagccccaacagacgctacccaggccccctgcaccaccaggcccagcgcttccggctggacaacctgctgaacatggcctatggagtgaagcgcttcagccccatcaccattgatggcatgaccagcctggtgggcatgaacatccctggccacacaggcaccggctggtgcatctttgtgtacaacctgagcccagacagtgatgagagcgtgctgtggcagctgtttggcccctttggagctgtgaacaacgtgaaggtgatccgggacttcaacaccaacaagtgcaagggctttggatttgtgaccatgaccaactatgatgaggccgccatggccatcgccagcctgaatggctaccgcctgggggacagagtgctgcaggtgtccttcaagaccaacaaggcccacaagagctag

SEQ ID NO: 151044 - DNA, 1158 bp, synthetic construct
  misc_feature 1..1158: note = Description of Artificial Sequence: Synthetic coding sequence
  source 1..1158: mol_type = other DNA
atggagtggaatggcctgaagatgatcatcagcaccatggagccccaggtgtccaatggccccaccagcaacaccagcaatggccccagcagcaacaacagaaactgccccagccccatgcagacaggagccaccacagatgacagcaagaccaacctgattgtgaactacctgccccagaacatgacccaggaggagttccgcagcctgtttggcagcatcggggagattgagagctgcaagctggtgcgggacaagatcaccggccagagcctgggctacggctttgtgaactacatcgaccccaaggatgctgagaaggccatcaacaccctgaatggcctgcggctgcagaccaagaccatcaaggtgtcctatgcccggcccagcagcgccagcatcagagatgccaacctgtatgtgtctggcctgcccaagaccatgacccagaaggagctggagcagctgttcagccagtatggccgcatcatcaccagccgcatcctggtggaccaggtgactggagtgtccagaggagtgggcttcatccgctttgacaagagaattgaagctgaggaggccatcaagggcctgaatggccagaagcccagcggggccacagagcccatcaccgtgaagtttgccaacaaccccagccagaagagcagccaggccctgctgagccagctgtaccagagccccaacagacgctacccaggccccctgcaccaccaggcccagcgcttccggctggacaacctgctgaacatggcctatggagtgaagaggctgatgagcggccctgtgccccccagcgcctgccccccacgcttcagccccatcaccattgatggcatgaccagcctggtgggcatgaacatccctggccacacaggcaccggctggtgcatctttgtgtacaacctgagcccagacagtgatgagagcgtgctgtggcagctgtttggcccctttggagctgtgaacaacgtgaaggtgatccgggacttcaacaccaacaagtgcaagggctttggatttgtgaccatgaccaactatgatgaggccgccatggccatcgccagcctgaatggctaccgcctgggggacagagtgctgcaggtgtccttcaagaccaacaaggcccacaagagctag

SEQ ID NO: 151045 - DNA, 1143 bp, synthetic construct
  misc_feature 1..1143: note = Description of Artificial Sequence: Synthetic coding sequence
  source 1..1143: mol_type = other DNA
atggtgatgatcatcagcaccatggagccccaggtgtccaatggccccaccagcaacaccagcaatggccccagcagcaacaacagaaactgccccagccccatgcagacaggagccaccacagatgacagcaagaccaacctgattgtgaactacctgccccagaacatgacccaggaggagttccgcagcctgtttggcagcattggagaaattgagagctgcaagctggtgcgggacaagatcaccggccagagcctgggctacggctttgtgaactacatcgaccccaaggatgctgagaaggccatcaacaccctgaatggcctgcggctgcagaccaagaccatcaaggtgtcctatgcccggcccagcagcgccagcatcagagatgccaacctgtatgtgtctggcctgcccaagaccatgacccagaaggagctggagcagctgttcagccagtatggccgcatcatcaccagccgcatcctggtggaccaggtgactggagtgtcccggggcgtgggcttcatccgctttgacaagagaattgaggccgaggaggccatcaagggcctgaatggccagaagcccagcggggccacagagcccatcaccgtgaagtttgccaacaaccccagccagaagagcagccaggccctgctgagccagctgtaccagagccccaacagacgctacccaggccccctgcaccaccaggcccagcgcttccggctggacaacctgctgaacatggcctacggcgtgaagaggctgatgagcggccctgtgcccccatctgcctgccccccacgcttcagccccatcaccattgatggcatgaccagcctggtgggcatgaacatccctggccacactggaacaggctggtgcatctttgtgtacaacctgagcccagacagtgatgaatctgtgctgtggcagctgtttggcccctttggagctgtgaacaacgtgaaggtgatccgggacttcaacaccaacaagtgcaagggcttcggctttgtgaccatgaccaactatgatgaagctgccatggccatcgccagcctgaatggctaccgcctgggggacagagtgctgcaggtgtccttcaagaccaacaaggcccacaagagctag

SEQ ID NO: 151046 - DNA, 1101 bp, synthetic construct
  misc_feature 1..1101: note = Description of Artificial Sequence: Synthetic coding sequence
  source 1..1101: mol_type = other DNA
atggtgatgatcatcagcaccatggagccccaggtgtccaatggccccaccagcaacaccagcaatggccccagcagcaacaacagaaactgccccagccccatgcagacaggagccaccacagatgacagcaagaccaacctgattgtgaactacctgccccagaacatgacccaggaggagttccgcagcctgtttggcagcattggagaaattgagagctgcaagctggtgcgggacaagatcaccggccagagcctgggctacggctttgtgaactacatcgaccccaaggatgctgagaaggccatcaacaccctgaatggcctgcggctgcagaccaagaccatcaaggtgtcctatgcccggcccagcagcgccagcatcagagatgccaacctgtatgtgtctggcctgcccaagaccatgacccagaaggagctggagcagctgttcagccagtatggccgcatcatcaccagccgcatcctggtggaccaggtgactggagtgtcccggggcgtgggcttcatccgctttgacaagagaattgaggccgaggaggccatcaagggcctgaatggccagaagcccagcggggccacagagcccatcaccgtgaagtttgccaacaaccccagccagaagagcagccaggccctgctgagccagctgtaccagagccccaacagacgctacccaggccccctgcaccaccaggcccagcgcttccggctggacaacctgctgaacatggcctacggcgtgaagcgcttcagccccatcaccattgatggcatgaccagcctggtgggcatgaacatccctggccacactggaacaggctggtgcatctttgtgtacaacctgagcccagacagtgatgaatctgtgctgtggcagctgtttggcccctttggagctgtgaacaacgtgaaggtgatccgggacttcaacaccaacaagtgcaagggcttcggctttgtgaccatgaccaactatgatgaagctgccatggccatcgccagcctgaatggctaccgcctgggggacagagtgctgcaggtgtccttcaagaccaacaaggcccacaagagctag

SEQ ID NO: 151047 - DNA, 1101 bp, synthetic construct
  misc_feature 1..1101: note = Description of Artificial Sequence: Synthetic coding sequence
  source 1..1101: mol_type = other DNA
atggagcagatcatcagcaccatggagccccaggtgtccaatggccccaccagcaacaccagcaatggccccagcagcaacaacagaaactgccccagccccatgcagacaggagccaccacagatgacagcaagaccaacctgattgtgaactacctgccccagaacatgacccaggaggagttccgcagcctgtttggcagcattggagaaattgagagctgcaagctggtgcgggacaagatcaccggccagagcctgggctacggctttgtgaactacatcgaccccaaggatgctgagaaggccatcaacaccctgaatggcctgcggctgcagaccaagaccatcaaggtgtcctatgcccggcccagcagcgccagcatcagagatgccaacctgtatgtgtctggcctgcccaagaccatgacccagaaggagctggagcagctgttcagccagtatggccgcatcatcaccagccgcatcctggtggaccaggtgactggagtgtcccggggcgtgggcttcatccgctttgacaagagaattgaggccgaggaggccatcaagggcctgaatggccagaagcccagcggggccacagagcccatcaccgtgaagtttgccaacaaccccagccagaagagcagccaggccctgctgagccagctgtaccagagccccaacagacgctacccaggccccctgcaccaccaggcccagcgcttccggctggacaacctgctgaacatggcctacggcgtgaagcgcttcagccccatcaccattgatggcatgaccagcctggtgggcatgaacatccctggccacactggaacaggctggtgcatctttgtgtacaacctgagcccagacagtgatgaatctgtgctgtggcagctgtttggcccctttggagctgtgaacaacgtgaaggtgatccgggacttcaacaccaacaagtgcaagggcttcggctttgtgaccatgaccaactatgatgaagctgccatggccatcgccagcctgaatggctaccgcctgggggacagagtgctgcaggtgtccttcaagaccaacaaggcccacaagagctag

SEQ ID NO: 151048 - DNA, 1110 bp, synthetic construct
  misc_feature 1..1110: note = Description of Artificial Sequence: Synthetic coding sequence
  source 1..1110: mol_type = other DNA
atgaggctgaagaaccagatcatcagcaccatggagccccaggtgtccaatggccccaccagcaacaccagcaatggccccagcagcaacaacagaaactgccccagccccatgcagacaggagccaccacagatgacagcaagaccaacctgattgtgaactacctgccccagaacatgacccaggaggagttccgcagcctgtttggcagcatcggggagattgagagctgcaagctggtgcgggacaagatcaccggccagagcctgggctacggctttgtgaactacatcgaccccaaggatgctgagaaggccatcaacaccctgaatggcctgcggctgcagaccaagaccatcaaggtgtcctatgcccggcccagcagcgccagcatcagagatgccaacctgtatgtgtctggcctgcccaagaccatgacccagaaggagctggagcagctgttcagccagtatggccgcatcatcaccagccgcatcctggtggaccaggtgactggagtgtccagaggagtgggcttcatccgctttgacaagagaattgaagctgaggaggccatcaagggcctgaatggccagaagcccagcggggccacagagcccatcaccgtgaagtttgccaacaaccccagccagaagagcagccaggccctgctgagccagctgtaccagagccccaacagacgctacccaggccccctgcaccaccaggcccagcgcttccggctggacaacctgctgaacatggcctatggagtgaagcgcttcagccccatcaccattgatggcatgaccagcctggtgggcatgaacatccctggccacacaggcaccggctggtgcatctttgtgtacaacctgagcccagacagtgatgagagcgtgctgtggcagctgtttggcccctttggagctgtgaacaacgtgaaggtgatccgggacttcaacaccaacaagtgcaagggctttggatttgtgaccatgaccaactatgatgaggccgccatggccatcgccagcctgaatggctaccgcctgggggacagagtgctgcaggtgtccttcaagaccaacaaggcccacaagagctag

SEQ ID NO: 151049 - DNA, 855 bp, synthetic construct
  misc_feature 1..855: note = Description of Artificial Sequence: Synthetic coding sequence
  source 1..855: mol_type = other DNA
atgttccgggctgctgcccctggccagctgcggcgggctgtggcccaggacctgtgcaaggtggccggcatcgccaaggtgctggtggcccagcatgatgtgtacaagggcctgctgcctgaggagctgacccccctcatcctggccacccagaagcagttcaactacacccacatctgtgccggggccagcgccttcggcaagaacctgctgccccgggtggccgccaagctggaggtggcccccatcagtgacatcatcgccatcaagagcccagacacctttgtgaggaccatctatgctggaaatgccctgtgcaccgtgaagtgtgatgagaaggtgaaggtgttttctgtgcggggcaccagctttgatgctgctgccaccagcggcggcagcgccagcagcgagaaggccagcagcaccagccctgtggagatcagcgagtggctggaccagaagctgaccaagagtgacaggcctgagctgaccggggccaaggtggtggtgtctgggggccggggcctgaagagcggggagaacttcaagctgctgtatgacctggccgaccagctgcacgccgctgtgggcgccagcagagctgctgtggatgctggctttgtgcccaatgacatgcaggtgggccagacaggcaagatcgtggcccctgagctgtacatcgctgtgggcatcagcggggccatccagcacctggccggcatgaaggacagcaagaccatcgtggccatcaacaaggaccctgaggcccccatcttccaggtggccgactatggcatcgtggccgacctcttcaaggtggtgcctgagatgacagagatcctgaagaagaagtag

SEQ ID NO: 151050 - DNA, 1002 bp, synthetic construct
  misc_feature 1..1002: note = Description of Artificial Sequence: Synthetic coding sequence
  source 1..1002: mol_type = other DNA
atgttccgggctgctgcccctggccagctgcggcgggccgccagcctgctgcgcttccagagcaccctggtgattgctgagcacgccaatgacagcctggcccccatcaccctgaacaccatcacagctgccacccggctgggcggggaggtgtcctgcctggtggccggcaccaagtgtgacaaggtggcccaggacctgtgcaaggtggccggcatcgccaaggtgctggtggcccagcatgatgtgtacaagggcctgctgcctgaggagctgacccccctcatcctggccacccagaagcagttcaactacacccacatctgtgccggggccagcgccttcggcaagaacctgctgccccgggtggccgccaagctggaggtggcccccatcagtgacatcatcgccatcaagagcccagacacctttgtgaggaccatctatgctggaaatgccctgtgcaccgtgaagtgtgatgagaaggtgaaggtgttttctgtgcggggcaccagctttgatgctgctgccaccagcggcggcagcgccagcagcgagaaggccagcagcaccagccctgtggagatcagcgagtggctggaccagaagctgaccaagagtgacaggcctgagctgactggagccaaggtggtggtgtctgggggccggggcctgaagtctggagagaacttcaagctgctgtatgacctggccgaccagctgcatgctgctgtgggcgccagcagagctgctgtggatgctggctttgtgcccaatgacatgcaggtgggccagacaggcaagatcgtggcccctgagctgtacatcgctgtgggcatcagcggggccatccagcacctggccggcatgaaggacagcaagaccatcgtggccatcaacaaggaccctgaggcccccatcttccaggtggccgactatggaattgtggccgacctcttcaaggtggtgcctgagatgacagagatcctgaagaagaagtag

SEQ ID NO: 151051 - DNA, 768 bp, synthetic construct
  misc_feature 1..768: note = Description of Artificial Sequence: Synthetic coding sequence
  source 1..768: mol_type = other DNA
atggccgagctgcgggtgctggtggccgtgaagagggtcatcgactatgctgtgaagatccgggtgaagccagacagaactggagtggtgacagatggagtgaagcacagcatgaaccccttctgtgaaattgctgtggaggaggccgtgcggctgaaggagaagaagctggtgaaggaggtgattgctgtgtcctgtggccctgcccagtgccaggagaccatcagaacagccctggccatgggcgctgaccggggcatccacgtggaggtgcccccagctgaggccgagcggctgggccccctgcaggtggcccgggtgctggccaagctggccgagaaggagaaggtggacctggtgctgctgggcaagcaggccattgatgatgactgcaaccagacaggccagatgacagctggcttcctggactggccccagggcacctttgccagccaggtgaccctggagggggacaagctgaaggtggagcgggagattgatggcggcctggagaccctgcggctgaagctgcctgctgtggtgacagctgacctgcggctgaatgagcccaggtatgccaccctgcccaacatcatgaaggccaagaagaagaagattgaggtgatcaagccaggggacctgggcgtggacctgaccagcaagctgagcgtcatctctgtggaggaccccccccagaggacagctggggtgaaggtggagaccacagaggacctggtggccaagctgaaggagatcggccgcatctag

SEQ ID NO: 151052 - DNA, 1041 bp, synthetic construct
  misc_feature 1..1041: note = Description of Artificial Sequence: Synthetic coding sequence
  source 1..1041: mol_type = other DNA
atgtacctgagcctgtgggtgaccatcaacacagtgaacctgaggaacaccctgagcggcctgcggggagctgtgaccaccgtgggcatgatcaagagtgatgtgcccggcacccaggagtggctggatgaaagaagacggcagggcgacctgcccctgcccaccaacagcaaccctgtgctgagcctggagctgtgtgaccccggccagggccctgcccccttccaggccgtggtggtgctgatccagcccggccggggcctggccctgcggcccccacccagctgcctcttccccccagaccccacccccagccccccagctggccagatccgggtgaagccagacagaactggagtggtgacagatggagtgaagcacagcatgaaccccttctgtgaaattgctgtggaggaggccgtgcggctgaaggagaagaagctggtgaaggaggtgattgctgtgtcctgtggccctgcccagtgccaggagaccatcagaacagccctggccatgggcgctgaccggggcatccacgtggaggtgcccccagctgaggccgagcggctgggccccctgcaggtggcccgggtgctggccaagctggccgagaaggagaaggtggacctggtgctgctgggcaagcaggccattgatgatgactgcaaccagacaggccagatgacagctggcttcctggactggccccagggcacctttgccagccaggtgaccctggagggggacaagctgaaggtggagcgggagattgatggcggcctggagaccctgcggctgaagctgcctgctgtggtgacagctgacctgcggctgaatgagcccaggtatgccaccctgcccaacatcatgaaggccaagaagaagaagattgaagtcatcaagccaggggacctgggcgtggacctgaccagcaagctgagcgtcatctctgtggaggaccccccccagaggacagctggggtgaaggtggagaccacagaggacctggtggccaagctgaaggagatcggccgcatctag

SEQ ID NO: 151053 - DNA, 1713 bp, synthetic construct
  misc_feature 1..1713: note = Description of Artificial Sequence: Synthetic coding sequence
  source 1..1713: mol_type = other DNA
atgctggtgcccctggccaagctgagctgcctgggcgtgaacatggagagatttgctgaggaggctgatgtggtgattgtgggcgccggccctgctggcctgtctgctgctgtgcggctgaagcagctggccgtggcccacgagaaggacatccgggtgtgcctggtggagaaggccgcccagatcggggcccacaccctgagcggggcctgcctggaccccggggccttcaaggagctgttcccagactggaaggagaagggggcccccctgaacacccctgtgacagaagatcgcttcggcatcctgacagagaagtaccgcatccctgtgcccatcctgcccggcctgcccatgaacaaccacggcaactacatcgtgcggctgggccacctggtgtcctggatgggagagcaggccgaggccctgggcgtggaggtgtacccaggctacgccgctgctgaggtgctcttccatgatgatggctctgtgaagggcatcgccaccaatgatgtgggcatccagaaggatggagcccccaaggccacctttgagcggggcctggagctgcacgccaaggtgaccatctttgctgagggctgccacggccacctggccaagcagctgtacaagaagtttgacctgcgggccaactgtgagccccagacctacggcatcggcctgaaggagctgtgggtgattgatgagaagaactggaagccaggccgggtggaccacacagtgggctggcccctggacagacacacctatggaggcagcttcctgtaccacctgaatgaaggagagcccctggtggccctgggcctggtggtgggcctggactaccagaacccctacctgagccccttccgggagttccagcgctggaagcaccaccccagcatccggcccaccctggagggcggcaagagaattgcctacggggcccgggccctgaatgaaggaggcttccagagcatccccaagctgaccttccctgggggcctgctgattggctgcagccctggcttcatgaatgtgcccaagatcaagggcacccacacagccatgaagagcggcatcctggccgctgagagcatcttcaaccagctgaccagcgagaacctgcagagcaagaccatcggcctgcacgtgacagaatatgaggacaacctgaagaacagctgggtgtggaaggagctgtacagcgtgaggaacatccggcccagctgccacggcgtgctgggcgtgtatggaggcatgatctacacaggcatcttctactggatcctgcggggcatggagccctggaccctgaagcacaagggcagtgactttgagcggctgaagccagccaaggactgcacccccatcgagtaccccaagccagatggccagatcagctttgacctgctgagctctgtggccctgagcggcaccaaccacgagcatgaccagcctgcccacctgaccctgagagatgacagcatccctgtgaacagaaacctgagcatctatgatggccctgagcagcgcttctgcccagctggggtgtatgaatttgtgcctgtggagcagggagatggcttccggctgcagatcaatgcccagaactgtgtgcactgcaagacctgtgacatcaaggaccccagccagaacatcaactgggtggtgcctgagggcggcggcggccctgcctacaacggcatgtag

SEQ ID NO: 151054 - DNA, 1854 bp, synthetic construct
  misc_feature 1..1854: note = Description of Artificial Sequence: Synthetic coding sequence
  source 1..1854: mol_type = other DNA
atgctggtgcccctggccaagctgagctgcctggcctaccagtgcttccacgccctgaagatcaagaagaactacctgcccctgtgtgccacccgctggagcagcaccagcacagtgccccgcatcaccacccactacaccatctacccccgggacaaggacaagcgctgggagggcgtgaacatggagagatttgctgaggaggctgatgtggtgattgtgggcgccggccctgctggcctgtctgctgctgtgcggctgaagcagctggccgtggcccacgagaaggacatccgggtgtgcctggtggagaaggccgcccagattggagcccacaccctgagcggggcctgcctggaccccggggccttcaaggagctgttcccagactggaaggagaagggggcccccctgaacacccctgtgacagaggacagatttggcatcctgacagagaagtaccgcatccctgtgcccatcctgcccggcctgcccatgaacaaccacggcaactacatcgtgcggctgggccacctggtgtcctggatgggagagcaggccgaggccctgggcgtggaggtgtacccaggctatgctgctgctgaggtgctcttccatgatgatggctctgtgaagggcatcgccaccaatgatgtgggcatccagaaggatggagcccccaaggccacctttgagcggggcctggagctgcacgccaaggtgaccatctttgctgagggctgccacggccacctggccaagcagctgtacaagaagtttgacctgcgggccaactgtgagccccagacctatggaattggcctgaaggagctgtgggtgattgatgagaagaactggaagccaggccgggtggaccacacagtgggctggcccctggacagacacacctacggcggcagcttcctgtaccacctgaatgaaggagagcccctggtggccctgggcctggtggtgggcctggactaccagaacccctacctgagccccttccgggagttccagcgctggaagcaccaccccagcatccggcccaccctggagggcggcaagagaattgcctatggagcccgggccctgaatgaaggaggcttccagagcatccccaagctgaccttccctgggggcctgctgattggctgcagccctggcttcatgaatgtgcccaagatcaagggcacccacacagccatgaagagcggcatcctggccgctgagagcatcttcaaccagctgaccagcgagaacctgcagagcaagaccatcggcctgcacgtgacagaatatgaggacaacctgaagaacagctgggtgtggaaggagctgtacagcgtgaggaacatccggcccagctgccacggcgtgctgggcgtgtatggaggcatgatctacacaggcatcttctactggatcctgcggggcatggagccctggaccctgaagcacaagggcagtgactttgagcggctgaagccagccaaggactgcacccccatcgagtaccccaagccagatggccagatcagctttgacctgctgagctctgtggccctgagcggcaccaaccatgaacatgaccagcctgcccacctgaccctgagagatgacagcatccctgtgaacagaaacctgagcatctatgatggccctgagcagcgcttctgcccagctggggtgtatgaatttgtgcctgtggagcagggagatggcttccggctgcagatcaatgcccagaactgtgtgcactgcaagacctgtgacatcaaggaccccagccagaacatcaactgggtggtgcctgagggcggcggcggccctgcctacaacggcatgtag

SEQ ID NO: 151055 - DNA, 1287 bp, synthetic construct
  misc_feature 1..1287: note = Description of Artificial Sequence: Synthetic coding sequence
  source 1..1287: mol_type = other DNA
atggaccccagcgtgaccctgtggcagttcctgctgcagctgctgcgggagcagggcaatggccacatcatctcctggaccagcagagatggaggagagttcaagctggtggatgctgaggaggtggcccggctgtggggcctgaggaagaacaagaccaacatgaactatgacaagctgagccgggccctgcgctactactatgacaagaacatcatcaggaaggtgtctggccagaagtttgtgtacaagtttgtgtcctacccagaggtggccggctgcagcacagaggactgccccccccagcctgaggtgtctgtgaccagcaccatgcccaacgtggccccagctgccatccatgctgcccctggggacacagtgtctgggaagccaggcacccccaagggagctggcatggccggccctgggggcctggcccggagcagcagaaatgagtacatgaggagcggcctgtacagcaccttcaccatccagagcctgcagccccagcccccaccccaccccaggcctgctgtggtgctgcccagcgctgccccagctggagctgctgccccacccagcggcagccgcagcaccagccccagccccctggaggcctgcctggaggccgaggaggccggcctgcccctgcaggtgatcctgaccccacctgaggcccccaacctgaagtctgaggagctgaatgtggagcccggcctgggccgggccctgcccccagaggtgaaggtggagggccccaaggaggagctggaggtggccggggagcggggctttgtgcctgagaccaccaaggccgagcctgaggtgcccccccaggagggcgtgcctgcccggctgcctgctgtggtgatggacacagctggccaggccggcggccatgctgccagcagccctgagatcagccagccccagaagggcaggaagccccgggacctggagctgcccctgagccccagcctgctgggcggccctggccctgagaggaccccaggcagcggcagcggcagcggcctgcaggcccctggccctgccctgacccccagcctgctgcccacccacaccctgacccctgtgctgctgacccccagcagcctgcccccatccatccacttctggagcaccctgagccccatcgcccccaggagccctgccaagctgtccttccagttccccagcagcggcagcgcccaggtgcacatccccagcatctctgtggatggcctgagcacccctgtggtgctgagccctggcccccagaagccctag

SEQ ID NO: 151056 - DNA, 1836 bp, synthetic construct
  misc_feature 1..1836: note = Description of Artificial Sequence: Synthetic coding sequence
  source 1..1836: mol_type = other DNA
atgcctgagatcgtggacacctgcagcctggccagccctgcctctgtgtgcaggaccaagcacctgcacctgcgctgcagcgtggacttcaccaggaggaccctgaccggcacagctgccctgactgtgcagagccaggaggacaacctgcggagcctggtgctggacaccaaggacctgaccatcgagaaggtggtgatcaatggccaggaggtgaagtatgccctgggggagcggcagagctacaagggcagccccatggagatcagcctgcccatcgccctgagcaagaaccaggagatcgtgattgagatcagctttgagaccagccccaagagcagcgccctgcagtggctgaccccagagcagaccagcggcaaggagcacccctacctgttcagccagtgccaggccatccactgccgggccatcctgccctgccaggacacccccagcgtgaagctgacctacacagctgaggtgtctgtgcccaaggagctggtggccctgatgtctgccatcagagatggagagaccccagaccctgaggaccccagcaggaagatctacaagttcatccagaaggtgcccatcccctgctacctgattgccctggtggtgggcgccctggagagccggcagatcggccccaggaccctggtgtggagcgagaaggagcaggtggagaagagcgcctatgagttcagcgagacagagagcatgctgaagattgctgaggacctgggcggcccctacgtgtggggccagtatgacctgctggtgctgcccccatccttcccctacggcggcatggagaacccctgcctgacctttgtgacccccaccctgctggccggggacaagagcctgagcaatgtcatcgcccacgagatcagccacagctggacaggcaacctggtgaccaacaagacctgggaccacttctggctgaatgaaggccacacagtgtacctggagcggcacatctgtggccgcctgtttggagagaagttccgccacttcaatgccctgggcggctggggcgagctgcagaacagcgtgaagacctttggagagacccaccccttcaccaagctggtggtggacctgacagacattgatcctgatgtggcctacagctctgtgccctatgagaagggctttgccctgctcttctacctggagcagctgctgggcggccctgagatcttcctgggcttcctgaaggcctacgtggagaagttctcctacaagagcatcaccacagatgactggaaggacttcctgtacagctacttcaaggacaaggtggatgtgctgaaccaggtggactggaatgcctggctgtacagccctggcctgccccccatcaagcccaactatgacatgaccctgaccaatgcctgcatcgccctgagccagcgctggatcacagccaaggaggatgacctgaacagcttcaatgccacagacctgaaggacctgagcagccaccagctgaatgagttcctggcccagaccctgcagagggcccccctgcccctgggccacatcaagaggatgcaggaggtgtacaacttcaatgccatcaacaacagcgagatccgcttccgctggctgcggctgtgcatccagagcaagtgggaggatgccatccccctggccctgaagatggccacagagcagggccgcatgaagttcacccggcccctcttcaaggacctggccgcctttgacaagagccatgaccaggccgtgaggacctaccaggagcacaaggcctccatgcaccctgtgacagccatgctggtgggcaaggacctgaaggtggactag

SEQ ID NO: 151057 - DNA, 117 bp, synthetic construct
  misc_feature 1..117: note = Description of Artificial Sequence: Synthetic coding sequence
  source 1..117: mol_type = other DNA
atggagagcgccatcaccctgtggcagttcctgctgcagctgctgctggaccagaagcatgagcacctgatctgctggaccagcaatgatggagagttcaagctgctgaaggcctag

SEQ ID NO: 151058 - DNA, 483 bp, synthetic construct
  misc_feature 1..483: note = Description of Artificial Sequence: Synthetic coding sequence
  source 1..483: mol_type = other DNA
atggagagcgccatcaccctgtggcagttcctgctgcagctgctgctggaccagaagcatgagcacctgatctgctggaccagcaatgatggagagttcaagctgctgaaggccgaggaggtggccaagctgtggggcctgaggaagaacaagaccaacatgaactatgacaagctgagccgggccctgcgctactactatgacaagaacatcatcaagaaggtgattggccagaagtttgtgtacaagtttgtgtccttccctgagatcctgaagatggacccccatgctgtggagatcagccgggagagcctgctgctgcaggacagcgactgcaaggccagccctgagggccgggaggcccacaagcacggcctggccgccctgcggagcaccagcagaaatgagtacatccacagcggcctgtacagcagcttcaccatcaacagcctgcagaaccccccagatgccttcaaggcctag

SEQ ID NO: 151059 - DNA, 1218 bp, synthetic construct
  misc_feature 1..1218: note = Description of Artificial Sequence: Synthetic coding sequence
  source 1..1218: mol_type = other DNA
atggattctgccatcaccctgtggcagttcctgctgcagctgctgcagaagccccagaacaagcacatgatctgctggaccagcaatgatggccagttcaagctgctgcaggccgaggaggtggcccggctgtggggcatcaggaagaacaagcccaacatgaactatgacaagctgagccgggccctgcgctactactacgtgaagaacatcatcaagaaggtgaatggccagaagtttgtgtacaagtttgtgtcctacccagagatcctgaacatggaccccatgacagtgggcagaattgaaggagactgtgagagcctgaacttcagcgaggtgagcagcagcagcaaggatgtggagaatggaggcaaggacaagccaccccagcccggggccaagaccagcagcagaaatgactacatccacagcggcctgtacagcagcttcaccctgaacagcctgaacagcagcaatgtgaagctgttcaagctgatcaagacagaaaatcctgctgagaagctggccgagaagaagagcccccaggagcccaccccatctgtcatcaagtttgtgaccacccccagcaagaagccccctgtggagcctgtggccgccaccatcagcatcggccccagcatcagccccagcagcgaggagaccatccaggccctggagaccctggtgagccccaagctgcccagcctggaggcccccaccagcgccagcaatgtgatgacagcctttgccaccaccccacccatcagcagcatcccccccctgcaggagccccccaggacccccagcccccccctgagcagccacccagacatcgacacagacatcgacagcgtggccagccagcccatggagctgcctgagaacctgagcctggagcccaaggaccaggacagcgtgctgctggagaaggacaaggtgaacaacagcagccgcagcaagaagcccaagggcctggagctggcccccaccctggtgatcaccagcagtgaccccagccccctgggcatcctgagccccagcctgcccacagccagcctgaccccagccttcttcagccaggtggcctgcagcctcttcatggtgagccccctgctgtccttcatctgccccttcaagcagatccagaacctgtacacccaggtgtgcttcctgctgctgcgctttgtgctggagcggctgtgtgtgacagtgatgtag

SEQ ID NO: 151060 - DNA, 1296 bp, synthetic construct
  misc_feature 1..1296: note = Description of Artificial Sequence: Synthetic coding sequence
  source 1..1296: mol_type = other DNA
atggattctgccatcaccctgtggcagttcctgctgcagctgctgcagaagccccagaacaagcacatgatctgctggaccagcaatgatggccagttcaagctgctgcaggccgaggaggtggcccggctgtggggcatcaggaagaacaagcccaacatgaactatgacaagctgagccgggccctgcgctactactacgtgaagaacatcatcaagaaggtgaatggccagaagtttgtgtacaagtttgtgtcctacccagagatcctgaacatggaccccatgacagtgggcagaattgaaggagactgtgagagcctgaacttcagcgaggtgagcagcagcagcaaggatgtggagaatggaggcaaggacaagccaccccagcccggggccaagaccagcagcagaaatgactacatccacagcggcctgtacagcagcttcaccctgaacagcctgaacagcagcaatgtgaagctgttcaagctgatcaagacagaaaatcctgctgagaagctggccgagaagaagagcccccaggagcccaccccatctgtcatcaagtttgtgaccacccccagcaagaagccccctgtggagcctgtggccgccaccatcagcatcggccccagcatcagccccagcagcgaggagaccatccaggccctggagaccctggtgagccccaagctgcccagcctggaggcccccaccagcgccagcaatgtgatgacagcctttgccaccaccccacccatcagcagcatcccccccctgcaggagccccccaggacccccagcccccccctgagcagccacccagacatcgacacagacatcgacagcgtggccagccagcccatggagctgcctgagaacctgagcctggagcccaaggaccaggacagcgtgctgctggagaaggacaaggtgaacaacagcagccgcagcaagaagcccaagggcctggagctggcccccaccctggtgatcaccagcagtgaccccagccccctgggcatcctgagccccagcctgcccacagccagcctgaccccagccttcttcagccagacccccatcatcctgacccccagccccctgctgagcagcatccacttctggagcaccctgagccctgtggcccccctgagccctgcccggctgcagggcgccaacaccctcttccagttccccagcgtgctgaacagccacggccccttcaccctgagcggcctggatggccccagcaccccaggccccttctccccagacctgcagaagacctag

SEQ ID NO: 151061 - DNA, 1566 bp, synthetic construct
  misc_feature 1..1566: note = Description of Artificial Sequence: Synthetic coding sequence
  source 1..1566: mol_type = other DNA
cggccccaggacccccggcggcgctgccgggtgcggggccggggcggccgcggggcccggagcagaggaggcggccgctgtggccgcctgcgggcccctgggggcctgggcctggccgctgctgccttctacggcagcgctgctggggtggccgctgctgctgcccccagcagcagcttccagcgggaggaggaggccgagggcggggaggcccaccgggtgcggggcggggaccggggcggggcccccagggctgccagcctgattgccatggattctgccatcaccctgtggcagttcctgctgcagctgctgcagaagccccagaacaagcacatgatctgctggaccagcaatgatggccagttcaagctgctgcaggccgaggaggtggcccggctgtggggcatcaggaagaacaagcccaacatgaactatgacaagctgagccgggccctgcgctactactacgtgaagaacatcatcaagaaggtgaatggccagaagtttgtgtacaagtttgtgtcctacccagagatcctgaacatggaccccatgacagtgggcagaattgaaggagactgtgagagcctgaacttcagcgaggtgagcagcagcagcaaggatgtggagaatggaggcaaggacaagccaccccagcccggggccaagaccagcagcagaaatgactacatccacagcggcctgtacagcagcttcaccctgaacagcctgaacagcagcaatgtgaagctgttcaagctgatcaagacagaaaatcctgctgagaagctggccgagaagaagagcccccaggagcccaccccatctgtcatcaagtttgtgaccacccccagcaagaagccccctgtggagcctgtggccgccaccatcagcatcggccccagcatcagccccagcagcgaggagaccatccaggccctggagaccctggtgagccccaagctgcccagcctggaggcccccaccagcgccagcaatgtgatgacagcctttgccaccaccccacccatcagcagcatcccccccctgcaggagccccccaggacccccagcccccccctgagcagccacccagacatcgacacagacatcgacagcgtggccagccagcccatggagctgcctgagaacctgagcctggagcccaaggaccaggacagcgtgctgctggagaaggacaaggtgaacaacagcagccgcagcaagaagcccaagggcctggagctggcccccaccctggtgatcaccagcagtgaccccagccccctgggcatcctgagccccagcctgcccacagccagcctgaccccagccttcttcagccagacccccatcatcctgacccccagccccctgctgagcagcatccacttctggagcaccctgagccctgtggcccccctgagccctgcccggctgcagggcgccaacaccctcttccagttccccagcgtgctgaacagccacggccccttcaccctgagcggcctggatggccccagcaccccaggccccttctccccagacctgcagaagacctag

SEQ ID NO: 151062 - DNA, 807 bp, synthetic construct
  misc_feature 1..807: note = Description of Artificial Sequence: Synthetic coding sequence
  source 1..807: mol_type = other DNA
atgaatggaacagccaaccccctgctggaccgggaggagcactgcctgcggctgggggagagctttgagaagaggccccgggccagcttccacaccatccgctatgacttcaagccagccagcattgacaccagctgtgagggggagctgcaggtgggcaaaggagatgaggtgaccatcaccctgccccacatccctggcagcaccccacccatgacagtgttcaagggcaacaagaggccctaccagaaggactgtgtgctgatcatcaaccacgacaccggggagtatgtgctggagaagctgagcagcagcatccaggtgaagaagaccagggctgagggcagcagcaagatccaggccaggatggagcagcagcccacccggcccccccagaccagccagcccccacctcctcctccacccatgcccttccgggcccccaccaagccccctgtgggccccaagaccagccccctgaaggacaaccccagccctgagccccagctggatgacatcaagcgggagctgcgggcagaggtggacatcatcgagcagatgagcagcagcagcggcagcagcagcagtgacagcgagagcagcagcggcagtgatgatgacagcagcagcagtggaggagaggacaatggacctgccagccccccccagcccagccaccagcagccctacaacagcaggcctgctgtggccaacggcaccagccggccccagggcagcaaccagctgatgaacaccctgagaaatgacctgcagctgtctgagagcggcagtgacagtgatgactag

SEQ ID NO: 151063 - DNA, 504 bp, synthetic construct
  misc_feature 1..504: note = Description of Artificial Sequence: Synthetic coding sequence
  source 1..504: mol_type = other DNA
atgaagagccagctgcactgccacatcagcctggccgagggcagcagcaagatccaggccaggatggagcagcagcccaccaggcctccccagaccagccagcccccacctcctcctccacccatgcccttccgggcccccaccaagccccctgtgggccccaagaccagccccctgaaggacaaccccagccctgagccccagctggatgacatcaagcgggagctgcgggcagaggtggacatcatcgagcagatgagcagcagcagcggcagcagcagcagtgacagcgagagcagcagcggcagtgatgatgacagcagcagcagtggaggagaagataatggacctgccagccccccccagcccagccaccagcagccctacaacagcaggcctgctgtggccaacggcaccagccggccccagggcagcaaccagctgatgaacaccctgagaaatgacctgcagctgtctgagagcggcagtgacagtgatgactag

SEQ ID NO: 151064 - DNA, 2979 bp, synthetic construct
  misc_feature 1..2979: note = Description of Artificial Sequence: Synthetic coding sequence
  source 1..2979: mol_type = other DNA
atggcccggggcggggccgcctgcaagagtgatgcccggctgctgctgggcagagatgccctgcggcctgccccagccctgctggccccagctgtgctgctgggcgccgccctgggcctgggcctgggcctgtggctgggctgccgggccggccggcagaggaccaggcaccagaaggatgacacccagaacctgctgaagaacctggagagcaatgcccagaccccatctgaaacaggcagccccagcagaagaaggaagcgggaggtgcagatgagcaaggacaaggaggccgtggatgaatgtgagccccccagcaacagcaacatcacagcctttgccctgaaggccaaggtgatctaccccatcaaccagaagttccggcccctggctgatggcagcagcaaccccagcctgcacgagaacctgaagcaggccgtgctgccccaccagcctgtggaggccagccccagcagcagcctgggcagcctgagccagggcgagaaggatgactgcagcagcagcagctctgtgcacagcgccaccagtgatgaccgcttcctgagcaggaccttcctgcgggtgaatgccttccctgaggtgctggcctgtgagagcgtggatgtggacctgtgcatctacagcctgcacctgaaggacctgctgcacctggacacagccctgcggcaggagaagcacatgatgttcatccagatcttcaagatgtgcctgctggacctgctgcccaagaagaagagtgatgatgagctgtaccagaagatcctgagcaagcaggagaaggacctggaggagctggagaagggcctgcaggtgaagctgagcaacacagagatgtctggggccggggacagcgagtacatcaccctggctgatgtggagaagaaggagcgggagtacagcgagcagctgattgacaacatggaggccttctggaagcagatggccaacatccagcacttcctggtggaccagttcaagtgcagcagcagcaaggcccggcagctgatgatgaccctgacagagaggatgattgctgctgagggcctgctgtgtgacagccaggagctgcaggccctggatgccctggagaggaccatgggccgggcccacatggccaaggtgattgagttcctgaagctgcaggtgcaggaggagacccgctgccgcctggccgccatcagccacggcctggagctgctggccggggagggcaagctgagcggccggcagaaggaggagctgctgacccagcagcacaaggccttctggcaggaggccgagcgcttcagccgggagtttgtgcagaggggcaaggacctggtgacagccagcctggcccaccaggtggagggcacagccaagctgaccctggcccaggaggaggagcagaggagcttcctggccgaggcccagcccacagctgaccctgagaagttcctggaggccttccacgaggtgctggagcggcagaggctgatgcagtgtgacctggaggaggaggagaatgtgcgggccacagaagctgtggtggccctgtgccaggagctgtacttcagcacagtggacaccttccagaagtttgtggatgccctcttcctgcagaccctgcccggcatgacaggcctgcccccagaagaatgtgactacctgcggcaggaggtgcaggagaatgctgcctggcagctgggcaagagcaaccgcttccggcggcagcagtggaagctgttccaggagctgctggagcaggaccagcaggtgtggatggaggagtgtgccctgagctctgtgctgcagacccacctgcgggaggaccacgagggcaccatccggggcgtgctgggccgcctgggcggcctgacagaggagagcacccgctgtgtgctgcagggccatgacctgctgctgcggagcgccctgcggcggctggccctgcggggaaatgccctggccaccctgacccagatgaggctgagcggcaagaagcacctgctgcaggagctgcgggagcagagggccctggagcagggcagcagccagtgcctggatgagcaccagtggcagctgctgcgggccctggaggcccgggtgctggaggaggccagccggctggaggaggaggcccagcagacccggctgcagctgcagcagaggctgctggccgaggcccaggaggtgggccagctgctgcagcagcacatggagtgtgccatcggccaggccctgctggtgcacgccagaaatgctgccaccaagagccgggccaaggacagagatgacttcaagaggaccctgatggaggccgctgtggagagcgtgtatgtgaccagcgctggggtgtcccggctggtgcaggcctactaccagcagatcggccgcatcatggaggaccacgaggagaggaagctgcagcacctgaagaccctgcagggcgagaggatggagaactacaagctgaggaagaagcaggagctgagcaaccccagcagcggcagcaggacagctggaggagcccacgagaccagccaggccgtgcaccagaggatgctgagccagcagaagcgcttcctggcccagtttcctgtgcaccagcagatgaggctgcacgcccagcagcagcaggccggcgtgatggacctgctggaggcccagctggagacccagctgcaggaggccgagcagaacttcatcagcgagctggccgccctggcccgggtgcccctggccgagagcaagctgctgcctgccaagaggggcctgctggagaagcccctgcggaccaagaggaagaagcccctgccccaggagcggggggacctgggcgtgcccaacaatgaagacctggccagcggggaccagaccagcggcagcctgagcagcaagaggctgagccagcaggagagcgaggccggggacagcggcaacagcaagaagatgctgaagaggaggagcaacctgtag

SEQ ID NO: 151065 - DNA, 2979 bp, synthetic construct; identical to SEQ ID NO: 151064
  misc_feature 1..2979: note = Description of Artificial Sequence: Synthetic coding sequence
  source 1..2979: mol_type = other DNA

SEQ ID NO: 151066 - DNA, 3687 bp, synthetic construct
  misc_feature 1..3687: note = Description of Artificial Sequence: Synthetic coding sequence
  source 1..3687: mol_type = other DNA
atgatctggcccaaggtggagtgctgccacttcaagacagctgtggaggcccccctgggcatgaagctggacaagaagatggaggtgttcatccccctgagcaccagcgctgccagcagcggcccctgggcccacagcctgtttgccttcatccccagctggcccaagaagaacctcttcaagcgggagagccccatcacccaccggctgtatggagacatcagccgggaggtgcagggcaccagtgaaaatggagtcatcttccagaagtgtgccctggtgtctggcagcagcgaggcccagacagcccgcatctggctgctggtgaacaacaccaagaccaccagcagcgccaacctgtctgagctgctgctgctggacagcattgctggcctgaccatctgggacagcgtgggcaacagaacatctgagggcttccaggccttcagcaagaagttcctgcaggtgggagatgcctttgctgtgtcctatgctgccaccctgcaggccggggacctgggcaatggagagagcctgaagctgcctgcccagctgaccttccagagcagcagcaggaacagaacccagctgaaggtgctcttcagcatcacagcagaagaaaatgtgacagtgctgccccaccacggcctgcatgctgctggcttcttcatcgccttcctgctgagcctggtgctgacctgggccgccctcttcctgatggtgcgctaccagtgcctgaagggcaacatgctgaccaggcaccgggtgtggcagtatgagagcaagctggagcccctgcccttcaccagcgcagatggagtgaatgaagacctgagcctgaatgaccagatgattgacatcctgagcagtgaagatcctggctccatgctgcaggccctggaggagctggagatcgccaccctgaacagagcagatgctgacctggaggcctgcaggacccagatcagcaaggacatcatcgccctgctgctgaagaacctgaccagcagcggccacctgagcccccaggtggagaggaagatgtctgctgtgttcaagaagcagttcctgctgctggagaatgagatccaggaggagtatgacaggaagatggtggccctgacagcagaatgtgacctggagaccaggaagaagatggagaaccagtaccagcgggagatgatggccatggaggaggccgaggagctgctgaagagagctggggagaggtctgctgtggagtgcagcaacctgctgcggaccctgcacggcctggagcaggagcacctgaggaagagcctggccctgcagcaggaggaggactttgccaaggcccaccggcagctggccgtgttccagagaaatgagctgcacagcatcttcttcacccagatcaagagcgccatcttcaagggggagctgaagccagaggccgccaagatgctgctgcagaactacagcaagatccaggagaatgtggaggagctgatggacttcttccaggccagcaagcgctaccacctgagcaagcgcttcggccaccgggagtacctggtgcagaacctgcagagcagcgagaccagggtgcagggcctgctgagcacagctgctgcccagctgacccacctgatccagaagcatgagcgggccggctacctggatgaggaccagatggagatgctgctggagcgggcccagacagaggtgttcagcatcaagcagaagctggacaatgacctgaagcaggagaagaagaagctgcaccagaagctgatcaccaagagaagaagagagctgctgcagaagcaccgggagcagaggcgggagcaggcctctgtgggggaggccttcagaacagtggaggatgctggccagtacctgcaccagaagaggagcctgatggaggagcacggggccaccctggaggagctgcaggagcggctggaccaggccgccctggatgacctgcggaccctgaccctgagcctgtttgagaaggccacagatgagctgcggcggctgcagaacagcgccatgacccaggagctgctgaagaggggcgtgccctggctgttcctgcagcagatcctggaggagcacggcaaggagatggccgcccgggcagagcagctggagggggaggagcgggaccgggaccaggagggcgtgcagagcgtgcggcagaggctgaaggatgatgcccctgaggccgtgacagaggagcaggccgagctgcggcgctgggagcacctgatcttcatgaagctgtgcagctctgtgttcagcctgtctgaggaggagctgctgaggatgaggcaggaggtgcacggctgctttgcccagatggacaggagcctggccctgcccaagatccgggcccgggtgctgctgcagcagttccagacagcctggagggaggccgagtttgtgaagctggaccaggccgtggccgcccctgagctgcagcagcagagcaaggtgaggaagagccgcagcaagagcaagagcaaaggagagctgctgaagaagtgcatcgaggacaagatccacctgtgtgaggagcaggccagcgaggacctggtggagaaggtgcggggggagctgctgcgggagcgggtgcagaggatggaggcccaggagggcggctttgcccagagcctggtggccctgcagttccagaaggccagccgggtgacagagaccctgagcgcctacacagccctgctgagcatccaggacctgctgctggaggagctgagcgccagcgagatgctgaccaagagcgcctgcacccagatcctggagagccacagccgggagctgcaggagctggagaggaagctggaggaccagctggtgcagcaggaggccgcccagcagcagcaggccctggcctcctggcagcagtgggtggctgatggccctggcatcctgaatgaacctggagaggtggacagcgagcggcaggtgtccacagtgctgcaccaggccctgagcaagagccagaccctgctggagcagcaccagcagtgcctgcgggaggagcagcagaacagcgtggtgctggaggacctgctggagaacatggaggccgacacctttgccaccctgtgcagccaggagctgcggctggccagctacctggccaggatggccatggtgcctggggccaccctgcggcggctgctgtctgtggtgctgcccacagccagccagccccagctgctggccctgctggacagcgccacagagcggcacgtggaccacgccgctgagagtgatggcggcgctgagcaggctgatgtgggcagaagaaggaagcaccagagctggtggcaggccctggatggcaagctgcggggggacctgatcagccggggcctggagaagatgctgtgggccaggaagaggaagcagagcatcctgaagaagacctgcctgcccctgcgggagaggatgatcttcagcggcaagggctcctggccccacctgagcctggagcccatcggggagctggcccctgtgcccatcgtgggcgctgagaccatcgacctgctgaacacaggagagaagctgttcatcttcaggaaccccaaggagcctgagatcagcctgcacgtgccccccaggaagaagaagaacttcctgaatgccaagaaggccatgagggccctgggcatggactag

SEQ ID NO: 151067 - DNA, 3927 bp, synthetic construct
  misc_feature 1..3927: note = Description of Artificial Sequence: Synthetic coding sequence
  source 1..3927: mol_type = other DNA
atggaccccagcggcagccggggccggcccacctgggtgctggccggcggcctgctggccgtggccctggccctgggcggccggggctgcctgggcgccagcagccggccccgctggaggcccctgggcgcccagcccccccgggacccccaggtggcccccaggagcggccctggcctgcgcatccccccaggccgctctggagctggccctgagagcagcacccaggacctgccctgcatgatctggcccaaggtggagtgctgccacttcaagacagctgtggaggcccccctgggcatgaagctggacaagaagatggaggtgttcatccccctgagcaccagcgctgccagcagcggcccctgggcccacagcctgtttgccttcatccccagctggcccaagaagaacctcttcaagcgggagagccccatcacccaccggctgtatggagacatcagccgggaggtgcagggcaccagtgaaaatggagtcatcttccagaagtgtgccctggtgtctggcagcagcgaggcccagacagcccgcatctggctgctggtgaacaacaccaagaccaccagcagcgccaacctgtctgagctgctgctgctggacagcattgctggcctgaccatctgggacagcgtgggcaacagaacatctgagggcttccaggccttcagcaagaagttcctgcaggtgggagatgcctttgctgtgtcctatgctgccaccctgcaggccggggacctgggcaatggagagagcctgaagctgcctgcccagctgaccttccagagcagcagcaggaacagaacccagctgaaggtgctcttcagcatcacagcagaagaaaatgtgacagtgctgccccaccacggcctgcatgctgctggcttcttcatcgccttcctgctgagcctggtgctgacctgggccgccctcttcctgatggtgcgctaccagtgcctgaagggcaacatgctgaccaggcaccgggtgtggcagtatgagagcaagctggagcccctgcccttcaccagcgcagatggagtgaatgaagacctgagcctgaatgaccagatgattgacatcctgagcagtgaagatcctggctccatgctgcaggccctggaggagctggagatcgccaccctgaacagagcagatgctgacctggaggcctgcaggacccagatcagcaaggacatcatcgccctgctgctgaagaacctgaccagcagcggccacctgagcccccaggtggagaggaagatgtctgctgtgttcaagaagcagttcctgctgctggagaatgagatccaggaggagtatgacaggaagatggtggccctgacagcagaatgtgacctggagaccaggaagaagatggagaaccagtaccagcgggagatgatggccatggaggaggccgaggagctgctgaagagagctggggagaggtctgctgtggagtgcagcaacctgctgcggaccctgcacggcctggagcaggagcacctgaggaagagcctggccctgcagcaggaggaggactttgccaaggcccaccggcagctggccgtgttccagagaaatgagctgcacagcatcttcttcacccagatcaagagcgccatcttcaagggggagctgaagccagaggccgccaagatgctgctgcagaactacagcaagatccaggagaatgtggaggagctgatggacttcttccaggccagcaagcgctaccacctgagcaagcgcttcggccaccgggagtacctggtgcagaacctgcagagcagcgagaccagggtgcagggcctgctgagcacagctgctgcccagctgacccacctgatccagaagcatgagcgggccggctacctggatgaggaccagatggagatgctgctggagcgggcccagacagaggtgttcagcatcaagcagaagctggacaatgacctgaagcaggagaagaagaagctgcaccagaagctgatcaccaagagaagaagagagctgctgcagaagcaccgggagcagaggcgggagcaggcctctgtgggggaggccttcagaacagtggaggatgctggccagtacctgcaccagaagaggagcctgatggaggagcacggggccaccctggaggagctgcaggagcggctggaccaggccgccctggatgacctgcggaccctgaccctgagcctgtttgagaaggccacagatgagctgcggcggctgcagaacagcgccatgacccaggagctgctgaagaggggcgtgccctggctgttcctgcagcagatcctggaggagcacggcaaggagatggccgcccgggcagagcagctggagggggaggagcgggaccgggaccaggagggcgtgcagagcgtgcggcagaggctgaaggatgatgcccctgaggccgtgacagaggagcaggccgagctgcggcgctgggagcacctgatcttcatgaagctgtgcagctctgtgttcagcctgtctgaggaggagctgctgaggatgaggcaggaggtgcacggctgctttgcccagatggacaggagcctggccctgcccaagatccgggcccgggtgctgctgcagcagttccagacagcctggagggaggccgagtttgtgaagctggaccaggccgtggccgcccctgagctgcagcagcagagcaaggtgaggaagagccgcagcaagagcaagagcaaaggagagctgctgaagaagtgcatcgaggacaagatccacctgtgtgaggagcaggccagcgaggacctggtggagaaggtgcggggggagctgctgcgggagcgggtgcagaggatggaggcccaggagggcggctttgcccagagcctggtggccctgcagttccagaaggccagccgggtgacagagaccctgagcgcctacacagccctgctgagcatccaggacctgctgctggaggagctgagcgccagcgagatgctgaccaagagcgcctgcacccagatcctggagagccacagccgggagctgcaggagctggagaggaagctggaggaccagctggtgcagcaggaggccgcccagcagcagcaggccctggcctcctggcagcagtgggtggctgatggccctggcatcctgaatgaacctggagaggtggacagcgagcggcaggtgtccacagtgctgcaccaggccctgagcaagagccagaccctgctggagcagcaccagcagtgcctgcgggaggagcagcagaacagcgtggtgctggaggacctgctggagaacatggaggccgacacctttgccaccctgtgcagccaggagctgcggctggccagctacctggccaggatggccatggtgcctggggccaccctgcggcggctgctgtctgtggtgctgcccacagccagccagccccagctgctggccctgctggacagcgccacagagcggcacgtggaccacgccgctgagagtgatggcggcgctgagcaggctgatgtgggcagaagaaggaagcaccagagctggtggcaggccctggatggcaagctgcggggggacctgatcagccggggcctggagaagatgctgtgggccaggaagaggaagcagagcatcctgaagaagacctgcctgcccctgcgggagaggatgatcttcagcggcaagggctcctggccccacctgagcctggagcccatcggggagctggcccctgtgcccatcgtgggcgctgagaccatcgacctgctgaacacaggagagaagctgttcatcttcaggaaccccaaggagcctgagatcagcctgcacgtgccccccaggaagaagaagaacttcctgaatgccaagaaggccatgagggccctgggcatggactag

SEQ ID NO: 151068 - DNA, 3741 bp, synthetic construct
  misc_feature 1..3741: note = Description of Artificial Sequence: Synthetic coding sequence
  source 1..3741: mol_type = other DNA
atggaccccagcggcagccggggccggcccacctgggtgctggccggcggcctgctggccgtggccctggccctgggcggccggggctgcctgggcgccagcagccggccccgctggaggcccctgggcgcccagcccccccgggacccccaggtggcccccaggagcggccctggcctgcgcatccccccaggccgctctggagctggccctgagagcagcacccaggacctgccctgcatgatctggcccaaggtggagtgctgccacttcaagacagctgtggaggcccccctgggcatgaagctggacaagaagatggaggtgttcatccccctgagcaccagcgctgccagcagcggcccctgggcccacagcctgtttgccttcatccccagctggcccaagaagaacctcttcaagcgggagagccccatcacccaccggctgtatggagacatcagccgggaggtgcagggcaccagtgaaaatggagtcatcttccagaagtgtgccctggtgtctggcagcagcgaggcccagacagcccgcatctggctgctggtgaacaacaccaagaccaccagcagcgccaacctgtctgagctgctgctgctggacagcattgctggcctgaccatctgggacagcgtgggcaacagaacatctgagggcttccaggccttcagcaagaagttcctgcaggtgggagatgcctttgctgtgtcctatgctgccaccctgcaggccggggacctgggcaatggagagagcctgaagctgcctgcccagctgaccttccagagcagcagcaggaacagaacccagctgaaggtgctcttcagcatcacagcagaagaaaatgtgacagtgctgccccaccacggcctgcatgctgctggcttcttcatcgccttcctgctgagcctggtgctgacctgggccgccctcttcctgatggtgcgctaccagtgcctgaagggcaacatgctgaccaggcaccgggtgtggcagtatgagagcaagctggagcccctgcccttcaccagcgcagatggagtgaatgaagacctgagcctgaatgaccagatgattgacatcctgagcagtgaagatcctggctccatgctgcaggccctggaggagctggagatcgccaccctgaacagagcagatgctgacctggaggcctgcaggacccagatcagcaaggacatcatcgccctgctgctgaagaacctgaccagcagcggccacctgagcccccaggtggagaggaagatgtctgctgtgttcaagaagcagttcctgctgctggagaatgagatccaggaggagtatgacaggaagatggtggccctgacagcagaatgtgacctggagaccaggaagaagatggagaaccagtaccagcgggagatgatggccatggaggaggccgaggagctgctgaagagagctggggagaggtctgctgtggagtgcagcaacctgctgcggaccctgcacggcctggagcaggagcacctgaggaagagcctggccctgcagcaggaggaggactttgccaaggcccaccggcagctggccgtgttccagagaaatgagctgcacagcatcttcttcacccagatcaagagcgccatcttcaagggggagctgaagccagaggccgccaagatgctgctgcagaactacagcaagatccaggagaatgtggaggagctgatggacttcttccaggccagcaagcgctaccacctgagcaagcgcttcggccaccgggagtacctggtgcagaacctgcagagcagcgagaccagggtgcagggcctgctgagcacagctgctgcccagctgacccacctgatccagaagcatgagcgggccggctacctggatgaggaccagatggagatgctgctggagcgggcccagacagaggtgttcagcatcaagcagaagctggacaatgacctgaagcaggagaagaagaagctgcaccagaagctgatcaccaagagaagaagagagctgctgcagaagcaccgggagcagaggcgggagcaggcctctgtgggggaggccttcagaacagtggaggatgctggccagtacctgcaccagaagaggagcctgatggaggagcacggggccaccctggaggagctgcaggagcggctggaccaggccgccctggatgacctgcggaccctgaccctgagcctgtttgagaaggccacagatgagctgcggcggctgcagaacagcgccatgacccaggagctgctgaagaggggcgtgccctggctgttcctgcagcagatcctggaggagcacggcaaggagatggccgcccgggcagagcagctggagggggaggagcgggaccgggaccaggagggcgtgcagagcgtgcggcagaggctgaaggatgatgcccctgaggccgtgacagaggagcaggccgagctgcggcgctgggagcacctgatcttcatgaagctgtgcagctctgtgttcagcctgtctgaggaggagctgctgaggatgaggcaggaggtgcacggctgctttgcccagatggacaggagcctggccctgcccaagatccgggcccgggtgctgctgcagcagttccagacagcctggagggaggccgagtttgtgaagctggaccaggccgtggccgcccctgagctgcagcagcagagcaaggtgaggaagagccgcagcaagagcaagagcaaaggagagctgctgaagaagtgcatcgaggacaagatccacctgtgtgaggagcaggccagcgaggacctggtggagaaggtgcggggggagctgctgcgggagcgggtgcagaggatggaggcccaggagggcggctttgcccagagcctggtggccctgcagttccagaaggccagccgggtgacagagaccctgagcgcctacacagccctgctgagcatccaggacctgctgctggaggagctgagcgccagcgagatgctgaccaagagcgcctgcacccagatcctggagagccacagccgggagctgcaggagctggagaggaagctggaggaccagctggtgcagcaggaggccgcccagcagcagcaggccctggcctcctggcagcagtgggtggctgatggccctggcatcctgaatgaacctggagaggtggacagcgagcggcaggtgtccacagtgctgcaccaggccctgagcaagagccagaccctgctggagcagcaccagcagtgcctgcgggaggagcagcagaacagcgtggtgctggaggacctgctggagaacatggaggccgacacctttgccaccctgtgcagccaggagctgcggctggccagctacctggccaggatggccatggtgcctggggccaccctgcggcggctgctgtctgtggtgctgcccacagccagccagccccagctgctggccctgctggacagcgccacagagcggcacgtggaccacgccgctgagagtgatggcggcgctgagcaggctgatgtgggcagaagaaggaagcaccagagctggtggcaggccctggatggcaagctgcggggggacctgatcagccggggcctggagaagatgctgtgggccaggaagaggaagcagaggagcggcaaccaggagagcttctggcagtacctggtgggcaccccagaaattggcctcatcgagtggatgtctgagaagtag

SEQ ID NO: 151069 - DNA, 882 bp, synthetic construct
  misc_feature 1..882: note = Description of Artificial Sequence: Synthetic coding sequence
  source 1..882: mol_type = other DNA
atgttcatcagcctgtgggagttcttctacggccacttcttccgcttctggatgaagtggctgctgcggcagatgactggaaaatgtgagctgcagaggatctttgacacctacgtgggcgcccagaggacccacagaattgagaacagcctgacctacagcaagaacaaggtgctgcagaaggccacccacgtggtgcagagcgaggtggacaagtatgtggatgacatcatgaaggagaagaacatcaaccctgagaaggatgccagcttcaagatctgcatgaagatgtgcctgctgcagatcaccggctacaagcagctgtacctggatgtggagagcgtgaggaagaggccctatgacagcgacaacctgcagcacgaggagctgctgatgaagctgtggaacctgctgatgcccaccaagaagctgaatgcccgcatcagcaagcagtgggccgagatcggcttccagggagatgaccccaagacagacttccggggcatgggcatcctgggcctcatcaacctggtgtacttcagcgagaactacaccagcgaggcccaccagatcctgagccgcagcaaccaccccaagctgggctacagctatgccatcgtgggcatcaacctgacagagatggcctacagcctgctgaagtctgaggccctgaagttccacctgtacaacctggtgcccggcatccccaccatggagcacttccaccagttctactgctacctggtgtatgaatttgacaagttctggtttgaggaggagcctgagagcatcatgtacttcaacctgtaccgggagaagttccacgagaagatcaagggcctgctgctggactgcaatgtggccctgaccctgaaggtgtag

SEQ ID NO: 151070 - DNA, 507 bp, synthetic construct
  misc_feature 1..507: note = Description of Artificial Sequence: Synthetic coding sequence
  source 1..507: mol_type = other DNA
atgttcatcagcctgtgggagttcttctacggccacttcttccgcttctggatgaagtggctgctgcggcagatgactggaaaatgtgagctgcagaggatctttgacacctacgtgggcgcccagaggacccacagaattgagaacagcctgacctacagcaagaacaaggtgctgcagaaggccacccacgtggtgcagagcgaggtggacaagtatgtggatgacatcatgaaggagaagaacatcaaccctgagaaggatgccagcttcaagatctgcatgaagatgtgcctgctgcagatcaccggctacaagcagctgtacctggatgtggagagcgtgaggaagaggccctatgacagcgacaacctgcagcacgaggagctgctgatgaagctgtggaacctgctgatgcccaccaagaagctgaatgcccgcatcagcaagcagtgggccgagatcggcttccagggagatgaccccaagacagacttccggggctag

SEQ ID NO: 151071 - DNA, 108 bp, synthetic construct
  misc_feature 1..108: note = Description of Artificial Sequence: Synthetic coding sequence
  source 1..108: mol_type = other DNA
atgttcatcagcctgtgggagttcttctacggccacttcttccgcttctggatgaagtggctgctgcggcagatgactggaaaatgtgagctgcagaggatcttctag

SEQ ID NO: 151072 - DNA, 1866 bp, synthetic construct
  misc_feature 1..1866: note = Description of Artificial Sequence: Synthetic coding sequence
  source 1..1866: mol_type = other DNA
atggccgccctgaaggaggacaggagctatggcctgagctgtggccgggtgtctgatggcagcaaggtgtctgtgttccacgtgaagctgacagattctgccctgcgggcctttgagagctaccgggcccggcaggacagcgtgtccctgcggcccagcatccgcttccagggcagccagggccacatcagcatcccccagcctgactgcccagctgaggcccggaccttctccttctacctgagcaacatcggccgggacaacccccagggcagctttgactgcatccagcagtatgtgagcagccatggagaggtgcacctggactgcctgggcagcatccaggacaagatcaccgtgtgtgccacagatgacagctaccagaaggcccggcagagcatggcccaggccgaggaggagaccaggagccgcagcgccatcgtcatcaaggccggcggccgctacctgggcaagaaggtgcagttcaggaagccagcccctggggccacagatgctgtgcccagcaggaagagggccacccccatcaacctggccagcgccatcaggaagagcggggccagcgctgtgtctgggggcagcggcgtgtcccagaggcccttccgggacagagtgctgcacctgctggccctgcggccctacaggaaggccgagctgctgctgcggctgcagaaggatggcctgacccaggccgacaaggatgccctggatggcctgctgcagcaggtggccaacatgtctgccaaggatggcacctgcaccctgcaggactgcatgtacaaggatgtgcagaaggactggccaggctacagcgagggggaccagcagctgctgaagagggtgctggtgaggaagctgtgccagccccagagcacaggcagcctgctgggggaccctgctgccagcagccccccaggagagcggggccgcagcgccagccccccccagaagaggctgcagcccccagacttcatcgaccccctggccaacaagaagccccgcatcagccacttcacccagagggcccagcctgctgtgaatggcaagctgggcgtgcccaacggccgggaggccctgctgcccaccccaggccccccagccagcacagacaccctgagcagcagcacccacctgcccccccggctggagcccccccgggcccatgaccccctggctgatgtgtccaatgacctgggccacagcggccgggactgtgaacatggagaggccgccgccccagcccccaccgtgcggctgggcctgcccctgctgacagactgtgcccagcccagccggccccacggcagccccagccgcagcaagcccaagaagaagagcaagaagcacaaggacaaggagagagctgctgaggacaagccccgggcccagctgcctgactgtgccccagccacccacgccacccctggggccccagctgacaccccaggcctgaatggcacctgcagcgtgtcctctgtgcccaccagcaccagcgagaccccagactacctgctgaagtatgctgccatcagcagcagcgagcagaggcagagctacaagaatgacttcaatgctgagtacagcgagtacagagacctgcacgccagaattgagcgcatcacccggcgcttcacccagctggatgcccagctgcggcagctgagccagggcagcgaggagtatgagaccacccggggccagatcctgcaggagtacaggaagatcaagaagaccaacaccaactacagccaggagaagcaccgctgtgagtacctgcacagcaagctggcccacatcaagaggctgattgctgaatatgaccagaggcagctgcaggcctggccctag

SEQ ID NO: 151073 - DNA, 90 bp, synthetic construct
  misc_feature 1..90: note = Description of Artificial Sequence: Synthetic coding sequence
  source 1..90: mol_type = other DNA
atccaccggctggtggtggccttccaggacagcgtgtccctgcggcccagcatccgcttccagggcagccagggcgagatgagcctgtag

SEQ ID NO: 151074 - DNA, 1194 bp, synthetic construct
  misc_feature 1..1194: note = Description of Artificial Sequence: Synthetic coding sequence
  source 1..1194: mol_type = other DNA
atggaggagctgcaggagcccctgcggggccagctgcggctgtgcttcacccaggccgcccggaccagcctgctgctgctgcggctgaatgatgctgccctgcgggccctgcaggagtgccagaggcagcaggtgcggcctgtgattgccttccagggccaccggggctacctgcggctgcccggccctggctggagctgcctcttctccttcatcgtgtcccagtgctgccaggagggcgccggcggcagcctggacctggtgtgccagcgcttcctgcggagcggccccaacagcctgcactgcctgggcagcctgcgggagcggctcatcatctgggccgccatggacagcatcccagcccccagctctgtgcagggccacaacctgacagaagatgcccggcaccctgagagctggcagaacacaggaggctacagtgaaggagatgctgtgtcccagccccagatggccctggaggaggtgtctgtgtctgaccccctggccagcaaccagggccagagcctgcccggcagcagccgggagcacatggcccagtgggaggtgcgcagccagacccacgtgcccaaccgggagcctgtgcaggccctgcccagcagcgccagcaggaagaggctggacaagaagaggtctgtgcctgtggccaccgtggagctggaggagaagcgcttccgcaccctgcccctggtgcccagccccctgcagggcctgaccaaccaggacctgcaggagggggaggactgggagcaggaggatgaggacatggacccccggctggagcacagcagctctgtgcaggaggacagcgagagccccagccctgaggacatcccagactacctgctgcagtaccgggccatccacagcgctgagcagcagcacgcctatgagcaggactttgaaacagattatgcagagtaccgcatcctgcacgcccgggtgggcacagccagccagcgcttcatcgagctgggcgctgagatcaagagggtgagaagaggcaccccagagtacaaggtgctggaggacaagatcatccaggagtacaagaagttcaggaagcagtaccccagctaccgggaggagaagagaagatgtgagtacctgcaccagaagctgagccacatcaagggcctcatcctggagtttgaggagaagaacagaggcagctag

SEQ ID NO: 151075 - DNA, 2889 bp, synthetic construct
  misc_feature 1..2889: note = Description of Artificial Sequence: Synthetic coding sequence
  source 1..2889: mol_type = other DNA
atggacacagacctgtatgatgaatttggaaactacatcggccctgagctggacagtgatgaagatgatgatgagctgggccgggagaccaaggacctggatgagatggatgatgatgatgatgatgatgatgtgggggaccatgatgatgaccaccctggcatggaggtggtgctgcacgaggtgtatggccctgaggtggagaccatcgtgcaggaggaggacacccagcccctgacagagcccatcatcaagcctgtgaagaccaagaagttcaccctgatggagcagaccctgcctgtgacagtgtatgagatggacttcctggccgacctgatggacaacagcgagctgatcagaaatgtgaccctgtgtggccacctgcaccacggcaagacctgctttgtggactgcctgattgagcagacccaccctgagatcaggaagagatatgaccaggacctgtgctacacagacatcctcttcacagagcaggagcggggcgtgggcatcaagagcacccctgtgacagtggtgctgcctgacaccaagggcaagagctacctgttcaacatcatggacaccccaggccacgtgaacttcagtgatgaggtgacagctggcctgcgcatcagtgatggagtggtgctcttcattgatgctgctgagggcgtgatgctgaacacagagcggctcatcaagcatgctgtgcaggagcggctggccgtgacagtgtgcatcaacaagattgacaggctcatcctggagctgaagctgcccccaacagatgcctactacaagctgcggcacatcgtggatgaggtgaatggcctcatctccatgtacagcacagatgagaacctgatcctgagccccctgctgggcaatgtgtgcttcagcagcagccagtacagcatctgcttcaccctgggcagctttgccaagatctatgctgacacctttggagacatcaactaccaggagtttgccaagaggctgtggggagacatctacttcaaccccaagaccaggaagttcaccaagaaggcccccaccagcagcagccagaggagctttgtggagttcatcctggagcccctgtacaagatcctggcccaggtggtgggagatgtggacaccagcctgcccaggaccctggatgagctgggcatccacctgaccaaggaggagctgaagctgaacatccggcccctgctgcggctggtgtgcaagaagttcttcggggagttcaccggctttgtggacatgtgtgtgcagcacatccccagccccaaggtgggcgccaagcccaagattgagcacacctacacaggaggagtggacagcgacctgggggaggccatgtctgactgtgaccctgatggccccctgatgtgccacaccaccaagatgtacagcacagatgatggagtgcagttccacgccttcggccgggtgctgagcggcaccatccatgctggccagcctgtgaaggtgctgggggagaactacaccctggaggatgaggaggacagccagatctgcaccgtgggccgcctgtggatctctgtggcccgctaccacatcgaggtgaacagagtgcctgctggcaactgggtgctgattgagggcgtggaccagcccatcgtgaagacagccaccatcacagagcccagaggaaatgaggaggcccagatcttccggcccctgaagttcaacaccaccagcgtcatcaagattgctgtggagcctgtgaaccccagcgagctgcccaagatgctggatggcctgaggaaggtgaacaagagctaccccagcctgaccaccaaggtggaggagagcggggagcacgtgatcctgggcaccggggagctgtacctggactgtgtgatgcatgacctgaggaagatgtacagcgagattgacatcaaggtggccgaccctgtggtgaccttctgtgaaacagtggtggagaccagcagcctgaagtgctttgctgagacccccaacaagaagaacaagatcaccatgattgctgagcccctggagaagggcctggccgaggacattgaaaatgaggtggtgcagatcacctggaacaggaagaagctgggggagttcttccagaccaagtatgactgggacctgctggccgcccggagcatctgggcctttggaccagatgccaccggccccaacatcctggtggatgacaccctgcccagcgaggtggacaaggccctgctgggctctgtgaaggacagcatcgtgcagggcttccagtggggcacccgggagggccccctgtgtgatgagctgatcagaaatgtgaagttcaagatcctggatgctgtggtggcccaggagcccctgcaccggggcggcggccagatcatccccacagccaggagagtggtgtacagcgccttcctgatggccaccccccggctgatggagccctactactttgtggaggtgcaggccccagctgactgtgtgtctgctgtgtacacagtgctggccaggagaagaggccacgtgacccaggatgcccccatccctggcagccccctgtacaccatcaaggccttcatcccagccatcgacagctttggatttgaaacagacctgcggacccacacccagggccaggccttcagcctgtctgtgttccaccactggcagatcgtgcctggggaccccctggacaagagcatcgtcatccggcccctggagccccagcctgccccccacctggcccgggagttcatgatcaagaccaggaggaggaagggcctgtctgaagatgtgtccatcagcaagttctttgatgaccccatgctgctggagctggccaagcaggatgtggtgctgaactaccccatgtag

SEQ ID NO: 151076 - DNA, 2814 bp, synthetic construct
  misc_feature 1..2814: note = Description of Artificial Sequence: Synthetic coding sequence
  source 1..2814: mol_type = other DNA
atggatgatgatgatgatgatgatgatgtgggggaccatgatgatgaccaccctggcatggaggtggtgctgcacgaggacaagaagtactaccccacagctgaggaggtgtatggccctgaggtggagaccatcgtgcaggaggaggacacccagcccctgacagagcccatcatcaagcctgtgaagaccaagaagttcaccctgatggagcagaccctgcctgtgacagtgtatgagatggacttcctggccgacctgatggacaacagcgagctgatcagaaatgtgaccctgtgtggccacctgcaccacggcaagacctgctttgtggactgcctgattgagcagacccaccctgagatcaggaagagatatgaccaggacctgtgctacacagacatcctcttcacagagcaggagcggggcgtgggcatcaagagcacccctgtgacagtggtgctgcctgacaccaagggcaagagctacctgttcaacatcatggacaccccaggccacgtgaacttcagtgatgaggtgacagctggcctgcgcatcagtgatggagtggtgctcttcattgatgctgctgagggcgtgatgctgaacacagagcggctcatcaagcatgctgtgcaggagcggctggccgtgacagtgtgcatcaacaagattgacaggctcatcctggagctgaagctgcccccaacagatgcctactacaagctgcggcacatcgtggatgaggtgaatggcctcatctccatgtacagcacagatgaaaatctcatcctgagccccctgctgggcaatgtgtgcttcagcagcagccagtacagcatctgcttcaccctgggcagctttgccaagatctatgctgacaccttcggggacatcaactaccaggagtttgccaagaggctgtggggagacatctacttcaaccccaagaccaggaagttcaccaagaaggcccccaccagcagcagccagaggagctttgtggagttcatcctggagcccctgtacaagatcctggcccaggtggtgggagatgtggacaccagcctgcccaggaccctggatgagctgggcatccacctgaccaaggaggagctgaagctgaacatccggcccctgctgcggctggtgtgcaagaagttctttggagagttcaccggctttgtggacatgtgtgtgcagcacatccccagccccaaggtgggcgccaagcccaagattgagcacacctacacaggaggagtggacagcgacctgggggaggccatgtctgactgtgaccctgatggccccctgatgtgccacaccaccaagatgtacagcacagatgatggagtgcagttccacgccttcggccgggtgctgagcggcaccatccacgccggccagcctgtgaaggtgctgggggagaactacaccctggaggatgaggaggacagccagatctgcaccgtgggccgcctgtggatctctgtggcccgctaccacatcgaggtgaacagagtgcctgctggcaactgggtgctgattgaaggagtggaccagcccatcgtgaagacagccaccatcacagagcccagaggaaatgaggaggcccagatcttccggcccctgaagttcaacaccaccagcgtcatcaagattgctgtggagcctgtgaaccccagcgagctgcccaagatgctggatggcctgaggaaggtgaacaagagctaccccagcctgaccaccaaggtggaggagagcggggagcacgtgatcctgggcactggagagctgtacctggactgtgtgatgcatgacctgaggaagatgtacagcgagattgacatcaaggtggccgaccctgtggtgaccttctgtgagaccgtggtggagaccagcagcctgaagtgctttgctgagacccccaacaagaagaacaagatcaccatgattgctgagcccctggagaagggcctggctgaagatattgaaaatgaggtggtgcagatcacctggaacaggaagaagctgggggagttcttccagaccaagtatgactgggacctgctggccgcccggagcatctgggccttcggcccagatgccaccggccccaacatcctggtggatgacaccctgcccagcgaggtggacaaggccctgctgggctctgtgaaggacagcatcgtgcagggcttccagtggggcacccgggagggccccctgtgtgatgagctgatcagaaatgtgaagttcaagatcctggatgctgtggtggcccaggagcccctgcacagaggaggcggccagatcatccccacagcccggcgggtggtgtacagcgccttcctgatggccaccccccggctgatggagccctactactttgtggaggtgcaggccccagctgactgtgtgtctgctgtgtacacagtgctggcccggcggcggggccacgtgacccaggatgcccccatccctggcagccccctgtacaccatcaaggccttcatcccagccatcgacagctttggatttgaaacagacctgcggacccacacccagggccaggccttcagcctgagcgtcttccaccactggcagatcgtgcctggggaccccctggacaagagcatcgtcatccggcccctggagccccagcctgccccccacctggcccgggagttcatgatcaagaccaggaggaggaagggcctgtctgaagatgtgtccatcagcaagttctttgatgaccccatgctgctggagctggccaagcaggatgtggtgctgaactaccccatgtag

SEQ ID NO: 151077 - DNA, 2919 bp, synthetic construct
  misc_feature 1..2919: note = Description of Artificial Sequence: Synthetic coding sequence
  source 1..2919: mol_type = other DNA
atggacacagacctgtatgatgaatttggaaactacatcggccctgagctggacagtgatgaagatgatgatgagctgggccgggagaccaaggacctggatgagatggatgatgatgatgatgatgatgatgtgggggaccatgatgatgaccaccctggcatggaggtggtgctgcacgaggacaagaagtactaccccacagctgaggaggtgtatggccctgaggtggagaccatcgtgcaggaggaggacacccagcccctgacagagcccatcatcaagcctgtgaagaccaagaagttcaccctgatggagcagaccctgcctgtgacagtgtatgagatggacttcctggccgacctgatggacaacagcgagctgatcagaaatgtgaccctgtgtggccacctgcaccacggcaagacctgctttgtggactgcctgattgagcagacccaccctgagatcaggaagagatatgaccaggacctgtgctacacagacatcctcttcacagagcaggagcggggcgtgggcatcaagagcacccctgtgacagtggtgctgcctgacaccaagggcaagagctacctgttcaacatcatggacaccccaggccacgtgaacttcagtgatgaggtgacagctggcctgcgcatcagtgatggagtggtgctcttcattgatgctgctgagggcgtgatgctgaacacagagcggctcatcaagcatgctgtgcaggagcggctggccgtgacagtgtgcatcaacaagattgacaggctcatcctggagctgaagctgcccccaacagatgcctactacaagctgcggcacatcgtggatgaggtgaatggcctcatctccatgtacagcacagatgagaacctgatcctgagccccctgctgggcaatgtgtgcttcagcagcagccagtacagcatctgcttcaccctgggcagctttgccaagatctatgctgacacctttggagacatcaactaccaggagtttgccaagaggctgtggggagacatctacttcaaccccaagaccaggaagttcaccaagaaggcccccaccagcagcagccagaggagctttgtggagttcatcctggagcccctgtacaagatcctggcccaggtggtgggagatgtggacaccagcctgcccaggaccctggatgagctgggcatccacctgaccaaggaggagctgaagctgaacatccggcccctgctgcggctggtgtgcaagaagttcttcggggagttcaccggctttgtggacatgtgtgtgcagcacatccccagccccaaggtgggcgccaagcccaagattgagcacacctacacaggaggagtggacagcgacctgggggaggccatgtctgactgtgaccctgatggccccctgatgtgccacaccaccaagatgtacagcacagatgatggagtgcagttccacgccttcggccgggtgctgagcggcaccatccatgctggccagcctgtgaaggtgctgggggagaactacaccctggaggatgaggaggacagccagatctgcaccgtgggccgcctgtggatctctgtggcccgctaccacatcgaggtgaacagagtgcctgctggcaactgggtgctgattgagggcgtggaccagcccatcgtgaagacagccaccatcacagagcccagaggaaatgaggaggcccagatcttccggcccctgaagttcaacaccaccagcgtcatcaagattgctgtggagcctgtgaaccccagcgagctgcccaagatgctggatggcctgaggaaggtgaacaagagctaccccagcctgaccaccaaggtggaggagagcggggagcacgtgatcctgggcaccggggagctgtacctggactgtgtgatgcatgacctgaggaagatgtacagcgagattgacatcaaggtggccgaccctgtggtgaccttctgtgaaacagtggtggagaccagcagcctgaagtgctttgctgagacccccaacaagaagaacaagatcaccatgattgctgagcccctggagaagggcctggccgaggacattgaaaatgaggtggtgcagatcacctggaacaggaagaagctgggggagttcttccagaccaagtatgactgggacctgctggccgcccggagcatctgggcctttggaccagatgccaccggccccaacatcctggtggatgacaccctgcccagcgaggtggacaaggccctgctgggctctgtgaaggacagcatcgtgcagggcttccagtggggcacccgggagggccccctgtgtgatgagctgatcagaaatgtgaagttcaagatcctggatgctgtggtggcccaggagcccctgcaccggggcggcggccagatcatccccacagccaggagagtggtgtacagcgccttcctgatggccaccccccggctgatggagccctactactttgtggaggtgcaggccccagctgactgtgtgtctgctgtgtacacagtgctggccaggagaagaggccacgtgacccaggatgcccccatccctggcagccccctgtacaccatcaaggccttcatcccagccatcgacagctttggatttgaaacagacctgcggacccacacccagggccaggccttcagcctgtctgtgttccaccactggcagatcgtgcctggggaccccctggacaagagcatcgtcatccggcccctggagccccagcctgccccccacctggcccgggagttcatgatcaagaccaggaggaggaagggcctgtctgaagatgtgtccatcagcaagttctttgatgaccccatgctgctggagctggccaagcaggatgtggtgctgaactaccccatgtag

SEQ ID NO: 151078 - DNA, 1923 bp, synthetic construct
  misc_feature 1..1923: note = Description of Artificial Sequence: Synthetic coding sequence
  source 1..1923: mol_type = other DNA
atggctgctgggggcaccggcggcctgcgggaggagcagagatatggcctgagctgtggccgcctgggccaggacaacatcaccgtgctgcacgtgaagctgacagaaacagccatccgggccctggagacctaccagagccacaagaacctgatccccttccggcccagcatccagttccagggcctgcacggcctggtgaagatccccaagaatgaccccctgaatgaggtgcacaacttcaacttctacctgagcaatgtgggcaaggacaacccccagggcagctttgactgcatccagcagaccttcagcagcagcggggccagccagctgaactgcctgggcttcatccaggacaagatcaccgtgtgtgccaccaatgacagctaccagatgacccgggagaggatgacccaggccgaggaggagagcaggaacagaagcaccaaggtgatcaagccaggcggcccctacgtgggcaagagggtgcagatcaggaaggccccccaggccgtgtctgacacagtgcctgagaggaagaggagcacccccatgaacccagccaacaccatcaggaagacccacagcagcagcaccatcagccagaggccctacagagacagagtcatccacctgctggccctgaaggcctacaagaagccagagctgctggcccggctgcagaaggatggagtgaaccagaaggacaagaacagcctgggcgccatcctgcagcaggtggccaacctgaacagcaaggacctgagctacaccctgaaggactatgtgttcaaggagctgcagagggactggccaggctacagcgagattgaccggcgcagcctggagagcgtgctgagcaggaagctgaaccccagccagaatgctgctggcaccagccgctctgagagccctgtgtgcagcagcagagatgctgtgagcagcccccagaagaggctgctggacagcgagttcatcgaccccctgatgaacaagaaggcccgcatcagccacctgaccaacagagtgccccccaccctgaatggccacctgaaccccaccagcgagaagtctgctgctggcctgcccctgcccccagctgctgctgccatccccaccccaccacccctgcccagcacctacctgcccatcagccaccccccccagatcgtgaacagcaacagcaacagccccagcaccccagagggccggggcacccaggacctgcctgtggacagcttcagccagaatgacagcatctatgaggaccagcaggacaagtacaccagcaggaccagcctggagaccctgcccccaggctctgtgctgctgaagtgccccaagcccatggaggagaaccacagcatgagccacaagaagagcaagaagaagagcaagaagcacaaggagaaggaccagatcaagaagcatgacatcgagaccatcgaggagaaggaggaggacctgaagcgggaggaggagatcgccaagctgaacaacagcagccccaacagcagtggaggagtgaaggaggactgcacagcctccatggagcccagcgccatcgagctgcctgactacctgatcaagtacatcgccatcgtgtcctatgagcagaggcagaactacaaggatgacttcaatgcagaatatgatgagtaccgggccctgcacgccaggatggagaccgtggcccggcgcttcatcaagctggatgcccagaggaagaggctgagccctggcagcaaggagtaccagaatgtgcatgaggaggtgctgcaggagtaccagaagatcaagcagagcagccccaactaccacgaggagaagtaccgctgtgagtacctgcacaacaagctggcccacatcaagaggctcatcggggagtttgaccagcagcaggccgagagctggagctag

SEQ ID NO: 151079 - DNA, 1173 bp, synthetic construct
  misc_feature 1..1173: note = Description of Artificial Sequence: Synthetic coding sequence
  source 1..1173: mol_type = other DNA
atggctgctgggggcaccggcggcctgcgggaggagcagagatatggcctgagctgtggccgcctgggccaggacaacatcaccgtgctgcacgtgaagctgacagaaacagccatccgggccctggagacctaccagagccacaagaacctgatccccttccggcccagcatccagttccagggcctgcacggcctggtgaagatccccaagaatgaccccctgaatgaggtgcacaacttcaacttctacctgagcaatgtgggcaaggacaacccccagggcagctttgactgcatccagcagaccttcagcagcagcggggccagccagctgaactgcctgggcttcatccaggacaagatcaccgtgtgtgccaccaatgacagctaccagatgacccgggagaggatgacccagatcgtgaacagcaacagcaacagccccagcaccccagagggccggggcacccaggacctgcctgtggacagcttcagccagaatgacagcatctatgaggaccagcaggacaagtacaccagcaggaccagcctggagaccctgcccccaggctctgtgctgctgaagtgccccaagcccatggaggagaaccacagcatgagccacaagaagagcaagaagaagagcaagaagcacaaggagaaggaccagatcaagaagcatgacatcgagaccatcgaggagaaggaggaggacctgaagcgggaggaggagatcgccaagctgaacaacagcagccccaacagcagtggaggagtgaaggaggactgcacagcctccatggagcccagcgccatcgagctgcctgactacctgatcaagtacatcgccatcgtgtcctatgagcagaggcagaactacaaggatgacttcaatgcagaatatgatgagtaccgggccctgcacgccaggatggagaccgtggcccggcgcttcatcaagctggatgcccagaggaagaggctgagccctggcagcaaggagtaccagaatgtgcatgaggaggtgctgcaggagtaccagaagatcaagcagagcagccccaactaccacgaggagaagtaccgctgtgagtacctgcacaacaagctggcccacatcaagaggctcatcggggagtttgaccagcagcaggccgagagctggagctag

SEQ ID NO: 151080 - DNA, 1644 bp, synthetic construct
  misc_feature 1..1644: note = Description of Artificial Sequence: Synthetic coding sequence
  source 1..1644: mol_type = other DNA
atgaggcagaagaggaagggggacctgagccctgctgagctgatgatgctgaccatcggagatgtgatcaagcagctgattgaggcccacgagcagggcaaggacatcgacctgaacaaggtgaagaccaagacagctgccaagtatggcctgagcgcccagccccggctggtggacatcatcgctgctgtgcccccccagtacaggaaggtgctgatgcccaagctgaaggccaagcccatcagaacagccagcggcattgctgtggtggccgtgatgtgcaagccccaccgctgcccccacatctccttcaccggcaacatctgtgtgtactgccctgggggccctgacagcgactttgagtacagcacccagagctacacaggctatgagcccacctccatgagggccatccgggcccgctatgaccccttcctgcagaccaggcaccgcatcgagcagctgaagcagctgggccacagcgtggacaaggtggagttcatcgtgatgggcggcaccttcatggccctgcctgaggagtacagagactacttcatccggaacctgcatgatgccctgagcggccacaccagcaacaacatctatgaggccgtgaagtacagcgagaggagcctgaccaagtgcatcggcatcaccatcgagaccaggccagactactgcatgaagaggcacctgagtgacatgctgacctacggctgcacccggctggagattggagtgcagagcgtgtatgaagatgtggcccgggacaccaacagaggccacacagtgaaggctgtgtgtgagagcttccacctggccaaggacagcggcttcaaggtggtggcccacatgatgccagacctgcccaacgtgggcctggagcgggacatcgagcagttcacagagttctttgagaacccagccttccggccagatggcctgaagctgtaccccaccctggtgatccggggcaccggcctgtatgagctgtggaagagcggccgctacaagagctacagccccagcgacctggtggagctggtggcccgcatcctggccctggtgcccccctggaccagggtgtacagagtgcagagggacatccccatgcccctggtgagcagcggcgtggagcacggcaacctgcgggagctggccctggccaggatgaaggacctgggcatccagtgcagagatgtgaggacccgggaggtgggcatccaggagatccaccacaaggtgcggccctaccaggtggagctggtgcggcgggactatgtggccaacggcggctgggagaccttcctgtcctatgaggaccctgaccaggacatcctgattggcctgctgcggctgaggaaatgttctgaggagaccttccgctttgagctgggcggcggcgtgtccatcgtgcgggagctgcacgtgtatggctctgtggtgcctgtgagcagccgggaccccaccaagttccagcaccagggcttcggcatgctgctgatggaggaggccgagcgcatcgcccgggaggagcacggcagcggcaagattgctgtgatcagcggcgtgggcaccaggaactactacaggaagattggctaccgcctgcagggcccctacatggtgaagatgctgaagtag

SEQ ID NO: 151081 - DNA, 1368 bp, synthetic construct
  misc_feature 1..1368: note = Description of Artificial Sequence: Synthetic coding sequence
  source 1..1368: mol_type = other DNA
atgtgcaagccccaccgctgcccccacatctccttcaccggcaacatctgtgtgtactgccctgggggccctgacagcgactttgagtacagcacccagagctacacaggctatgagcccacctccatgagggccatccgggcccgctatgaccccttcctgcagaccaggcaccgcatcgagcagctgaagcagctgggccacagcgtggacaaggtggagttcatcgtgatgggcggcaccttcatggccctgcctgaggagtacagagactacttcatccggaacctgcatgatgccctgagcggccacaccagcaacaacatctatgaggccgtgaagtacagcgagaggagcctgaccaagtgcatcggcatcaccatcgagaccaggccagactactgcatgaagaggcacctgagtgacatgctgacctacggctgcacccggctggagattggagtgcagagcgtgtatgaagatgtggcccgggacaccaacagaggccacacagtgaaggctgtgtgtgagagcttccacctggccaaggacagcggcttcaaggtggtggcccacatgatgccagacctgcccaacgtgggcctggagcgggacatcgagcagttcacagagttctttgagaacccagccttccggccagatggcctgaagctgtaccccaccctggtgatccggggcaccggcctgtatgagctgtggaagagcggccgctacaagagctacagccccagcgacctggtggagctggtggcccgcatcctggccctggtgcccccctggaccagggtgtacagagtgcagagggacatccccatgcccctggtgagcagcggcgtggagcacggcaacctgcgggagctggccctggccaggatgaaggacctgggcatccagtgcagagatgtgaggacccgggaggtgggcatccaggagatccaccacaaggtgcggccctaccaggtggagctggtgcggcgggactatgtggccaacggcggctgggagaccttcctgtcctatgaggaccctgaccaggacatcctgattggcctgctgcggctgaggaaatgttctgaggagaccttccgctttgagctgggcggcggcgtgtccatcgtgcgggagctgcacgtgtatggctctgtggtgcctgtgagcagccgggaccccaccaagttccagcaccagggcttcggcatgctgctgatggaggaggccgagcgcatcgcccgggaggagcacggcagcggcaagattgctgtgatcagcggcgtgggcaccaggaactactacaggaagattggctaccgcctgcagggcccctacatggtgaagatgctgaagtag

SEQ ID NO: 151082 - DNA, 342 bp, synthetic construct
  misc_feature 1..342: note = Description of Artificial Sequence: Synthetic coding sequence
  source 1..342: mol_type = other DNA
atgatgctgaccatcggagatgtgatcaagcagctgattgaggcccacgagcagggcaaggacatcgacctgaacaaggtgaagaccaagacagctgccaagtatggcctgagcgcccagccccggctggtggacatcatcgctgctgtgcccccccagtacaggaaggtgctgatgcccaagctgaaggccaagcccatcagaacagccagcggcattgctgtggtggccgtgatgtgcaagccccaccgctgcccccacatctccttcaccggcaacatctgtgtgtactgccctgggggccctgacagcgactttgagtacagcacccagagctactag

SEQ ID NO: 151083 - DNA, 1602 bp, synthetic construct
  misc_feature 1..1602: note = Description of Artificial Sequence: Synthetic coding sequence
  source 1..1602: mol_type = other DNA
atgatgctgaccatcggagatgtgatcaagcagctgattgaggcccacgagcagggcaaggacatcgacctgaacaaggtgaagaccaagacagctgccaagtatggcctgagcgcccagccccggctggtggacatcatcgctgctgtgcccccccagtacaggaaggtgctgatgcccaagctgaaggccaagcccatcagaacagccagcggcattgctgtggtggccgtgatgtgcaagccccaccgctgcccccacatctccttcaccggcaacatctgtgtgtactgccctgggggccctgacagcgactttgagtacagcacccagagctacacaggctatgagcccacctccatgagggccatccgggcccgctatgaccccttcctgcagaccaggcaccgcatcgagcagctgaagcagctgggccacagcgtggacaaggtggagttcatcgtgatgggcggcaccttcatggccctgcctgaggagtacagagactacttcatccggaacctgcatgatgccctgagcggccacaccagcaacaacatctatgaggccgtgaagtacagcgagaggagcctgaccaagtgcatcggcatcaccatcgagaccaggccagactactgcatgaagaggcacctgagtgacatgctgacctacggctgcacccggctggagattggagtgcagagcgtgtatgaagatgtggcccgggacaccaacagaggccacacagtgaaggctgtgtgtgagagcttccacctggccaaggacagcggcttcaaggtggtggcccacatgatgccagacctgcccaacgtgggcctggagcgggacatcgagcagttcacagagttctttgagaacccagccttccggccagatggcctgaagctgtaccccaccctggtgatccggggcaccggcctgtatgagctgtggaagagcggccgctacaagagctacagccccagcgacctggtggagctggtggcccgcatcctggccctggtgcccccctggaccagggtgtacagagtgcagagggacatccccatgcccctggtgagcagcggcgtggagcacggcaacctgcgggagctggccctggccaggatgaaggacctgggcatccagtgcagagatgtgaggacccgggaggtgggcatccaggagatccaccacaaggtgcggccctaccaggtggagctggtgcggcgggactatgtggccaacggcggctgggagaccttcctgtcctatgaggaccctgaccaggacatcctgattggcctgctgcggctgaggaaatgttctgaggagaccttccgctttgagctgggcggcggcgtgtccatcgtgcgggagctgcacgtgtatggctctgtggtgcctgtgagcagccgggaccccaccaagttccagcaccagggcttcggcatgctgctgatggaggaggccgagcgcatcgcccgggaggagcacggcagcggcaagattgctgtgatcagcggcgtgggcaccaggaactactacaggaagattggctaccgcctgcagggcccctacatggtgaagatgctgaagtag

SEQ ID NO: 151084 - DNA, 576 bp, synthetic construct
  misc_feature 1..576: note = Description of Artificial Sequence: Synthetic coding sequence
  source 1..576: mol_type = other DNA
atgatgctgaccatcggagatgtgatcaagcagctgattgaggcccacgagcagggcaaggacatcgacctgaacaaggtgaagaccaagacagctgccaagtatggcctgagcgcccagccccggctggtggacatcatcgctgctgtgcccccccagtacaggaaggtgctgatgcccaagctgaaggccaagcccatcagaacagccagcggcattgctgtggtggccgtgatgtgcaagccccaccgctgcccccacatctccttcaccggcaacatctgtgtgtactgccctgggggccctgacagcgactttgagtacagcacccagagctacacaggctatgagcccacctccatgagggccatccgggcccgctatgaccccttcctgcagaccaggcaccgcatcgagcagctgaagcagctgggccacagcgtggacaaggtggagttcatcgtgatgggcggcaccttcatggccctgcctgaggagtacagagactacttcatccggaacctgcatgatgccctgagcggccacaccagcaacaacatctatgaggccgtgtag

SEQ ID NO: 151085 - DNA, 1287 bp, synthetic construct
  misc_feature 1..1287: note = Description of Artificial Sequence: Synthetic coding sequence
  source 1..1287: mol_type = other DNA
atgagcacccaccagttctacaggaagtacatgtgccccacctccatgagggccatccgggcccgctatgaccccttcctgcagaccaggcacagaattgagcagctgaagcagctgggccacagcgtggacaaggtggagttcatcgtgatgggcggcaccttcatggccctgcctgaggagtacagagactacttcatccggaacctgcatgatgccctgagcggccacaccagcaacaacatctatgaagctgtgaagtacagcgagaggagcctgaccaagtgcatcggcatcaccatcgagaccaggccagactactgcatgaagaggcacctgagtgacatgctgacctacggctgcacccggctggagattggagtgcagagcgtgtatgaagatgtggcccgggacaccaacagaggccacacagtgaaggctgtgtgtgagagcttccacctggccaaggacagcggcttcaaggtggtggcccacatgatgccagacctgcccaacgtgggcctggagcgggacatcgagcagttcacagagttctttgaaaatcctgccttccggccagatggcctgaagctgtaccccaccctggtgatccggggcaccggcctgtatgagctgtggaagagcggccgctacaagagctacagccccagcgacctggtggagctggtggcccgcatcctggccctggtgcccccctggaccagggtgtacagagtgcagagggacatccccatgcccctggtgtcctctggagtggagcacggcaacctgcgggagctggccctggccaggatgaaggacctgggcatccagtgcagagatgtgaggacccgggaggtgggcatccaggagatccaccacaaggtgcggccctaccaggtggagctggtgagaagagattatgtggccaatggaggctgggagaccttcctgtcctatgaagatcctgaccaggacatcctgattggcctgctgcggctgaggaagtgcagcgaggagaccttccgctttgagctgggcggcggcgtgtccatcgtgcgggagctgcacgtgtatggctctgtggtgcctgtgagcagccgggaccccaccaagttccagcaccagggcttcggcatgctgctgatggaggaggccgagagaattgcccgggaggagcacggcagcggcaagattgctgtgatctctggagtgggcaccaggaactactacaggaagattggctaccgcctgcagggcccctacatggtgaagatgctgaagtag

SEQ ID NO: 151086 - DNA, 1257 bp, synthetic construct
  misc_feature 1..1257: note = Description of Artificial Sequence: Synthetic coding sequence
  source 1..1257: mol_type = other DNA
atgtgccccacctccatgagggccatccgggcccgctatgaccccttcctgcagaccaggcacagaattgagcagctgaagcagctgggccacagcgtggacaaggtggagttcatcgtgatgggcggcaccttcatggccctgcctgaggagtacagagactacttcatccggaacctgcatgatgccctgagcggccacaccagcaacaacatctatgaagctgtgaagtacagcgagaggagcctgaccaagtgcatcggcatcaccatcgagaccaggccagactactgcatgaagaggcacctgagtgacatgctgacctacggctgcacccggctggagattggagtgcagagcgtgtatgaagatgtggcccgggacaccaacagaggccacacagtgaaggctgtgtgtgagagcttccacctggccaaggacagcggcttcaaggtggtggcccacatgatgccagacctgcccaacgtgggcctggagcgggacatcgagcagttcacagagttctttgaaaatcctgccttccggccagatggcctgaagctgtaccccaccctggtgatccggggcaccggcctgtatgagctgtggaagagcggccgctacaagagctacagccccagcgacctggtggagctggtggcccgcatcctggccctggtgcccccctggaccagggtgtacagagtgcagagggacatccccatgcccctggtgtcctctggagtggagcacggcaacctgcgggagctggccctggccaggatgaaggacctgggcatccagtgcagagatgtgaggacccgggaggtgggcatccaggagatccaccacaaggtgcggccctaccaggtggagctggtgagaagagattatgtggccaatggaggctgggagaccttcctgtcctatgaagatcctgaccaggacatcctgattggcctgctgcggctgaggaagtgcagcgaggagaccttccgctttgagctgggcggcggcgtgtccatcgtgcgggagctgcacgtgtatggctctgtggtgcctgtgagcagccgggaccccaccaagttccagcaccagggcttcggcatgctgctgatggaggaggccgagagaattgcccgggaggagcacggcagcggcaagattgctgtgatctctggagtgggcaccaggaactactacaggaagattggctaccgcctgcagggcccctacatggtgaagatgctgaagtag

SEQ ID NO: 151087 - DNA, 1275 bp, synthetic construct
  misc_feature 1..1275: note = Description of Artificial Sequence: Synthetic coding sequence
  source 1..1275: mol_type = other DNA
atggctgctgtggccacctgtggctctgtggccgccagcacaggcagcgctgtggccacagccagcaagagcaatgtgaccagcttccagaggcggggcccccgggcctctgtgaccaatgacagcggcccccggctggtgtccattgctggcacccggcccagcgtgagaaatggccagctgctggtgtccacaggcctgcctgccctggaccagctgctgggcggcggcctggccgtgggcaccgtgctgctgattgaggaggacaagtacaacatctacagccccctgctcttcaagtacttcctggccgagggcatcgtgaatggccacaccctgctggtggccagcgccaaggaggaccctgccaacatcctgcaggagctgcctgcccccctgctggatgacaagtgcaagaaggagtttgatgaagatgtgtacaaccacaagaccccagagagcaacatcaagatgaagatcgcctggagataccagctgctgcccaagatggagatcggccctgtgagcagcagccgcttcggccactactatgatgccagcaagaggatgccccaggagctgattgaggccagcaactggcacggcttcttcctgcctgagaagatcagcagcaccctgaaggtggagccctgcagcctgaccccaggctacaccaagctgctgcagttcatccagaacatcatctatgaggagggctttgatggcagcaacccccagaagaagcagaggaacatcctgagaattggcatccagaacctgggcagccccctgtggggagatgacatctgctgtgctgaaaatggaggcaacagccacagcctgaccaagttcctgtatgtgctgcggggcctgctgcggaccagcctgagcgcctgcatcatcaccatgcccacccacctgatccagaacaaggccatcatcgcccgggtgaccaccctgagtgatgtggtggtgggcctggagagcttcatcggcagcgagcgggagaccaaccccctgtacaaggactaccacggcctcatccacatccggcagatcccccggctgaacaacctgatctgtgatgaaagtgatgtgaaggacctggccttcaagctgaagaggaagctgttcaccatcgagcggctgcacctgcccccagacctgagtgacacagtgagccgcagcagcaagatggacctggccgagagcgccaagaggctgggccctggctgcggcatgatggccggcggcaagaagcacctggacttctag

SEQ ID NO: 151088 - DNA, 1431 bp, synthetic construct
  misc_feature 1..1431: note = Description of Artificial Sequence: Synthetic coding sequence
  source 1..1431: mol_type = other DNA
atggctgctgtggccacctgtggctctgtggccgccagcacaggcagcgctgtggccacagccagcaagagcaatgtgaccagcttccagaggcggggcccccgggcctctgtgaccaatgacagcggcccccggctggtgtccattgctggcacccggcccagcgtgagaaatggccagctgctggtgtccacaggcctgcctgccctggaccagctgctgggcggcggcctggccgtgggcaccgtgctgctgattgaggaggacaagtacaacatctacagccccctgctcttcaagtacttcctggccgagggcatcgtgaatggccacaccctgctggtggccagcgccaaggaggaccctgccaacatcctgcaggagctgcctgcccccctgctggatgacaagtgcaagaaggagtttgatgaagatgtgtacaaccacaagaccccagagagcaacatcaagatgaagatcgcctggagataccagctgctgcccaagatggagcagatcggccctgtgagcagcagcagatttggccactactatgatgccagcaagaggatgccccaggagctgattgaggccagcaactggcacggcttcttcctgcctgagaagatcagcagcaccctgaaggtggagccctgcagcctgaccccaggctacaccaagctgctgcagttcatccagaacatcatctatgaggagggctttgatggcagcaacccccagaagaagcagaggaacatcctgcgcatcggcatccagaacctgggcagccccctgtggggagatgacatctgctgtgccgagaatggaggcaacagccacagcctgaccaagttcctgtatgtgctgcggggcctgctgcggaccagcctgagcgcctgcatcatcaccatgcccacccacctgatccagaacaaggccatcatcgcccgggtgaccaccctgagtgatgtggtggtgggcctggagagcttcatcggcagcgagcgggagaccaaccccctgtacaaggactaccacggcctcatccacatccggcagatcccccggctgaacaacctgatctgtgatgaaagtgatgtgaaggacctggccttcaagctgaagaggaagctgttcaccatcgagtgggtgcaggacaactacctgcggcaggagaggaacatctacccacctggcttctcctacctgctgaagcagaaggacagcgcctggggcgagggcagcctgcagcacagcaccttcctgatgtccttcctggccaaggccacagcctttgccagccggctggtgcgccacagcgagcccctgaagcagaatggcagcggccgcatccggcaggccgccggcccccggctgtggcatgatggccggcggcaggaggcccctggcctgctgggcatccccccatag

SEQ ID NO: 151089 - DNA, 1608 bp, synthetic construct
  misc_feature 1..1608: note = Description of Artificial Sequence: Synthetic coding sequence
  source 1..1608: mol_type = other DNA
atggctgctgtggccacctgtggctctgtggccgccagcacaggcagcgctgtggccacagccagcaagagcaatgtgaccagcttccagaggcggggcccccgggcctctgtgaccaatgacagcggcccccggctggtgtccattgctggcacccggcccagcgtgagaaatggccagctgctggtgtccacaggcctgcctgccctggaccagctgctgggcggcggcctggccgtgggcaccgtgctgctgattgaggaggacaagtacaacatctacagccccctgctcttcaagtacttcctggccgagggcatcgtgaatggccacaccctgctggtggccagcgccaaggaggaccctgccaacatcctgcaggagctgcctgcccccctgctggatgacaagtgcaagaaggagtttgatgaagatgtgtacaaccacaagaccccagagagcaacatcaagatgaagatcgcctggagataccagctgctgcccaagatggagatcggccctgtgagcagcagccgcttcggccactactatgatgccagcaagaggatgccccaggagctgattgaggccagcaactggcacggcttcttcctgcctgagaagatcagcagcaccctgaaggtggagccctgcagcctgaccccaggctacaccaagctgctgcagttcatccagaacatcatctatgaggagggctttgatggcagcaacccccagaagaagcagaggaacatcctgagaattggcatccagaacctgggcagccccctgtggggagatgacatctgctgtgctgaaaatggaggcaacagccacagcctgaccaagttcctgtatgtgctgcggggcctgctgcggaccagcctgagcgcctgcatcatcaccatgcccacccacctgatccagaacaaggccatcatcgcccgggtgaccaccctgagtgatgtggtggtgggcctggagagcttcatcggcagcgagcgggagaccaaccccctgtacaaggactaccacggcctcatccacatccggcagatcccccggctgaacaacctgatctgtgatgaaagtgatgtgaaggacctggccttcaagctgaagaggaagctgttcaccatcgaggccggcgtgcagtggcatgacctgggcagccggcagccccggctgctgggcagcagcaacagccctgccagcgccagcctggtggccggcatcactggagcccaccaccacacccagctgatctttgtgttcctggtggagatgggcttccaccacgtgggccaggccggcctggagctgctgaccagcggggacagcagcgccagcgccagccagagcgctggcatcaccggcatgagctaccgggcccggccccgggccctgtacttcaaggagaacaagagcaaggtgggcgcccggcagctgctggagacccgggaggagcacctgagcagccggctgctgatcctgacccaggccgagcggctgtgcatgggccgccgcttcttcaccgccttccacatcttcaatgagctgccctgcaagggggactgcatctgcctgcagacctgccagacccagtag

SEQ ID NO: 151090 - DNA, 840 bp, synthetic construct
  misc_feature 1..840: note = Description of Artificial Sequence: Synthetic coding sequence
  source 1..840: mol_type = other DNA
atggaggccgtggtgaacctgtaccaggaggtgatgaagcatgctgacccccgcatccagggctaccccctgatgggcagccccctgctgatgaccagcatcctgctgacctacgtgtactttgtgctgagcctgggcccccgcatcatggccaacaggaagcccttccagctgcggggcttcatgattgtgtacaacttcagcctggtggccctgagcctgtacatcgtgtatgagttcctgatgagcggctggctgagcacctacacctggaggtgtgaccctgtggactacagcaacagccctgaggccctgaggatggtgcgggtggcctggctgttcctgttcagcaagttcatcgagctgatggacaccgtcatcttcatcctgaggaagaaggatggccaggtgaccttcctgcacgtgttccaccacagcgtgctgccctggagctggtggtggggcgtgaagatcgcccctgggggcatgggcagcttccacgccatgatcaacagctctgtgcacgtgatcatgtacctgtactacggcctgagcgcctttggacctgtggcccagccctacctgtggtggaagaagcacatgacagccatccagctgatccagtttgtgctggtgtccctgcacatcagccagtactacttcatgagcagctgcaactaccagtaccctgtgatcatccacctgatctggatgtatggcaccatcttcttcatgctgttcagcaacttctggtaccacagctacaccaagggcaagaggctgccccgggccctgcagcagaatggagcccctggcatcgccaaggtgaaggccaactag

SEQ ID NO: 151091 - DNA, 759 bp, synthetic construct
  misc_feature 1..759: note = Description of Artificial Sequence: Synthetic coding sequence
  source 1..759: mol_type = other DNA
atggaggccgtggtgaacctgtaccaggaggtgatgaagcatgctgacccccgcatccagggctaccccctgatgggcagccccctgctgatgaccagcatcctgctgacctacgtgtactttgtgctgagcctgggcccccgcatcatggccaacaggaagcccttccagctgcggggcttcatgattgtgtacaacttcagcctggtggccctgagcctgtacatcgtgtatgagatggtgcgggtggcctggctgttcctgttcagcaagttcatcgagctgatggacaccgtcatcttcatcctgaggaagaaggatggccaggtgaccttcctgcacgtgttccaccacagcgtgctgccctggagctggtggtggggcgtgaagatcgcccctgggggcatgggcagcttccacgccatgatcaacagctctgtgcacgtgatcatgtacctgtactacggcctgagcgccttcggccctgtggcccagccctacctgtggtggaagaagcacatgacagccatccagctgatccagtttgtgctggtgtccctgcacatcagccagtactacttcatgagcagctgcaactaccagtaccctgtgatcatccacctgatctggatgtatggcaccatcttcttcatgctgttcagcaacttctggtaccacagctacaccaagggcaagaggctgccccgggccctgcagcagaatggagcccctggcatcgccaaggtgaaggccaactag

SEQ ID NO: 151092 - DNA, 891 bp, synthetic construct
  misc_feature 1..891: note = Description of Artificial Sequence: Synthetic coding sequence
  source 1..891: mol_type = other DNA
atggagcacctgaaggcctttgatgatgagatcaatgccttcctggacaacatgtttggcccccgggacagccgggtgcggggctggttcatgctggacagctacctgcccaccttcttcctgactgtgatgtacctgctgagcatctggctgggcaacaagtacatgaagaacagacctgccctgagcctgcggggcatcctgaccctgtacaacctgggcatcaccctgctgagcgcctacatgctggccgagctgatcctgagcacctgggagggcggctacaacctgcagtgccaggacctgaccagcgctggggaggccgacatccgggtggccaaggtgctgtggtggtactacttcagcaagtctgtggagttcctggacaccatcttctttgtgctgaggaagaagaccagccagatcaccttcctgcacgtgtaccaccacgcctccatgttcaacatctggtggtgtgtgctgaactggatcccctgtggccagagcttcttcggccccaccctgaacagcttcatccacatcctgatgtacagctactacggcctgagcgtcttccccagcatgcacaagtacctgtggtggaagaagtacctgacccaggcccagctggtgcagtttgtgctgaccatcacccacaccatgtctgctgtggtgaagccctgtggcttccccttcggctgcctgatcttccagagcagctacatgctgaccctggtgatcctcttcctgaacttctacgtgcagacctacaggaagaagcccatgaagaaggacatgcaggagcccccagctgggaaggaggtgaagaatggcttcagcaaggcctacttcaccgctgccaacggggtgatgaacaagaaggcccagtag

SEQ ID NO: 151093 - DNA, 813 bp, synthetic construct
  misc_feature 1..813: note = Description of Artificial Sequence: Synthetic coding sequence
  source 1..813: mol_type = other DNA
atggtgacagccatgaatgtgtcccatgaggtgaaccagctgttccagccctacaactttgagctgagcaaggacatgaggcccttctttgaggagtactgggccaccagcttccccatcgccctgatctacctggtgctgattgctgtgggccagaactacatgaaggagaggaagggcttcaacctgcagggccccctcatcctgtggagcttctgcctggccatcttcagcatcctgggcgctgtgaggatgtggggcatcatgggcaccgtgctgctgactggaggcctgaagcagacagtgtgcttcatcaacttcatcgacaacagcacagtgaagttctggagctgggtgttcctgctgagcaaggtgattgagctgggggacacagccttcatcatcctgaggaagaggcccctcatcttcatccactggtaccaccacagcacagtgctggtgtacaccagctttggctacaagaacaaggtgcctgctgggggctggtttgtgaccatgaactttggagtgcacgccatcatgtacacctactacaccctgaaggccgccaacgtgaagccacccaagatgctgcccatgctgatcaccagcctgcagatcctgcagatgtttgtgggcgccatcgtgtccatcctgacctacatctggaggcaggaccagggctgccacaccaccatggagcacctgttctggagcttcatcctgtacatgacctacttcatcctgtttgcccacttcttctgccagacctacatccggcccaaggtgaaggccaagaccaagagccagtag

SEQ ID NO: 151094 - DNA, 945 bp, synthetic construct
  misc_feature 1..945: note = Description of Artificial Sequence: Synthetic coding sequence
  source 1..945: mol_type = other DNA
atgggcctgctggacagcgagcccggctctgtgctgaatgtggtgtccacagccctgaatgacacagtggagttctaccgctggacctggagcattgctgacaagagggtggagaactggcccctgatgcagagcccctggcccaccctgagcatcagcaccctgtacctgctgtttgtgtggctgggccccaagtggatgaaggaccgggagcccttccagatgaggctggtgctgatcatctacaactttggcatggtgctgctgaacctcttcatcttccgggagctgttcatgggcagctacaatgccggctacagctacatctgccagagcgtggactacagcaacaacgtgcatgaggtgagaattgctgctgccctgtggtggtactttgtgtccaaaggagtggagtacctggacaccgtcttcttcatcctgaggaagaagaacaaccaggtgtccttcctgcacgtgtaccaccactgcaccatgttcaccctgtggtggattggcatcaagtgggtggccggcggccaggccttctttggagcccagctgaacagcttcatccacgtgatcatgtacagctactacggcctgacagccttcggcccctggatccagaagtacctgtggtggaagcgctacctgaccatgctgcagctgatccagttccacgtgaccatcggccacacagccctgagcctgtacacagactgccccttccccaagtggatgcactgggccctgattgcctatgccatctccttcatcttcctgttcctgaacttctacatccgcacctacaaggagcccaagaagcccaaggccggcaagacagccatgaatggcatcagcgccaatggagtgtccaagtctgagaagcagctgatgattgaaaatggcaagaagcagaagaatggcaaggccaagggggactag

SEQ ID NO: 151095 - DNA, 900 bp, synthetic construct
  misc_feature 1..900: note = Description of Artificial Sequence: Synthetic coding sequence
  source 1..900: mol_type = other DNA
atggagcactttgatgccagcctgagcacctacttcaaggccctgctgggcccccgggacaccagggtgaagggctggttcctgctggacaactacatccccaccttcatctgcagcgtcatctacctgctgattgtgtggctgggccccaagtacatgaggaacaagcagcccttcagctgccggggcatcctggtggtgtacaacctgggcctgaccctgctgagcctgtacatgttctgtgagctggtgactggagtgtgggagggcaagtacaacttcttctgccagggcaccaggacagctggggagagtgacatgaagatcatccgggtgctgtggtggtactacttcagcaagctgattgagttcatggacaccttcttcttcatcctgaggaagaacaaccaccagatcaccgtgctgcacgtgtaccaccacgcctccatgctgaacatctggtggtttgtgatgaactgggtgccctgtggccacagctactttggagccaccctgaacagcttcatccacgtgctgatgtacagctactacggcctgagctctgtgcccagcatgaggccctacctgtggtggaagaagtacatcacccagggccagctgctgcagtttgtgctgaccatcatccagaccagctgtggggtcatctggccctgcaccttccccctgggctggctgtacttccagatcggctacatgatcagcctgattgccctcttcaccaacttctacatccagacctacaacaagaagggggccagcaggaggaaggaccacctgaaggaccaccagaatggctccatggctgctgtgaatggccacaccaacagcttcagccccctggagaacaacgtgaagcccaggaagctgaggaaggactag

SEQ ID NO: 151096 - DNA, 267 bp, synthetic construct
  misc_feature 1..267: note = Description of Artificial Sequence: Synthetic coding sequence
  source 1..267: mol_type = other DNA
atggagcactttgatgccagcctgagcacctacttcaaggccctgctgggcccccggggcatcagcagctctgtgctgaggatgggcccccccctgcacacagtggtgggctggctgcagcagctgcaggccgcccacagcgaggaggaggagaagatgttccacctgtgtggcttcaagcacaaggaggtggtgtcccagagcagcctgcctgctgtgatcccccagaacagcctggccaccatcgccagccacgccccagcctag

SEQ ID NO: 151097 - DNA, 870 bp, synthetic construct
  misc_feature 1..870: note = Description of Artificial Sequence: Synthetic coding sequence
  source 1..870: mol_type = other DNA
atggagcactttgatgccagcctgagcacctacttcaaggccctgctgggcccccgggacaccagggtgaagggctggttcctgctggacaactacatccccaccttcatctgcagcgtcatctacctgctgattgtgtggctgggccccaagtacatgaggaacaagcagcccttcagctgccggggcatcctggtggtgtacaagttctgtgagctggtgactggagtgtgggagggcaagtacaacttcttctgccagggcaccaggacagctggggagagtgacatgaagatcatccgggtgctgtggtggtactacttcagcaagctgattgagttcatggacaccttcttcttcatcctgaggaagaacaaccaccagatcaccgtgctgcacgtgtaccaccacgcctccatgctgaacatctggtggtttgtgatgaactgggtgccctgtggccacagctactttggagccaccctgaacagcttcatccacgtgctgatgtacagctactacggcctgagctctgtgcccagcatgaggccctacctgtggtggaagaagtacatcacccagggccagctgctgcagtttgtgctgaccatcatccagaccagctgtggggtcatctggccctgcaccttccccctgggctggctgtacttccagatcggctacatgatcagcctgattgccctcttcaccaacttctacatccagacctacaacaagaagggggccagcaggaggaaggaccacctgaaggaccaccagaatggctccatggctgctgtgaatggccacaccaacagcttcagccccctggagaacaacgtgaagcccaggaagctgaggaaggactag

SEQ ID NO: 151098 - DNA, 981 bp, synthetic construct
  misc_feature 1..981: note = Description of Artificial Sequence: Synthetic coding sequence
  source 1..981: mol_type = other DNA
atggagcactttgatgccagcctgagcacctacttcaaggccctgctgggcccccgggacaccagggtgaagggctggttcctgctggacaactacatccccaccttcatctgcagcgtcatctacctgctgattgtgtggctgggccccaagtacatgaggaacaagcagcccttcagctgccggggcatcctggtggtgtacaacctgggcctgaccctgctgagcctgtacatgttctgtgagagcaagcgggagcagcccaggagaagtgcctgtgccagcaggacagaccccagcacccagcagcagctgcctgaaaatcggctggtgactggagtgtgggagggcaagtacaacttcttctgccagggcaccaggacagctggggagagtgacatgaagatcatccgggtgctgtggtggtactacttcagcaagctgattgagttcatggacaccttcttcttcatcctgaggaagaacaaccaccagatcaccgtgctgcacgtgtaccaccacgcctccatgctgaacatctggtggtttgtgatgaactgggtgccctgtggccacagctactttggagccaccctgaacagcttcatccacgtgctgatgtacagctactacggcctgagctctgtgcccagcatgaggccctacctgtggtggaagaagtacatcacccagggccagctgctgcagtttgtgctgaccatcatccagaccagctgtggggtcatctggccctgcaccttccccctgggctggctgtacttccagatcggctacatgatcagcctcatcgccctcttcaccaacttctacatccagacctacaacaagaagggggccagcaggaggaaggaccacctgaaggaccaccagaatggctccatggctgctgtgaatggccacaccaacagcttcagccccctggagaacaacgtgaagcccaggaagctgaggaaggactag

SEQ ID NO: 151099 - DNA, 900 bp, synthetic construct; identical to SEQ ID NO: 151095
  misc_feature 1..900: note = Description of Artificial Sequence: Synthetic coding sequence
  source 1..900: mol_type = other DNA

SEQ ID NO: 151100 - DNA, 798 bp, synthetic construct
  misc_feature 1..798: note = Description of Artificial Sequence: Synthetic coding sequence
  source 1..798: mol_type = other DNA
atgaacatgtctgtgctgaccctgcaggagtatgaatttgagaagcagttcaatgaaaatgaggccatccagtggatgcaggagaactggaagaagagcttcctgttcagcgccctgtatgctgccttcatctttggaggccgccacctgatgaacaagagggccaagtttgagctgaggaagcccctggtgctgtggagcctgaccctggccgtgttcagcatctttggagccctgaggactggagcctacatggtgtacatcctgatgaccaagggcctgaagcagagcgtgtgtgaccagggcttctacaatggacctgtgtccaagttctgggcctatgcctttgtgctgagcaaggcccctgagctgggggacaccatcttcatcatcctgaggaagcagaagctgatcttcctgcactggtaccaccacatcaccgtgctgctgtacagctggtacagctacaaggacatggtggccggcggcggctggttcatgaccatgaactatggagtgcatgctgtgatgtacagctactatgccctgcgggccgccggcttccgggtgtccaggaagtttgccatgttcatcaccctgagccagatcacccagatgctgatgggctgtgtggtgaactacctggtgttctgctggatgcagcacgaccagtgccacagccacttccagaacatcttctggagcagcctgatgtacctgagctacctggtgctcttctgccacttcttctttgaggcctacatcggcaagatgaggaagaccaccaaggccgagtag

SEQ ID NO: 151101 - DNA, 798 bp, synthetic construct; identical to SEQ ID NO: 151100
  misc_feature 1..798: note = Description of Artificial Sequence: Synthetic coding sequence
  source 1..798: mol_type = other DNA

SEQ ID NO: 151102 - DNA, 327 bp, synthetic construct
  misc_feature 1..327: note = Description of Artificial Sequence: Synthetic coding sequence
  source 1..327: mol_type = other DNA
atgaacatgtctgtgctgaccctgcaggagtatgaatttgagaagcagttcaatgaaaatgaggccatccagtggatgcaggagaactggaagaagagcttcctgttcagcgccctgtatgctgccttcatctttggaggccgccacctgatgaacaagagggccaagtttgagctgaggaagcccctggtgctgtggagcctgaccctggccgtgttcagcatctttggagccctgaggactggagcctacatggtgtacatcctgatgaccaagggcctgaagcagagcgtgtgtgaccagggcttctacaatggacctgtgtag

SEQ ID NO: 151103 - DNA, 414 bp, synthetic construct
  misc_feature 1..414: note = Description of Artificial Sequence: Synthetic coding sequence
  source 1..414: mol_type = other DNA
atgaacatgtctgtgctgaccctgcaggagtatgaatttgagaagcagttcaatgaaaatgaggccatccagtggatgcaggagaactggaagaagagcttcctgttcagcgccctgtatgctgccttcatctttggaggccgccacctgatgaacaagagggccaagtttgagctgaggaagcccctggtgctgtggagcctgaccctggccgtgttcagcatctttggagccctgaggactggagcctacatggtgtacatcctgatgaccaagggcctgaagcagagcgtgtgtgaccagggcttctacaatggacctgtgtccaagttctgggcctatgcctttgtgctgagcaaggcccctgagctgggggacaccatcttcatcatcctgaggaagcagaagctgtag

SEQ ID NO: 151104 - DNA, 846 bp, synthetic construct
  misc_feature 1..846: note = Description of Artificial Sequence: Synthetic coding sequence
  source 1..846: mol_type = other DNA
atggccttcagtgacctgaccagcaggacagtgcacctgtatgacaactggatcaaggatgctgacccccgggtggaggactggctgctgatgagcagccccctgccccagaccatcctgctgggcttctacgtgtactttgtgaccagcctgggccccaagctgatggagaacaggaagccctttgagctgaagaaggccatgatcacctacaacttcttcatcgtgctcttctctgtgtacatgtgctatgaatttgtgatgagcggctggggcatcggctacagcttccgctgtgacatcgtggactacagccgcagccccacagccctgaggatggcccggacctgctggctgtactacttcagcaagttcatcgagctgctggacaccatcttctttgtgctgaggaagaagaacagccaggtgaccttcctgcacgtgttccaccacaccatcatgccctggacctggtggtttggagtgaagtttgctgctgggggcctgggcaccttccacgccctgctgaacacagctgtgcacgtggtgatgtacagctactacggcctgagcgccctgggccctgcctaccagaagtacctgtggtggaagaagtacctgaccagcctgcagctggtgcagtttgtgattgtggccatccacatcagccagttcttcttcatggaggactgcaagtaccagtttcctgtgtttgcctgcatcatcatgagctacagcttcatgttcctgctgctcttcctgcacttctggtaccgggcctacaccaagggccagaggctgcccaagacagtgaagaatggcacctgcaagaacaaggacaactag

SEQ ID NO: 151105 - DNA, 846 bp, synthetic construct; identical to SEQ ID NO: 151104
  misc_feature 1..846: note = Description of Artificial Sequence: Synthetic coding sequence
  source 1..846: mol_type = other DNA

SEQ ID NO: 151106 - DNA, 498 bp, synthetic construct
  misc_feature 1..498: note = Description of Artificial Sequence: Synthetic coding sequence
  source 1..498: mol_type = other DNA
atggccttcagtgacctgaccagcaggacagtgcacctgtatgacaactggatcaaggatgctgacccccgggtggaggactggctgctgatgagcagccccctgccccagaccatcctgctgggcttctacgtgtactttgtgaccagcctgggccccaagctgatggagaacaggaagccctttgagctgaagaaggccatgatcacctacaacttcttcatcgtgctcttctctgtgtacatgtgctatgaatttgtgatgagcggctggggcatcggctacagcttccgctgtgacatcgtggactacagccgcagccccacagccctgaggatggcccggacctgctggctgtactacttcagcaagttcatcgagctgctggacaccatcttctttgtgctgaggaagaagaacagccaggtgaccttcctgcacgtgttccaccacaccatcatgccctggacctggtggtttggagtgaagtttgcctag

SEQ ID NO: 151107 - DNA, 846 bp, synthetic construct; identical to SEQ ID NO: 151104
  misc_feature 1..846: note = Description of Artificial Sequence: Synthetic coding sequence
  source 1..846: mol_type = other DNA

SEQ ID NO: 151108 - DNA, 498 bp, synthetic construct; identical to SEQ ID NO: 151106
  misc_feature 1..498: note = Description of Artificial Sequence: Synthetic coding sequence
  source 1..498: mol_type = other DNA

SEQ ID NO: 151109 - DNA, 921 bp, synthetic construct
  misc_feature 1..921: note = Description of Artificial Sequence: Synthetic coding sequence
  source 1..921: mol_type = other DNA
atggctgctgctgctgctgctgctgctgctgctggagctgctgggggccggggcagcggccctggaagaagaagacacctggtgcctggagctggaggagaggccggggagggcgcccctgggggcgctggggactatggaaatggcctggagagcgaggagctggagcctgaggagctgctgctggagcctgagcctgagcctgagcctgaggaggagcccccccggccccgggcccctcctggggcccctggccctggccctggcagcggggcccctggcagccaggaggaggaggaggagcccggcctggtggagggggaccctggagatggagccattgaagatcctgagctggaggccatcaaggcccgggtgcgggagatggaggaggaggccgagaagctgaaggagctgcagaatgaggtggagaagcagatgaacatgagccccccacctggaaatgccggccctgtgatcatgagcattgaggagaagatggaggctgatgcccggagcatctacgtgggcaatgtggactatggagccacagctgaggagctggaggcccacttccacggctgcggctctgtgaacagagtgaccatcctgtgtgacaagttcagcggccaccccaagggctttgcctacatcgagttcagtgacaaggagagcgtgaggaccagcctggccctggatgagagcctcttccggggccggcagatcaaggtgatccccaagaggaccaaccggcccggcatcagcaccacagaccggggcttcccccgggcccgctaccgggcccggaccaccaactacaacagcagccgcagccgcttctacagcggcttcaacagccggccccggggccgggtgtaccggggccgggcccgggccacctcctggtacagcccctactag

SEQ ID NO: 151110 - DNA, 1407 bp, synthetic construct
  misc_feature 1..1407: note = Description of Artificial Sequence: Synthetic coding sequence
  source 1..1407: mol_type = other DNA
atggccatcgccacctctgtgtatgtggtgcccccaccagcccggccctgccccaccagcggccccccagctggcccctgcccccccagcccagacctgatctacaagatcccccgggccagcggcacccagctggccgcccccagagatgccctggaggtgtatgatgtgcccccaacagccctgcgggtgcccagcagcggcccctatgactgcccagccagcttcagccaccccctgaccagggtggccccccagcccccaggagaagatgatgccccctatgatgtgcccctgacccccaagcccccagctgagctggagccagacctggagtgggagggcggccgggagcccggcccccccatctatgctgcccccagcaacctgaagagggccagcgccctgctgaacctgtatgaggcccctgaggagctgctggctgatggagagggcggcggcacagatgagggcatctatgatgtgcccctgctgggccctgaggccccacccagccctgagcccccaggggccctggccagccatgaccaggacaccctggcccagctgctggcccggagccccccaccaccccaccggccccggctgcccagcgctgagagcctgagcagaagacccctgcctgccctgcctgtgcctgaggcccccagccccagccctgtgcccagccctgcccctggcaggaagggcagcatccaggaccggcccctgcccccacctccaccccggctgcccggctacggcggccccaaggtggagggggaccctgagggccgggagatggaggatgatcctgctggccaccacaatgaatatgagggcatccccatggccgaggagtatgactatgtgcacctgaagggcatggacaaggcccagggcagccggcccccagaccaggcctgcaccggggaccctgagctgcctgagcggggcatgcctgccccccaggaggccctgagccctggagagcccctggtggtgtccactggagacctgcagctgctgtacttctacgccggccagtgccagagccactacagcgccctgcaggccgctgtggccgccctgatgagcagcacccaggccaaccagcccccccggctgtttgtgccccacagcaagagggtggtggtggccgcccaccggctggtgtttgtgggggacaccctgggccgcctggccgccagcgcccccctgcgggcccaggtgcgggccgccggcacagccctgggccaggccctgcgggccaccgtgctggccgtgaagggggccgccctgggctaccccagcagccctgccatccaggagatggtgcagtgtgtgacagagctggccggccaggccctgcagttcaccaccctgctgaccagcctggccccctag

SEQ ID NO: 151111 - DNA, 1179 bp, synthetic construct
  misc_feature 1..1179: note = Description of Artificial Sequence: Synthetic coding sequence
  source 1..1179: mol_type = other DNA
atggccatcgccacctctgtgtatgtggtgcccccaccagcccggccctgccccaccagcggccccccagctggcccctgcccccccagcccagacctgatctacaagatcccccgggccagcggcacccagctggccgcccccagagatgccctggaggtgtatgatgtgcccccaacagccctgcgggtgcccagcagcggcccctatgactgcccagccagcttcagccaccccctgaccagggtggccccccagcccccaggagaagatgatgccccacccagccctgagcccccaggggccctggccagccatgaccaggacaccctggcccagctgctggcccggagccccccaccaccccaccggccccggctgcccagcgctgagagcctgagcagaagacccctgcctgccctgcctgtgcctgaggcccccagccccagccctgtgcccagccctgcccctggcaggaagggcagcatccaggaccggcccctgcccccacctccaccccggctgcccggctacggcggccccaaggtggagggggaccctgagggccgggagatggaggatgatcctgctggccaccacaatgaatatgagggcatccccatggccgaggagtatgactatgtgcacctgaagggcatggacaaggcccagggcagccggcccccagaccaggcctgcaccggggaccctgagctgcctgagcggggcatgcctgccccccaggaggccctgagccctggagagcccctggtggtgtccactggagacctgcagctgctgtacttctacgccggccagtgccagagccactacagcgccctgcaggccgctgtggccgccctgatgagcagcacccaggccaaccagcccccccggctgtttgtgccccacagcaagagggtggtggtggccgcccaccggctggtgtttgtgggggacaccctgggccgcctggccgccagcgcccccctgcgggcccaggtgcgggccgccggcacagccctgggccaggccctgcgggccaccgtgctggccgtgaagggggccgccctgggctaccccagcagccctgccatccaggagatggtgcagtgtgtgacagagctggccggccaggccctgcagttcaccaccctgctgaccagcctggccccctag

SEQ ID NO: 151112 - DNA, 1326 bp, synthetic construct
  misc_feature 1..1326: note = Description of Artificial Sequence: Synthetic coding sequence
  source 1..1326: mol_type = other DNA
atgtctgagcgggaggtgtccacagccccagctggaacagacatgcctgctgccaagaagcagaagctgagcagtgatgagaacagcaacccagacctgtctggagatgaaaatgatgatgctgtgtccattgagagcggcaccaacacagagaggccagacacccccaccaacaccccaaatgcccctggcaggaagtcctggggcaagggcaagtggaagagcaagaagtgcaagtacagcttcaagtgtgtgaacagcctgaaggaggaccacaaccagcccctgtttggagtgcagttcaactggcacagcaaggagggggaccccctggtgtttgccaccgtgggcagcaacagagtgaccctgtatgagtgccacagccagggcgagatccggctgctgcagagctatgtggatgctgatgctgatgagaacttctacacctgtgcctggacctatgacagcaacaccagccaccccctgctggccgtggccggcagccggggcatcatccgcatcatcaaccccatcaccatgcagtgcatcaagcactacgtgggccatggaaatgccatcaatgagctgaagttccacccccgggaccccaacctgctgctgtctgtgtccaaggaccacgccctgcggctgtggaacatccagacagacaccctggtggccatctttggaggagtggagggccacagagatgaggtgctgtctgctgactatgacctgctgggggagaagatcatgagctgtggcatggaccacagcctgaagctgtggaggatcaacagcaagaggatgatgaatgccatcaaggagagctatgactacaaccccaacaagaccaaccggcccttcatcagccagaagatccacttcccagacttcagcacccgggacatccacaggaactacgtggactgtgtgcgctggctgggggacctgatcctgagcaagagctgtgaaaatgccatcgtgtgctggaagccaggcaagatggaggatgacatcgacaagatcaagcccagcgagagcaatgtgaccatcctgggccgctttgactacagccagtgtgacatctggtacatgaggttctccatggacttctggcagaagatgctggccctgggcaaccaggtgggcaagctgtatgtgtgggacctggaggtggaggacccccacaaggccaagtgcaccaccctgacccaccacaagtgtggggccgccatccggcagaccagcttcagccgggacagcagcatcctgattgctgtgtgtgatgatgccagcatctggcgctgggaccggctgaggtag

SEQ ID NO: 151113 - DNA, 1203 bp, synthetic construct
  misc_feature 1..1203: note = Description of Artificial Sequence: Synthetic coding sequence
  source 1..1203: mol_type = other DNA
atgtctgagcgggaggtgtccacagccccagctggaacagacatgcctgctgccaagaagcagaagctgagcagtgatgagaacagcaacccagacctgtctggagatgaaaatgatgatgctgtgtccattgagagcggcaccaacacagagaggccagacacccccaccaacaccccaaatgcccctggcaggaagtcctggggcaagggcaagtggaagagcaagaagtgcaagtacagcttcaagtgtgtgaacagcctgaaggaggaccacaaccagcccctgtttggagtgcagttcaactggcacagcaaggagggggaccccctggtgtttgccaccgtgggcagcaacagagtgaccctgtatgagtgccacagccagggcgagatccggctgctgcagagctatgtggatgctgatgctgatgagaacttctacacctgtgcctggacctatgacagcaacaccagccaccccctgctggccgtggccggcagccggggcatcatccgcatcatcaaccccatcaccatgcagtgcatcaagcactacgtgggccatggaaatgccatcaatgagctgaagttccacccccgggaccccaacctgctgctgtctgtgtccaaggaccacgccctgcggctgtggaacatccagacagacaccctggtggccatctttggaggagtggagggccacagagatgaggtgctgtctgctgactatgacctgctgggggagaagatcatgagctgtggcatggaccacagcctgaagctgtggaggatcaacagcaagaggatgatgaatgccatcaaggagagctatgactacaaccccaacaagaccaaccggcccttcatcagccagaagatccacttcccagacttcagcacccgggacatccacaggaactacgtggactgtgtgcgctggctgggggacctgatcctgagcaagagctgtgaaaatgccatcgtgtgctggaagccaggcaagatggaggatgacatcgacaagatcaagcccagcgagagcaatgtgaccatcctgggccgctttgactacagccagtgtgacatctggtacatgaggttctccatggacttctggcagaagatgctggccctgggcaaccaggtgggcaagctgtatgtgtgggacctggaggtggaggacccccacaaggccaagtag

SEQ ID NO: 151114 - DNA, 1401 bp, synthetic construct
  misc_feature 1..1401: note = Description of Artificial Sequence: Synthetic coding sequence
  source 1..1401: mol_type = other DNA
atgtctgagcgggaggtgtccacagccccagctggaacagacatgcctgctgccaagaagcagaagctgagcagtgatgagaacagcaacccagacctgtctggagatgaaaatgatgatgctgtgtccattgagagcggcaccaacacagagaggccagacacccccaccaacaccccaaatgcccctggcaggaagtcctggggcaagggcaagtggaagagcaagaagtgcaagtacagcttcaagtgtgtgaacagcctgaaggaggaccacaaccagcccctgtttggagtgcagttcaactggcacagcaaggagggggaccccctggtgtttgccaccgtgggcagcaacagagtgaccctgtatgagtgccacagccagggcgagatccggctgctgcagagctatgtggatgctgatgctgatgagaacttctacacctgtgcctggacctatgacagcaacaccagccaccccctgctggccgtggccggcagccggggcatcatccgcatcatcaaccccatcaccatgcagtgcatcaagcactacgtgggccatggaaatgccatcaatgagctgaagttccacccccgggaccccaacctgctgctgtctgtgtccaaggaccacgccctgcggctgtggaacatccagacagacaccctggtggccatctttggaggagtggagggccacagagatgaggtgctgtctgctgactatgacctgctgggggagaagatcatgagctgtggcatggaccacagcctgaagctgtggaggatcaacagcaagaggatgatgaatgccatcaaggagagctatgactacaaccccaacaagaccaaccggcccttcatcagccagaagatccacttcccagacttcagcacccgggacatccacaggaactacgtggactgtgtgcgctggctgggggacctgatcctgagcaagagcggccgggccatcctgcacagccaccagcagtgcatgagggaccctgtgagccccaacctgcggcagcacctgagctgtgaaaatgccatcgtgtgctggaagccaggcaagatggaggatgacatcgacaagatcaagcccagcgagagcaatgtgaccatcctgggccgctttgactacagccagtgtgacatctggtacatgaggttctccatggacttctggcagaagatgctggccctgggcaaccaggtgggcaagctgtatgtgtgggacctggaggtggaggacccccacaaggccaagtgcaccaccctgacccaccacaagtgtggggccgccatccggcagaccagcttcagccgggacagcagcatcctgattgctgtgtgtgatgatgccagcatctggcgctgggaccggctgaggtag

SEQ ID NO: 151115 - DNA, 471 bp, synthetic construct
  misc_feature 1..471: note = Description of Artificial Sequence: Synthetic coding sequence
  source 1..471: mol_type = other DNA
atgtctgagcgggaggtgtccacagccccagctggaacagacatgcctgctgccaagaagcagaagctgagcagtgatgagaacagcaacccagacctgtctggagatgaaaatgatgatgctgtgtccattgagagcggcaccaacacagagaggccagacacccccaccaacaccccaaatgcccctggcaggaagtcctggggcaagggcaagtggaagagcaagaagtgcaagtacagcttcaagtgtgtgaacagcctgaaggaggaccacaaccagcccctgtttggagtgcagttcaactggcacagcaaggagggggaccccctggtgtttgccaccgtgggcagcaacagagtgaccctgtatgagtgccacagccagggcgagatccggctgctgcagagctatgtggatgctgatgctgatgagaacttctacacctgtgcctggaagtgctaccagtag

SEQ ID NO: 151116 - DNA, 660 bp, synthetic construct
  misc_feature 1..660: note = Description of Artificial Sequence: Synthetic coding sequence
  source 1..660: mol_type = other DNA
atggacaactatgctgacctgagtgacacagagctgaccaccctgctgcggcgctacaacatcccccacggccctgtggtggacctgaacagcaccagaggagatgctgacatgtatgacctgcccaagaaggaggatgccctgctgtaccagagcaagggctacaatgatgactactatgaggagagctacttcaccaccaggacctacggggagcctgagagcgctggccccagcagagctgtgcggcagagcgtgaccagcttcccagatgctgatgccttccaccaccaggtgcatgatgatgacctgctgagcagcagcgaggaggagtgcaaggaccgggagcggcccatgtatggccgggacagcgcctaccagagcatcacccactacagacctgtgtctgccagccgcagcagcctggacctgagctactaccccaccagcagcagcaccagcttcatgagcagcagcagcagcagcagctcctggctgacccggcgggccatccggcctgagaacagagcccctggggccggcctgggccaggaccggcaggtgcccctgtggggccagctgctgctcttcctggtgtttgtgattgtgctcttcttcatctaccacttcatgcaggccgaggagggcaaccccttctag

SEQ ID NO: 151117 - DNA, 765 bp, synthetic construct
  misc_feature 1..765: note = Description of Artificial Sequence: Synthetic coding sequence
  source 1..765: mol_type = other DNA
atggacaactatgctgacctgagtgacacagagctgaccaccctgctgcggcgctacaacatcccccacggccctgtggtgggcagcacccggcggctgtatgagaagaagatctttgaatatgagacccagaggcggcggctgagcccccccagcagcagcgctgccagcagctacagcttcagtgacctgaacagcaccagaggagatgctgacatgtatgacctgcccaagaaggaggatgccctgctgtaccagagcaagggctacaatgatgactactatgaggagagctacttcaccaccaggacctatggagagcctgagagcgctggccccagcagagctgtgcggcagagcgtgaccagcttcccagatgctgatgccttccaccaccaggtgcatgatgatgacctgctgagcagcagcgaggaggagtgcaaggaccgggagcggcccatgtatggccgggacagcgcctaccagagcatcacccactacagacctgtgtctgccagccgcagcagcctggacctgagctactaccccaccagcagcagcaccagcttcatgagcagcagcagcagcagcagctcctggctgacccggcgggccatccggccagaaaatagagcccctggagctggcctgggccaggaccggcaggtgcccctgtggggccagctgctgctcttcctggtgtttgtgattgtgctcttcttcatctaccacttcatgcaggccgaggagggcaaccccttctag

SEQ ID NO: 151118 - DNA, 441 bp, synthetic construct
  misc_feature 1..441: note = Description of Artificial Sequence: Synthetic coding sequence
  source 1..441: mol_type = other DNA
atgaccaccaatgccggccccctgcacccctactggccccagcacctgcggctggacaactttgtgcccaatgaccggcccacctggcacatcctggccggcctcttctctgtgactggagtgctggtggtgaccacctggctgctgagcggccgggctgctgtggtgcccctgggcacctggaggcggctgagcctgtgctggtttgctgtgtgtggcttcatccacctggtgattgagggctggtttgtgctgtactatgaggacctgctgggggaccaggccttcctgagccagctgtggaaggagtatgccaagggggacagccgctacatcctgggggacaacttcaccgtgtgcatggagaccatcacagcctgcctgtggggccccctgagcctgtgggtggtgattgccttcctgcggcagcaccccctgtag

SEQ ID NO: 151119 - DNA, 483 bp, synthetic construct
  misc_feature 1..483: note = Description of Artificial Sequence: Synthetic coding sequence
  source 1..483: mol_type = other DNA
atgaccaccaatgccggccccctgcacccctactggccccagcacctgcggctggacaactttgtgcccaatgaccggcccacctggcacatcctggccggcctcttctctgtgactggagtgctggtggtgaccacctggctgctgagcggccgggctgctgtggtgcccctgggcacctggaggcggctgagcctgtgctggtttgctgtgtgtggcttcatccacctggtgattgagggctggtttgtgctgtactatgaggacctgctgggggaccaggccttcctgagccagctgtggaaggagtatgccaagggggacagccgctacatcctgggggacaacttcaccgtgtgcatggagaccatcacagcctgcctgtggggccccctgagcctgtgggtggtgattgccttcctgcggcagcaccccctgcgcttcatcctgcagctggtggtgtctgtgggccagatctactag

SEQ ID NO: 151120 - DNA, 693 bp, synthetic construct
  misc_feature 1..693: note = Description of Artificial Sequence: Synthetic coding sequence
  source 1..693: mol_type = other DNA
atgaccaccaatgccggccccctgcacccctactggccccagcacctgcggctggacaactttgtgcccaatgaccggcccacctggcacatcctggccggcctcttctctgtgactggagtgctggtggtgaccacctggctgctgagcggccgggctgctgtggtgcccctgggcacctggaggcggctgagcctgtgctggtttgctgtgtgtggcttcatccacctggtgattgagggctggtttgtgctgtactatgaggacctgctgggggaccaggccttcctgagccagctgtggaaggagtatgccaagggggacagccgctacatcctgggggacaacttcaccgtgtgcatggagaccatcacagcctgcctgtggggccccctgagcctgtgggtggtgattgccttcctgcggcagcaccccctgcgcttcatcctgcagctggtggtgtctgtgggccagatctatggagatgtgctgtacttcctgacagagcacagagatggcttccagcacggggagctgggccaccccctgtacttctggttctactttgtgttcatgaatgccctgtggctggtgctgcccggggtgctggtgctggatgctgtgaagcacctgacccacgcccagagcaccctggatgccaaggccaccaaggccaagagcaagaagaactag

SEQ ID NO: 151121 - DNA, 873 bp, synthetic construct
  misc_feature 1..873: note = Description of Artificial Sequence: Synthetic coding sequence
  source 1..873: mol_type = other DNA
atgtgcctggccggctgcacccccaggaaggccgccgcccctggccgcggggccctgccccgggcccggctgcccaggacagccccagctgctgccaccatgttccagcctgctgccaagaggggcttcaccatcgagagcctggtggccaaggatggcggcactggaggcggcactggaggcggcggggccggcagccacctgctggccgccgccgccagcgaggagcccctgcggcccacagccctgaactacccccaccccagcgctgctgaggccgcctttgtgtctggcttccctgctgctgctgctgctggagctggccgcagcctgtatggaggccctgagctggtgtttcctgaggccatgaaccacccagccctgactgtgcacccagcccaccagctgggcgccagccccctgcagcccccccacagcttcttcggggcccagcaccgggaccccctgcacttctacccctgggtgctgaggaaccgcttcttcggccaccgcttccaggccagtgatgtgccccaggacggcctgctgctgcacggcccctttgccaggaagcccaagaggatcagaacagccttcagccccagccagctgctgcggctggagcgggcctttgagaagaaccactacgtggtgggcgctgagaggaagcagctggccggcagcctgagcctgtctgagacccaggtgaaggtgtggttccagaacagaaggaccaagtacaagaggcagaagctggaggaggagggccctgagagcgagcagaagaagaagggcagccaccacatcaaccgctggagaattgccaccaagcaggccaacggggaggacattgatgtgaccagcaatgactag

SEQ ID NO: 151122 - DNA, 759 bp, synthetic construct
  misc_feature 1..759: note = Description of Artificial Sequence: Synthetic coding sequence
  source 1..759: mol_type = other DNA
atgttccagcctgcccccaagcgctgcttcaccatcgagagcctggtggccaaggacagccccctgcctgccagccgctctgaggaccccatccggcctgctgccctgtcctatgccaacagcagccccatcaaccccttcctgaatggcttccacagcgctgctgctgctgctgctggccggggcgtgtacagcaacccagacctggtgtttgctgaggccgtgagccacccccccaacccagctgtgcctgtgcaccctgtgcccccaccccacgccctggccgcccaccccctgcccagcagccacagcccccaccccctgtttgccagccagcagagggaccccagcaccttctacccctggctgatccaccgctaccgctacctgggccaccgcttccagggcaatgacaccagccctgagagcttcctgctgcacaatgccctggccaggaagcccaagaggatcagaacagccttcagccccagccagctgctgcggctggagcacgcctttgagaagaaccactacgtggtgggcgctgagaggaagcagctggcccacagcctgagcctgacagagacccaggtgaaggtgtggttccagaacagaaggaccaagttcaagaggcagaagctggaggaggagggcagtgacagccagcagaagaagaagggcacccaccacatcaaccgctggagaattgccaccaagcaggccagccctgaggagattgatgtgaccagtgatgactag

SEQ ID NO: 151123 - DNA, 510 bp, synthetic construct
  misc_feature 1..510: note = Description of Artificial Sequence: Synthetic coding sequence
  source 1..510: mol_type = other DNA
atgttccagcctgcccccaagcgctgcttcaccatcgagagcctggtggccaaggacagccccctgcctgccagccgctctgaggaccccatccggcctgctgccctgtcctatgccaacagcagccccatcaaccccttcctgaatggcttccacagcgctgctgctgctgctgctggccggggcgtgtacagcaacccagacctggtgtttgctgaggccgtgagccacccccccaacccagctgtgcctgtgcaccctgtgcccccaccccacgccctggccgcccaccccctgcccagcagccacagcccccaccccctgtttgccagccagcagagggaccccagcaccttctacccctggctgatccaccgctaccgctacctgggccaccgcttccagggcaagtccatggtgtctgagcccaagaacaaggtgcagaaggccgaggccggcggccgccgcctgcgctttgccaccaaggagaagagagatgccccctactag

SEQ ID NO: 151124 - DNA, 957 bp, synthetic construct
  misc_feature 1..957: note = Description of Artificial Sequence: Synthetic coding sequence
  source 1..957: mol_type = other DNA
atggccatcaagagcatcgccagccggctgcggggcagccgccgcttcctgagcggctttgtggccggggctgtggtgggcgctgctggagctggcctggccgccctgcagttcttccgcagccagggcgctgagggcgccctgaccgggaagcagccagatggagatgctgacaggaagcactgcaagttcaagccagaccccaacatcccccccaccttcagcgccttcaatgaagattatgtgggcagcggctggagccggggccacatggccccagctggcaacaacaagttcagcagcaaggccatggccgagaccttctacctgagcaacatcgtgccccaggactttgacaacaacagcggctactggaaccgcatcgagatgtactgccgggagctgacagaaagatttgaagatgtgtgggtggtgtctggccccctgaccctgccccagaccagaggagatggcaagaagatcgtgtcctaccaggtgattggagaagataatgtggccgtgcccagccacctgtacaaggtgatcctggcccggcgcagctctgtgtccacagagcccctggccctgggcgcctttgtggtgcccaatgaggccatcggcttccagccccagctgacagagttccaggtgtccctgcaggacctggagaagctgagcggcctggtgttcttcccccacctggacaggaccagtgacatccggaacatctgcagcgtggacacctgcaagctgctggacttccaggagttcaccctgtacctgagcaccaggaagattgagggcgcccggtctgtgctgcggctggagaagatcatggagaacctgaagaatgctgagattgaaccagatgactacttcatgagccgctatgagaagaagctggaggagctgaaggccaaggagcagagcggcacccagatcaggaagcccagctag

SEQ ID NO: 151125 - DNA, 1107 bp, synthetic construct
  misc_feature 1..1107: note = Description of Artificial Sequence: Synthetic coding sequence
  source 1..1107: mol_type = other DNA
atggccatcaagagcatcgccagccggctgcggggcagccgccgcttcctgagcggctttgtggccggggctgtggtgggcgctgctggagctggcctggccgccctgcagttcttccgcagccagggcgctgagggcgccctgaccgggaagcagccagatggcagcgctgagaaggctgtgctggagcagtttggcttccccctgaccggcacagaggcccgctgctacaccaaccacgccctgtcctatgaccaggccaagagggtgccccgctgggtgctggagcacatcagcaagagcaagatcatgggagatgctgacaggaagcactgcaagttcaagccagaccccaacatcccccccaccttcagcgccttcaatgaagattatgtgggcagcggctggagccggggccacatggccccagctggcaacaacaagttcagcagcaaggccatggccgagaccttctacctgagcaacatcgtgccccaggactttgacaacaacagcggctactggaaccgcatcgagatgtactgccgggagctgacagaaagatttgaagatgtgtgggtggtgtctggccccctgaccctgccccagaccagaggagatggcaagaagatcgtgtcctaccaggtgattggagaagataatgtggccgtgcccagccacctgtacaaggtgatcctggcccggcgcagctctgtgtccacagagcccctggccctgggcgcctttgtggtgcccaatgaggccatcggcttccagccccagctgacagagttccaggtgtccctgcaggacctggagaagctgagcggcctggtgttcttcccccacctggacaggaccagtgacatccggaacatctgcagcgtggacacctgcaagctgctggacttccaggagttcaccctgtacctgagcaccaggaagattgagggcgcccggtctgtgctgcggctggagaagatcatggagaacctgaagaatgctgagattgaaccagatgactacttcatgagccgctatgagaagaagctggaggagctgaaggccaaggagcagagcggcacccagatcaggaagcccagctag

SEQ ID NO: 151126 - DNA, 450 bp, synthetic construct
  misc_feature 1..450: note = Description of Artificial Sequence: Synthetic coding sequence
  source 1..450: mol_type = other DNA
atggccccagctggcaacaacaagttcagcagcaaggccatggccgagaccttctacctgagcaacatcgtgccccaggactttgacaacaacagcggctactggaaccgcatcgagatgtactgccgggagctgacagaaagatttgaagatgtgtgggtggtgtctggccccctgaccctgccccagaccagaggagatggcaagaagatcgtgtcctaccaggtgattggagaagataatgtggccgtgcccagccacctgtacaaggaccatgctggctgctgcgtggagagccccctgggcaccaggaccagcgaggaggccacagcccgcatccaggagagagatgatggcggcagtgaccagaggagcggcctggtggagctgggcatctactttgagggccgggccaaccgcatcagcggcagaattggctgccgggtgtag

SEQ ID NO: 151127 - DNA, 819 bp, synthetic construct
  misc_feature 1..819: note = Description of Artificial Sequence: Synthetic coding sequence
  source 1..819: mol_type = other DNA
atgggctacttcctgaagctgtatgcctacgtgaacagccacagcctgtttgtgtgggtgtgtgacaggagctacaagaggagcttccggcccatgatcctgaacaagatcaaggagctgagcaggaaccagttcagcaccatgagccacctgaggaaggacagccagcccagcagccctggagatgatgccatggacaggagcggcctgcctgacctgcagggccgctttgagctgagcggcaagaaccggcagtaccccctggatgccctggagccccagcccagcattggagacatcaaggacatcaagaaggccgccaagtccatgctggaccctgcccacaagagccacttccaccctgtgacccccagcctggtgttcctgtgcttcatctttgatggcctgcaccaggccctgctgtctgtgggcgtgtccaagaggagcaacacagtggtgggcaatgaaaatgaggagcggggcaccccctatgccagccgcttcaaggacatgcccaacttcatcgccctggagaagagctctgtgctgcggcactgctgtgacctgctgattggaattgctgctggcagcagtgacaagatctgcaccagcagcctgcaggtgcagaggcgcttcaaggccatgatggccagcatcggccgcctgagccacggggagagcgctgacctgctgatcagctgcaatgctgagagcgccatcggctggatcagcagccggccctgggtgggggagctgatgttcaccctgctgtttggagactttgagagccccctgcacaagctgaggaagagcagctag

SEQ ID NO: 151128 - DNA, 894 bp, synthetic construct
  misc_feature 1..894: note = Description of Artificial Sequence: Synthetic coding sequence
  source 1..894: mol_type = other DNA
atgagggccctgcgggccggcctgaccctggccagcggggccggcctgggcgctgtggtggagggctggaggagaagaagagaagatgcccgggccgcccctggcctgctgggccgcctgcctgtgctgcctgtggccgctgctgctgagctgccccctgtgcctgggggcccccggggccctggagagctggccaagtatggcctgcccggcctggcccagctgaagagccgggagagctatgtgctgtgctatgaccccaggaccaggggggccctgtgggtggtggagcagctgcggcctgagcggctgcggggagatggagaccggcgggagtgtgacttcagagaagatgacagcgtgcacgcctaccaccgggccaccaatgctgactaccggggcagcggctttgaccggggccacctggccgctgctgccaaccaccgctggagccagaaggccatggatgacaccttctacctgagcaatgtggccccccaggtgccccacctgaaccagaatgcctggaacaacctggagaagtacagccgcagcctgaccaggagctaccagaatgtgtatgtgtgcaccggccccctcttcctgcccaggacagaagcagatggcaagagctatgtgaagtaccaggtgattggcaagaaccacgtggccgtgcccacccacttcttcaaggtgctgatcctggaggccgccggcggccagatcgagctgcggacctacgtgatgcccaatgcccctgtggatgaggccatccccctggagcgcttcctggtgcccatcgagagcattgaaagagccagcggcctgctgtttgtgcccaacatcctggcccgggccggcagcctgaaggccatcacagctggcagcaagtag

SEQ ID NO: 151129 - DNA, 2847 bp, synthetic construct
  misc_feature 1..2847: note = Description of Artificial Sequence: Synthetic coding sequence
  source 1..2847: mol_type = other DNA
atggtgttcctgcccctgaagtggagcctggccaccatgtccttcctgctgagcagcctgctggccctgctgactgtgtccacccccagctggtgccagagcacagaggccagccccaagagaagtgatggcacccccttcccctggaacaagatccggctgcctgaatatgtgattcctgtgcactatgacctgctgatccacgccaacctgaccaccctgaccttctggggcaccaccaaggtggagatcacagccagccagcccaccagcaccatcatcctgcacagccaccacctgcagatcagccgggccaccctgaggaaaggagctggggagcggctgtctgaggagcccctgcaggtgctggagcacccccggcaggagcagatcgccctgctggcccctgagcccctgctggtgggcctgccctacacagtggtgatccactacgccggcaacctgtctgagaccttccacggcttctacaagagcacctaccgcaccaaggagggggagctgcgcatcctggccagcacccagtttgagcccacagctgccaggatggccttcccctgctttgatgagcccgccttcaaggccagcttcagcatcaagatccggcgggagcccaggcacctggccatcagcaacatgcccctggtgaagtctgtgacagtggccgagggcctgattgaggaccactttgatgtgacagtgaagatgagcacctacctggtggccttcatcatcagtgactttgagagcgtgtccaagatcaccaagtctggagtgaaggtgtctgtgtatgctgtgcctgacaagatcaaccaggccgactatgccctggatgctgctgtgaccctgctggagttctatgaggactacttcagcatcccctaccccctgcccaagcaggacctggccgccatcccagacttccagagcggggccatggagaactggggcctgaccacctaccgggagagcgccctgctgtttgatgctgagaagagcagcgccagcagcaagctgggcatcaccatgacagtggcccacgagctggcccaccagtggtttggaaacctggtgaccatggagtggtggaatgacctgtggctgaatgaaggatttgccaagttcatggagtttgtgtctgtgtctgtgacccaccctgagctgaaggtgggggactacttctttggaaaatgttttgatgccatggaggtggatgccctgaacagcagccaccctgtgtccacccctgtggagaacccagcccagatccgggagatgtttgatgatgtgtcctatgacaagggggcctgcatcctgaacatgctgcgggagtacctgtctgcagatgccttcaagtctggaattgtgcagtacctgcagaagcacagctacaagaacaccaagaatgaagacctgtgggacagcatggccagcatctgccccacagatggagtgaagggcatggatggcttctgcagccgcagccagcacagcagcagcagcagccactggcaccaggagggcgtggatgtgaagaccatgatgaacacctggaccctgcagaagggcttccccctcatcaccatcaccgtgcggggcagaaatgtgcacatgaagcaggagcactacatgaagggcagtgatggagccccagacaccggctacctgtggcacgtgcccctgaccttcatcaccagcaagagtgacatggtgcaccgcttcctgctgaagaccaagacagatgtgctgatcctgcctgaggaggtggagtggatcaagttcaacgtgggcatgaatggctactacatcgtgcactatgaagatgatggctgggacagcctgaccggcctgctgaagggcacccacacagctgtgagcagcaatgaccgggccagcctcatcaacaatgccttccagctggtgtccatcggcaagctgagcattgagaaggccctggacctgagcctgtacctgaagcatgaaacagagatcatgcctgtgttccagggcctgaatgagctgatccccatgtacaagctgatggagaagagggacatgaatgaggtggagacccagttcaaggccttcctgatccggctgctgcgggacctgattgacaagcagacctggacagatgagggctctgtgtctgagaggatgctgcggagccagctgctgctgctggcctgtgtgcacaactaccagccctgtgtgcagagagctgagggctacttcaggaagtggaaggagagcaatggaaacctgagcctgcctgtggatgtgaccctggccgtgtttgctgtgggcgcccagagcacagagggctgggacttcctgtacagcaagtaccagttcagcctgagcagcacagagaagagccagattgaatttgccctgtgcaggacccagaacaaggagaagctgcagtggctgctggatgagagcttcaagggggacaagatcaagacccaggagttcccccagatcctgaccctgattggaagaaatcctgtgggctaccccctggcctggcagttcctgaggaagaactggaacaagctggtgcagaagtttgagctgggcagcagcagcatcgcccacatggtgatgggcaccaccaaccagttcagcaccaggacccggctggaggaggtgaagggcttcttcagcagcctgaaggaaaatggcagccagctgcgctgtgtgcagcagaccatcgagaccattgaagaaaatattggctggatggacaagaactttgacaagatccgggtgtggctgcagagcgagaagctggagcatgaccctgaggctgatgccactggatag

SEQ ID NO: 151130 - DNA, 2826 bp, synthetic construct
  misc_feature 1..2826: note = Description of Artificial Sequence: Synthetic coding sequence
  source 1..2826: mol_type = other DNA
atggtgttcctgcccctgaagtggagcctggccaccatgtccttcctgctgagcagcctgctggccctgctgactgtgtccacccccagctggtgccagagcacagaggccagccccaagagaagtgatggcacccccttcccctggaacaagatccggctgcctgaatatgtgattcctgtgcactatgacctgctgatccacgccaacctgaccaccctgaccttctggggcaccaccaaggtggagatcacagccagccagcccaccagcaccatcatcctgcacagccaccacctgcagatcagccgggccaccctgaggaaaggagctggggagcggctgtctgaggagcccctgcaggtgctggagcacccccggcaggagcagatcgccctgctggcccctgagcccctgctggtgggcctgccctacacagtggtgatccactacgccggcaacctgtctgagaccttccacggcttctacaagagcacctaccgcaccaaggagggggagctgcgcatcctggccagcacccagtttgagcccacagctgccaggatggccttcccctgctttgatgagcccgccttcaaggccagcttcagcatcaagatccggcgggagcccaggcacctggccatcagcaacatgcccctggtgaagtctgtgacagtggccgagggcctgattgaggaccactttgatgtgacagtgaagatgagcacctacctggtggccttcatcatcagtgactttgagagcgtgtccaagatcaccaagtctggagtgaaggtgtctgtgtatgctgtgcctgacaagatcaaccaggccgactatgccctggatgctgctgtgaccctgctggagttctatgaggactacttcagcatcccctaccccctgcccaagcaggacctggccgccatcccagacttccagagcggggccatggagaactggggcctgaccacctaccgggagagcgccctgctgtttgatgctgagaagagcagcgccagcagcaagctgggcatcaccatgacagtggcccacgagctggcccaccagtggtttggaaacctggtgaccatggagtggtggaatgacctgtggctgaatgaaggatttgccaagttcatggagtttgtgtctgtgtctgtgacccaccctgagctgaaggtgggggactacttctttggaaaatgttttgatgccatggaggtggatgccctgaacagcagccaccctgtgtccacccctgtggagaacccagcccagatccgggagatgtttgatgatgtgtcctatgacaagggggcctgcatcctgaacatgctgcgggagtacctgtctgcagatgccttcaagtctggaattgtgcagtacctgcagaagcacagctacaagaacaccaagaatgaagacctgtgggacagcatggccagcatctgccccacagatggagtgaagggcatggatggcttctgcagccgcagccagcacagcagcagcagcagccactggcaccaggagggcgtggatgtgaagaccatgatgaacacctggaccctgcagaagggcttccccctcatcaccatcaccgtgcggggcagaaatgtgcacatgaagcaggagcactacatgaagggcagtgatggagccccagacaccggctacctgtggcacgtgcccctgaccttcatcaccagcaagagtgacatggtgcaccgcttcctgctgaagaccaagacagatgtgctgatcctgcctgaggaggtggagtggatcaagttcaacgtgggcatgaatggctactacatcgtgcactatgaagatgatggctgggacagcctgaccggcctgctgaagggcacccacacagctgtgagcagcaatgaccgggccagcctcatcaacaatgccttccagctggtgtccatcggcaagctgagcattgagaaggccctggacctgagcctgtacctgaagcatgaaacagagatcatgcctgtgttccagggcctgaatgagctgatccccatgtacaagctgatggagaagagggacatgaatgaggtggagacccagttcaaggccttcctgatccggctgctgcgggacctgattgacaagcagacctggacagatgagggctctgtgtctgagaggatgctgcggagccagctgctgctgctggcctgtgtgcacaactaccagccctgtgtgcagagagctgagggctacttcaggaagtggaaggagagcaatggaaacctgagcctgcctgtggatgtgaccctggccgtgtttgctgtgggcgcccagagcacagagggctgggacttcctgtacagcaagtaccagttcagcctgagcagcacagagaagagccagattgaatttgccctgtgcaggacccagaacaaggagaagctgcagtggctgctggatgagagcttcaagggggacaagatcaagacccaggagttcccccagatcctgaccctgattggaagaaatcctgtgggctaccccctggcctggcagttcctgaggaagaactggaacaagctggtgcagaagtttgagctgggcagcagcagcatcgcccacatggtgatgggcaccaccaaccagttcagcaccaggacccggctggaggaggtgaagggcttcttcagcagcctgaaggaaaatggcagccagctgcgctgtgtgcagcagaccatcgagaccattgaagaaaatattggctggatggacaagaactttgacaagatccgggtgtggctgcagagcgagaagctggagaggatgtag

SEQ ID NO: 151131 - DNA, 2826 bp, synthetic construct; identical to SEQ ID NO: 151130
  misc_feature 1..2826: note = Description of Artificial Sequence: Synthetic coding sequence
  source 1..2826: mol_type = other DNA

SEQ ID NO: 151132 - DNA, 390 bp, synthetic construct
  misc_feature 1..390: note = Description of Artificial Sequence: Synthetic coding sequence
  source 1..390: mol_type = other DNA
atggtgttcctgcccctgaagtggagcctggccaccatgtccttcctgctgagcagcctgctggccctgctgactgtgtccacccccagctggtgccagagcacagaggccagccccaagagaagtgatggcacccccttcccctggaacaagatccggctgcctgaatatgtgattcctgtgcactatgacctgctgatccacgccaacctgaccaccctgaccttctggggcaccaccaaggtggagatcacagccagccagcccaccagcaccatcatcctgcacagccaccacctgcagatcagccgggccaccctgaggaaaggagctggggagcggctgtctgaggagcccctgcaggtgctggagcacccccggcaggagtag

SEQ ID NO: 151133 - DNA, 2748 bp, synthetic construct
  misc_feature 1..2748: note = Description of Artificial Sequence: Synthetic coding sequence
  source 1..2748: mol_type = other DNA
atgttccacagcagcgccatggtgaacagccacaggaagcccatgttcaacatccaccggggcttctactgcctgacagccatcctgccccagatctgcatctgcagccagttctctgtgcccagcagctaccacttcacagaggaccccggggccttccctgtggccaccaacggggagcgcttcccctggcaggagctgcggctgcccagcgtggtgatccccctgcactatgacctgtttgtgcaccccaacctgaccagcctggactttgtggccagcgagaagattgaggtgctggtgtccaatgccacccagttcatcatcctgcacagcaaggacctggagatcaccaatgccaccctgcagagcgaggaggacagccgctacatgaagccaggcaaggagctgaaggtgctgagctacccagcccacgagcagatcgccctgctggtgcctgagaagctgaccccccacctgaagtactacgtggccatggacttccaggccaagctgggagatggctttgagggcttctacaagagcacctaccgcaccctgggcggggagacccgcatcctggccgtgacagactttgagcccacccaggccaggatggccttcccctgctttgatgagcccctcttcaaggccaacttcagcatcaagatcagaagagagagccgccacatcgccctgagcaacatgcccaaggtgtccatctatgccagcccagacaagaggaaccagacccactacgccctgcaggccagcctgaagctgctggacttctatgagaagtactttgacatctactaccccctgagcaagctggacctgattgccatcccagactttgcccctggggccatggagaactggggcctcatcacctaccgggagaccagcctgctgtttgaccccaagaccagcagcgccagtgacaagctgtgggtgaccagggtgattgcccacgagctggcccaccagtggtttggaaacctggtgaccatggagtggtggaatgacatctggctgaaggagggctttgccaagtacatggagctgattgctgtgaatgccacctacccagagctgcagtttgatgactacttcctgaatgtgtgctttgaagtcatcaccaaggacagcctgaacagcagccggcccatcagcaagccagctgagacccccacccagatccaggagatgtttgatgaggtgtcctacaacaagggggcctgcatcctgaacatgctgaaggacttcctgggggaggagaagttccagaagggcatcatccagtacctgaagaagttctcctacagaaatgccaagaatgatgacctgtggagcagcctgagcaacagctgcctggagagtgacttcaccagcggaggagtgtgccacagcgaccccaagatgaccagcaacatgctggccttcctgggagaaaatgctgaggtgaaggagatgatgaccacctggaccctgcagaagggcatccccctgctggtggtgaagcaggacggctgcagcctgcggctgcagcaggagcgcttcctgcagggcgtcttccaggaggaccctgagtggagggccctgcaggagcgctacctgtggcacatccccctgacctacagcaccagcagcagcaatgtcatccaccgccacatcctgaagagcaagacagacaccctggacctgcctgagaagacctcctgggtgaagttcaacgtggacagcaatggctactacatcgtgcactatgagggccacggctgggaccagctgatcacccagctgaaccagaaccacaccctgctgcggcccaaggacagagtgggcctcatccatgatgtgttccagctggtgggcgccggccgcctgaccctggacaaggccctggacatgacctactacctgcagcacgagaccagcagccctgccctgctggagggcctgagctacctggagagcttctaccacatgatggacagaagaaacatcagtgacatcagcgagaacctgaagcgctacctgctgcagtacttcaagcctgtgattgaccggcagagctggagcgacaagggctctgtgtgggacaggatgctgcggagcgccctgctgaagctggcctgtgacctgaaccacgccccctgcatccagaaggctgctgagctgttcagccagtggatggagagcagcggcaagctgaacatccccacagatgtgctgaagatcgtgtacagcgtgggcgcccagaccacagctggctggaactacctgctggagcagtatgagctgtccatgagcagcgctgagcagaacaagatcctgtatgccctgagcaccagcaagcaccaggagaagctgctgaagctgattgagctgggcatggagggcaaggtgatcaagacccagaacctggccgccctgctgcacgccatcgcccggcggcccaagggccagcagctggcctgggactttgtgcgggagaactggacccacctgctgaagaagtttgacctgggcagctatgacatccgcatgatcatcagcggcaccacagcccacttcagcagcaaggacaagctgcaggaggtgaagctgttctttgagagcctggaggcccagggcagccacctggacatcttccagacagtgctggagaccatcaccaagaacatcaagtggctggagaagaacctgcccaccctgcggacctggctgatggtgaacacctag

SEQ ID NO: 151134 - DNA, 2883 bp, synthetic construct
  misc_feature 1..2883: note = Description of Artificial Sequence: Synthetic coding sequence
  source 1..2883: mol_type = other DNA
atgttccacagcagcgccatggtgaacagccacaggaagcccatgttcaacatccaccggggcttctactgcctgacagccatcctgccccagatctgcatctgcagccagttctctgtgcccagcagctaccacttcacagaggaccccggggccttccctgtggccaccaacggggagcgcttcccctggcaggagctgcggctgcccagcgtggtgatccccctgcactatgacctgtttgtgcaccccaacctgaccagcctggactttgtggccagcgagaagattgaggtgctggtgtccaatgccacccagttcatcatcctgcacagcaaggacctggagatcaccaatgccaccctgcagagcgaggaggacagccgctacatgaagccaggcaaggagctgaaggtgctgagctacccagcccacgagcagatcgccctgctggtgcctgagaagctgaccccccacctgaagtactacgtggccatggacttccaggccaagctgggagatggctttgagggcttctacaagagcacctaccgcaccctgggcggggagacccgcatcctggccgtgacagactttgagcccacccaggccaggatggccttcccctgctttgatgagcccctcttcaaggccaacttcagcatcaagatcagaagagagagccgccacatcgccctgagcaacatgcccaaggtgaagaccatcgagctggagggcggcctgctggaggaccactttgagaccaccgtgaagatgagcacctacctggtggcctacatcgtgtgtgacttccacagcctgagcggcttcaccagcagcggcgtgaaggtgtccatctatgccagcccagacaagaggaaccagacccactacgccctgcaggccagcctgaagctgctggacttctatgagaagtactttgacatctactaccccctgagcaagctggacctgattgccatcccagactttgcccctggggccatggagaactggggcctcatcacctaccgggagaccagcctgctgtttgaccccaagaccagcagcgccagtgacaagctgtgggtgaccagggtcatcgcccacgagctggcccaccagtggtttggaaacctggtgaccatggagtggtggaatgacatctggctgaaggagggctttgccaagtacatggagctgattgctgtgaatgccacctacccagagctgcagtttgatgactacttcctgaatgtgtgctttgaggtgatcaccaaggacagcctgaacagcagccggcccatcagcaagccagctgagacccccacccagatccaggagatgtttgatgaggtgtcctacaacaagggggcctgcatcctgaacatgctgaaggacttcctgggggaggagaagttccagaagggcatcatccagtacctgaagaagttctcctacagaaatgccaagaatgatgacctgtggagcagcctgagcaacagctgcctggagagtgacttcaccagcggcggcgtgtgccacagcgaccccaagatgaccagcaacatgctggccttcctgggggagaatgctgaggtgaaggagatgatgaccacctggaccctgcagaagggcatccccctgctggtggtgaagcaggacggctgcagcctgcggctgcagcaggagcgcttcctgcagggcgtcttccaggaggaccctgagtggagggccctgcaggagcgctacctgtggcacatccccctgacctacagcaccagcagcagcaatgtcatccaccgccacatcctgaagagcaagacagacaccctggacctgcctgagaagacctcctgggtgaagttcaacgtggacagcaatggctactacatcgtgcactatgagggccacggctgggaccagctgatcacccagctgaaccagaaccacaccctgctgcggcccaaggacagagtgggcctcatccatgatgtgttccagctggtgggcgccggccgcctgaccctggacaaggccctggacatgacctactacctgcagcacgagaccagcagccctgccctgctggagggcctgagctacctggagagcttctaccacatgatggacagaagaaacatcagtgacatcagcgagaacctgaagcgctacctgctgcagtacttcaagcctgtgattgaccggcagagctggagcgacaagggctctgtgtgggacaggatgctgcggagcgccctgctgaagctggcctgtgacctgaaccacgccccctgcatccagaaggctgctgagctgttcagccagtggatggagagcagcggcaagctgaacatccccacagatgtgctgaagatcgtgtacagcgtgggcgcccagaccacagctggctggaactacctgctggagcagtatgagctgtccatgagcagcgctgagcagaacaagatcctgtatgccctgagcaccagcaagcaccaggagaagctgctgaagctgattgagctgggcatggagggcaaggtgatcaagacccagaacctggccgccctgctgcacgccatcgcccggcggcccaagggccagcagctggcctgggactttgtgcgggagaactggacccacctgctgaagaagtttgacctgggcagctatgacatccgcatgatcatcagcggcaccacagcccacttcagcagcaaggacaagctgcaggaggtgaagctgttctttgagagcctggaggcccagggcagccacctggacatcttccagacagtgctggagaccatcaccaagaacatcaagtggctggagaagaacctgcccaccctgcggacctggctgatggtgaacacctag

SEQ ID NO: 151135 - DNA, 1053 bp, synthetic construct
  misc_feature 1..1053: note = Description of Artificial Sequence: Synthetic coding sequence
  source 1..1053: mol_type = other DNA
atgttccacagcagcgccatggtgaacagccacaggaagcccatgttcaacatccaccggggcttctactgcctgacagccatcctgccccagatctgcatctgcagccagttctctgtgcccagcagctaccacttcacagaggaccccggggccttccctgtggccaccaacggggagcgcttcccctggcaggagctgcggctgcccagcgtggtgatccccctgcactatgacctgtttgtgcaccccaacctgaccagcctggactttgtggccagcgagaagattgaggtgctggtgtccaatgccacccagttcatcatcctgcacagcaaggacctggagatcaccaatgccaccctgcagagcgaggaggacagccgctacatgaagccaggcaaggagctgaaggtgctgagctacccagcccacgagcagatcgccctgctggtgcctgagaagctgaccccccacctgaagtactacgtggccatggacttccaggccaagctgggagatggctttgagggcttctacaagagcacctaccgcaccctgggcggggagacccgcatcctggccgtgacagactttgagcccacccaggccaggatggccttcccctgctttgatgagcccctcttcaaggccaacttcagcatcaagatcagaagagagagccgccacatcgccctgagcaacatgcccaaggtgaagaccatcgagctggagggcggcctgctggaggaccactttgagaccaccgtgaagatgagcacctacctggtggcctacatcgtgtgtgacttccacagcctgagcggcttcaccagcagcggcgtgaaggtgtccatctatgccagcccagacaagaggaaccagacccactacgccctgcaggccagcctgaagctgctggacttctatgagaagtactttgacatctactaccccctgagcaagctgggcatgttcaagttccacatcatcgtgttcatctttgcccacaagacctgctttgacctcttccccctgagcctgtccatgtag

SEQ ID NO: 151136 - DNA, 2085 bp, synthetic construct
  misc_feature 1..2085: note = Description of Artificial Sequence: Synthetic coding sequence
  source 1..2085: mol_type = other DNA
atgttccacagcagcgccatggtgaacagccacaggaagcccatgttcaacatccaccggggcttctactgcctgacagccatcctgccccagatctgcatctgcagccagttctctgtgcccagcagctaccacttcacagaggaccccggggccttccctgtggccaccaacggggagcgcttcccctggcaggagctgcggctgcccagcgtggtgatccccctgcactatgacctgtttgtgcaccccaacctgaccagcctggactttgtggccagcgagaagattgaggtgctggtgtccaatgccacccagttcatcatcctgcacagcaaggacctggagatcaccaatgccaccctgcagagcgaggaggacagccgctacatgaagccaggcaaggagctgaaggtgctgagctacccagcccacgagcagatcgccctgctggtgcctgagaagctgaccccccacctgaagtactacgtggccatggacttccaggccaagctgggagatggctttgagggcttctacaagagcacctaccgcaccctgggcggggagacccgcatcctggccgtgacagactttgagcccacccaggccaggatggccttcccctgctttgatgagcccctcttcaaggccaacttcagcatcaagatcagaagagagagccgccacatcgccctgagcaacatgcccaaggtgaagaccatcgagctggagggcggcctgctggaggaccactttgagaccaccgtgaagatgagcacctacctggtggcctacatcgtgtgtgacttccacagcctgagcggcttcaccagcagcggcgtgaaggtgtccatctatgccagcccagacaagaggaaccagacccactacgccctgcaggccagcctgaagctgctggacttctatgagaagtactttgacatctactaccccctgagcaagctggacctgattgccatcccagactttgcccctggggccatggagaactggggcctcatcacctaccgggagaccagcctgctgtttgaccccaagaccagcagcgccagtgacaagctgtgggtgaccagggtcatcgcccacgagctggcccaccagtggtttggaaacctggtgaccatggagtggtggaatgacatctggctgaaggagggctttgccaagtacatggagctgattgctgtgaatgccacctacccagagctgcagtttgatgactacttcctgaatgtgtgctttgaggtgatcaccaaggacagcctgaacagcagccggcccatcagcaagccagctgagacccccacccagatccaggagatgtttgatgaggtgtcctacaacaagggggcctgcatcctgaacatgctgaaggacttcctgggggaggagaagttccagaagggcatcatccagtacctgaagaagttctcctacagaaatgccaagaatgatgacctgtggagcagcctgagcaacagctgcctggagagtgacttcaccagcggcggcgtgtgccacagcgaccccaagatgaccagcaacatgctggccttcctgggggagaatgctgaggtgaaggagatgatgaccacctggaccctgcagaagggcatccccctgctggtggtgaagcaggacggctgcagcctgcggctgcagcaggagcgcttcctgcagggcgtcttccaggaggaccctgagtggagggccctgcaggagcgctacctgtggcacatccccctgacctacagcaccagcagcagcaatgtcatccaccgccacatcctgaagagcaagacagacaccctggacctgcctgagaagacctcctgggtgaagttcaacgtggacagcaatggctactacatcgtgcactatgagggccacggctgggaccagctgatcacccagctgaaccagaaccacaccctgctgcggcccaaggacagagtgggcctcatccatgatgtgttccagctggtgggcgccggccgcctgaccctggacaaggccctggacatgacctactacctgcagcacgagaccagcagcccctag

SEQ ID NO: 151137 - DNA, 1452 bp, synthetic construct
  misc_feature 1..1452: note = Description of Artificial Sequence: Synthetic coding sequence
  source 1..1452: mol_type = other DNA
atggaggagggcggcggcggcgtgcgcagcctggtgcctgggggccctgtgctgctggtgctgtgtggcctgctggaggccagcggcggcggccgggccctgccccagctgagtgatgacatccccttccgggtgaactggccaggcacagagttcagcctgcccaccactggagtgctgtacaaggaggacaactacgtgatcatgaccacagcccacaaggagaagtacaagtgcatcctgcccctggtgaccagcggagatgaggaggaggagaaggactacaagggccccaacccccgggagctgctggagcccctcttcaagcagagcagctgcagctacagaattgagagctactggacctatgaggtgtgccacggcaagcacatccggcagtaccacgaggagaaggagaccggccagaagatcaacatccacgagtactacctgggcaacatgctggccaagaacctgctgtttgagaaggagcgggaggccgaggagaaggagaagagcaatgagatccccaccaagaacatcgagggccagatgaccccctactaccctgtgggcatgggaaatggcaccccctgcagcctgaagcagaaccggcccaggagcagcacagtgatgtacatctgccaccctgagagcaagcatgagatcctgtctgtggccgaggtgaccacctgtgaatatgaggtggtgatcctgacccccctgctgtgcagccaccccaagtaccgcttccgggccagccctgtgaatgacatcttctgccagagcctgcccggcagccccttcaagcccctgaccctgcggcagctggagcagcaggaggagatcctgcgggtgcccttcagaagaaacaaggaggaggacctgcagagcaccaaggaggagcgcttccctgccatccacaagagcatcgccatcggcagccagcctgtgctgactgtgggcaccacccacatcagcaagctgacagatgaccagctgatcaaggagttcctgagcggcagctactgcttccggggcggcgtgggctggtggaagtatgagttctgctacggcaagcacgtgcaccagtaccacgaggacaaggacagcggcaagacctctgtggtggtgggcacctggaaccaggaggagcacatcgagtgggccaagaagaacacagcccgggcctaccacctgcaggatgatggcacccagacagtgaggatggtgagccacttctatggaaatggagacatctgtgacatcacagacaagccccggcaggtgacagtgaagctgaagtgcaaggagagtgacagcccccatgctgtgacagtgtacatgctggagccccacagctgccagtacatcctgggcgtggagagccctgtgatctgcaagatcctggacacagcagatgaaaatggcctgctgagcctgcccaactag

SEQ ID NO: 151138 - DNA, 1290 bp, synthetic construct
  misc_feature 1..1290: note = Description of Artificial Sequence: Synthetic coding sequence
  source 1..1290: mol_type = other DNA
atggaggagggcggcggcggcgtgcgcagcctggtgcctgggggccctgtgctgctggtgctgtgtggcctgctggaggccagcggcggcggccgggccctgccccagctgagtgatgacatccccttccgggtgaactggccaggcacagagttcagcctgcccaccactggagtgctgtacaaggaggacaactacgtgatcatgaccacagcccacaaggagaagtacaagtgcatcctgcccctggtgaccagcggagatgaggaggaggagaaggactacaagggccccaacccccgggagctgctggagcccctcttcaagcagagcagctgcagctacagaattgagagctactggacctatgaggtgtgccacggcaagcacatccggcagtaccacgaggagaaggagaccggccagaagatcaacatccacgagtactacctgggcaacatgctggccaagaacctgctgtttgagaaggagcgggaggccgaggagaaggagaagagcaatgagatccccaccaagaacatcgagggccagatgaccccctactaccctgtgggcatgggaaatggcaccccctgcagcctgaagcagaaccggcccaggagcagcacagtgatgtacatctgccaccctgagagcaagcatgagatcctgtctgtggccgaggtgaccacctgtgaatatgaggtggtgatcctgacccccctgctgtgcagccaccccaagtaccgcttccgggccagccctgtgaatgacatcttctgccagagcctgcccggcagccccttcaagcccctgaccctgcggcagctggagcagcaggaggagatcctgcgggtgcccttcagaagaaacaaggagggcgtgggctggtggaagtatgagttctgctacggcaagcacgtgcaccagtaccacgaggacaaggacagcggcaagacctctgtggtggtgggcacctggaaccaggaggagcacatcgagtgggccaagaagaacacagcccgggcctaccacctgcaggatgatggcacccagacagtgaggatggtgagccacttctatggaaatggagacatctgtgacatcacagacaagccccggcaggtgacagtgaagctgaagtgcaaggagagtgacagcccccatgctgtgacagtgtacatgctggagccccacagctgccagtacatcctgggcgtggagagccctgtgatctgcaagatcctggacacagcagatgaaaatggcctgctgagcctgcccaactag

SEQ ID NO: 151139 - DNA, 1374 bp, synthetic construct
  misc_feature 1..1374: note = Description of Artificial Sequence: Synthetic coding sequence
  source 1..1374: mol_type = other DNA
atggaggagggcggcggcggcgtgcgcagcctggtgcctgggggccctgtgctgctggtgctgtgtggcctgctggaggccagcggcggcggccgggccctgccccagctgagtgatgacatccccttccgggtgaactggccaggcacagagttcagcctgcccaccactggagtgctgtacaaggaggacaactacgtgatcatgaccacagcccacaaggagaagtacaagtgcatcctgcccctggtgaccagcggagatgaggaggaggagaaggactacaagggccccaacccccgggagctgctggagcccctcttcaagcagagcagctgcagctacagaattgagagctactggacctatgaggtgtgccacggcaagcacatccggcagtaccacgaggagaaggagaccggccagaagatcaacatccacgagtactacctgggcaacatgctggccaagaacctgctgtttgagaaggagcgggaggccgaggagaaggagaagagcaatgagatccccaccaagaacatcgagggccagatgaccccctactaccctgtgggcatgggaaatggcaccccctgcagcctgaagcagaaccggcccaggagcagcacagtgatgtacatctgccaccctgagagcaagcatgagatcctgtctgtggccgaggtgaccacctgtgaatatgaggtggtgatcctgacccccctgctgtgcagccaccccaagtaccgcttccgggccagccctgtgaatgacatcttctgccagagcctgcccggcagccccttcaagcccctgaccctgcggcagctggagcagcaggaggagatcctgcgggtgcccttcagaagaaacaaggaggaggacctgcagagcaccaaggaggagcgcttccctgccatccacaagagcatcgccatcggcagccagcctgtgctgactgtgggcaccacccacatcagcaagctgacagatgaccagctgatcaaggagttcctgagcggcagctactgcttccggggcggcgtgggctggtggaagtatgagttctgctacggcaagcacgtgcaccagtaccacgaggacaaggacagcggcaagacctctgtggtggtgggcacctggaaccaggaggagcacatcgagtgggccaagaagaacacagcccgggcctaccacctgcaggatgatggcacccagacagtgcgctgcaaggagagtgacagcccccatgctgtgacagtgtacatgctggagccccacagctgccagtacatcctgggcgtggagagccctgtgatctgcaagatcctggacacagcagatgaaaatggcctgctgagcctgcccaactag

SEQ ID NO: 151140 - DNA, 2715 bp, synthetic construct
  misc_feature 1..2715: note = Description of Artificial Sequence: Synthetic coding sequence
  source 1..2715: mol_type = other DNA
atggagtggggcagcgagagcgctgctgtgagaagacaccgggtgggcgtggagcggcgggagggcgctgctgctgcccctcctcctgagcgggaggcccgggcccaggagcccctggtggatggctgcagcggcggcggccgcaccaggaagaggagccctgggggcagcggcggggccagcagaggagctggcaccggcctgtctgaggtgcgggccgccctgggcctggccctgtacctgattgccctgcggaccctggtgcagctgagcctgcagcagctggtgctgcggggagctgctggccacagaggagaatttgatgccctgcaggcccgggactacctggagcacatcaccagcatcggccccaggaccaccggcagcccagaaaatgagatcctgactgtgcactacctgctggagcagatcaagctgattgaggtgcagagcaacagcctgcacaagatctctgtggatgtgcagaggcccaccggcagcttcagcattgacttcctgggcggcttcaccagctactatgacaacatcaccaacgtggtggtgaagctggagcccagagatggagcccagcacgctgtgctggccaactgccactttgacagcgtggccaacagccctggggccagtgatgatgctgtgtcctgcagcgtgatgctggaggtgctgcgggtgctgagcaccagcagcgaggccctgcaccacgccgtcatcttcctgttcaacggggctgaggagaatgtgctgcaggccagccacggcttcatcacccagcacccctgggccagcctcatccgggccttcatcaacctggaggccgccggcgtgggcggcaaggagctggtgttccagacaggccctgagaacccctggctggtgcaggcctacgtgtctgctgccaagcacccctttgcctctgtggtggcccaggaggtgttccagagcggcatcatccccagcgacacagacttccgcatctacagagactttggaaacatccctggcatcgacctggccttcattgaaaatggctacatctaccacaccaagtatgacacagctgaccgcatcctgacagacagcatccagagagctggggacaacatcctggccgtgctgaagcacctggccaccagtgacatgctggccgccgccagcaagtaccgccacggcaacatggtgttctttgatgtgctgggcctcttcgtcatcgcctaccccagccgcatcggcagcatcatcaactacatggtggtgatgggcgtggtgctgtacctgggcaagaagttcctgcagcccaagcacaagacaggcaactacaagaaggacttcctgtgtggcctgggcatcaccctcatctcctggttcaccagcctggtgacagtgctgatcatcgctgtgttcatcagcctcatcggccagagcctgtcctggtacaaccacttctacgtgtctgtgtgcctgtatggaacagccaccgtggccaagatcatcctgatccacaccctggccaagcgcttctactacatgaatgccagcgcccagtacctgggggaggtgttctttgacatcagcctgtttgtgcactgctgcttcctggtgaccctgacctaccagggcctgtgcagcgccttcatctctgctgtgtgggtggccttccccctgctgaccaagctgtgtgtgcacaaggacttcaagcagcacggggcccagggcaagttcatcgccttctacctgctgggcatgttcatcccctacctgtatgccctgtacctgatctgggccgtgtttgagatgttcacccccatcctgggccgcagcggcagcgagatccccccagatgtggtgctggccagcatcctggccggctgcaccatgatcctgagcagctacttcatcaacttcatctacctggccaagagcaccaagaagaccatgctgaccctgaccctggtgtgtgccatcaccttcctgctggtgtgcagcggcaccttcttcccctacagcagcaacccagccaaccccaagcccaagagggtcttcctgcagcacatgaccaggaccttccatgacctggagggcaatgctgtgaagagggacagcggcatctggatcaatggatttgactacacaggcatcagccacatcaccccccacatccctgagatcaatgacagcatccgggcccactgtgaagaaaatgcccccctgtgtggcttcccctggtacctgcctgtgcacttcctgatcaggaagaactggtacctgcctgcccctgaggtgagccccaggaaccccccccacttccgcctcatcagcaaggagcagaccccctgggacagcatcaagctgacctttgaggccaccggccccagccacatgtccttctacgtgcgggcccacaagggcagcaccctgagccagtggagcctgggcaatggcacccctgtgaccagcaagggcggggactactttgtgttctacagccacggcctgcaggccagcgcctggcagttctggattgaggtgcaggtgtctgaggagcaccctgagggcatggtgacagtggccatcgccgcccactacctgagcggggaggacaagaggagcccccagctggatgccctgaaggagaagttcccagactggaccttccccagcgcctgggtgtgcacctatgacctgtttgtgttctag

SEQ ID NO: 151141 - DNA, 1056 bp, synthetic construct
  misc_feature 1..1056: note = Description of Artificial Sequence: Synthetic coding sequence
  source 1..1056: mol_type = other DNA
atgctggaggtgctgcgggtgctgagcaccagcagcgaggccctgcaccacgccgtcatcttcctgttcaacggggctgaggagaatgtgctgcaggccagccacggcttcatcacccagcacccctgggccagcctcatccgggccttcatcaacctggaggccgccggcgtgggcggcaaggagctggtgttccagacaggccctgagaacccctggctggtgcaggcctacgtgtctgctgccaagcacccctttgcctctgtggtggcccaggaggtgttccagagcggcatcatccccagcgacacagacttccgcatctacagagactttggaaacatccctggcatcgacctggccttcattgaaaatggctacatctaccacaccaagtatgacacagctgaccgcatcctgacagacagcatccagagagctggggacaacatcctggccgtgctgaagcacctggccaccagtgacatgctggccgccgccagcaagtaccgccacggcaacatggtgttctttgatgtgctgggcctcttcgtcatcgcctaccccagccgcatcggcagcatcatcaactacatggtggtgatgggcgtggtgctgtacctgggcaagaagttcctgcagcccaagcacaagacaggcaactacaagaaggacttcctgtgtggcctgggcatcaccctcatctcctggttcaccagcctggtgacagtgctgatcatcgctgtgttcatcagcctcatcggccagagcctgtcctggtacaaccacttctacgtgtctgtgtgcctgtatggaacagccaccgtggccaagatcatcctgatccacaccctggccaagcgcttctactacatgaatgccagcgcccagtacctgggggaggtgttctttgacatcagcctgtttgtgcactgctgcttcctggtgaccctgacctaccagggcctgtgcagcgccttcatctctgctgtgtgggtggccttccccctgctgaccaagctgtgtgtgcacaaggacttcaagcagcacgactag

SEQ ID NO: 151142 - DNA, 2715 bp, synthetic construct; identical to SEQ ID NO: 151140
  misc_feature 1..2715: note = Description of Artificial Sequence: Synthetic coding sequence
  source 1..2715: mol_type = other DNA

SEQ ID NO: 151143 - DNA, 1260 bp, synthetic construct
  misc_feature 1..1260: note = Description of Artificial Sequence: Synthetic coding sequence
  source 1..1260: mol_type = other DNA
atggtggtgatgggcgtggtgctgtacctgggcaagaagttcctgcagcccaagcacaagacaggcaactacaagaaggacttcctgtgtggcctgggcatcaccctcatctcctggttcaccagcctggtgacagtgctgatcatcgctgtgttcatcagcctcatcggccagagcctgtcctggtacaaccacttctacgtgtctgtgtgcctgtatggaacagccaccgtggccaagatcatcctgatccacaccctggccaagcgcttctactacatgaatgccagcgcccagtacctgggggaggtgttctttgacatcagcctgtttgtgcactgctgcttcctggtgaccctgacctaccagggcctgtgcagcgccttcatctctgctgtgtgggtggccttccccctgctgaccaagctgtgtgtgcacaaggacttcaagcagcacggggcccagggcaagttcatcgccttctacctgctgggcatgttcatcccctacctgtatgccctgtacctgatctgggccgtgtttgagatgttcacccccatcctgggccgcagcggcagcgagatccccccagatgtggtgctggccagcatcctggccggctgcaccatgatcctgagcagctacttcatcaacttcatctacctggccaagagcaccaagaagaccatgctgaccctgaccctggtgtgtgccatcaccttcctgctggtgtgcagcggcaccttcttcccctacagcagcaacccagccaaccccaagcccaagagggtcttcctgcagcacatgaccaggaccttccatgacctggagggcaatgctgtgaagagggacagcggcatctggatcaatggatttgactacacaggcatcagccacatcaccccccacatccctgagatcaatgacagcatccgggcccactgtgaagaaaatgcccccctgtgtggcttcccctggtacctgcctgtgcacttcctgatcaggaagaactggtacctgcctgcccctgaggtgagccccaggaaccccccccacttccgcctcatcagcaaggagcagaccccctgggacagcatcaagctgacctttgaggccacagcctgcctgcccatcctgcagatcctggacctgcctgccagcaccatcatgaccaagccctacgtgctgctgtgcagcagcccccagagggtgaacaccttctctgtggtgtcctggcagtggcaccccagccacaagtag

SEQ ID NO: 151144 - DNA, 786 bp, synthetic construct
  misc_feature 1..786: note = Description of Artificial Sequence: Synthetic coding sequence
  source 1..786: mol_type = other DNA
atggctgctgctgtgccccgggccgccttcctgagccccctgctgcccctgctgctgggcttcctgctgctgagcgccccccacggcggcagcggcctgcacaccaagggggccctgcccctggacacagtgaccttctacaaggtgatccccaagagcaagtttgtgctggtgaagtttgacacccagtacccctacggggagaagcaggatgagttcaagaggctggccgagaacagcgccagcagtgatgacctgctggtggccgaggtgggcatcagtgactatggagacaagctgaacatggagctgtctgagaagtacaagctggacaaggagagctaccctgtgttctacctgttcagagatggagactttgaaaatcctgtgccctacacaggagctgtgaaggtgggcgccatccagcgctggctgaagggccagggcgtgtacctgggcatgcctggctgcctgcctgtgtatgatgccctggccggggagttcatccgggccagcggcgtggaggcccggcaggccctgctgaagcagggccaggacaacctgagctctgtgaaggagacccagaagaagtgggccgagcagtacctgaagatcatgggcaagatcctggaccagggcgaggacttccctgccagcgagatgacccgcatcgcccggctcatcgagaagaacaagatgtctgatggcaagaaggaggagctgcagaagagcctgaacatcctgacagccttccagaagaagggagctgagaaggaggagctgtag

SEQ ID NO: 151145 - DNA, 162 bp, synthetic construct
  misc_feature 1..162: note = Description of Artificial Sequence: Synthetic coding sequence
  source 1..162: mol_type = other DNA
atggctgctgctgtgccccgggccgccttcctgagccccctgctgcccctgctgctgggcttcctgctgctgagcgccccccacggcggcagcggcctgcacaccaagggggccctgcccctggacacagtgaccttctacaagatcatggtgaccagctag

SEQ ID NO: 151146 - DNA, 2925 bp, synthetic construct
  misc_feature 1..2925: note = Description of Artificial Sequence: Synthetic coding sequence
  source 1..2925: mol_type = other DNA
atgaggcgggccggcatcggggaggacagccggctgggcctgcaggcccagcccggggctgagcccagccctggccgggccggcacagagaggagcctgggcggcacccagggccctggccagccctgcagctgccctggggccatggccagcgctgtgcggggcagccggccctggccccggctgggcctgcagctgcagtttgctgccctgctgctgggcaccctgagcccccaggtgcacaccctgcggcctgagaacctgctgctggtgtccaccctggatggcagcctgcacgccctgagcaagcagacaggagacctgaagtggaccctgagagatgaccccgtcatcgagggccccatgtatgtgacagagatggccttcctgagtgaccctgcagatggcagcctgtacatcctgggcacccagaagcagcagggcctgatgaagctgcccttcaccatccctgagctggtgcacgccagcccctgccgcagcagtgatggagtcttctacacaggcaggaagcaggatgcctggtttgtggtggaccctgagagcggggagacccagatgaccctgaccacagagggccccagcaccccccggctgtacatcggccgcacccagtacacagtgaccatgcatgacccccgggccccagccctgcgctggaacaccacctaccgccgctacagcgccccacccatggatggcagccctgggaagtacatgagccacctggccagctgtggcatgggcctgctgctgactgtggaccccggcagcggcaccgtgctgtggacccaggacctgggcgtgcctgtgatgggcgtgtacacctggcaccaggacggcctgcggcagctgccccacctgaccctggcccgggacaccctgcacttcctggccctgcgctggggccacatccggctgcctgccagcggcccccgggacacagccaccctcttcagcaccctggacacccagctgctgatgaccctgtatgtgggcaaggatgaaacaggcttctacgtgtccaaggccctggtgcacactggagtggccctggtgccccggggcctgaccctggccccagcagatggccccaccacagatgaggtgaccctgcaggtgtctggagagcgggagggcagccccagcacagctgtgcgctaccccagcggctctgtggccctgcccagccagtggctgctgattggccaccacgagctgccccctgtgctgcacaccaccatgctgcgggtgcaccccaccctgggcagcggcacagctgagacccggcccccagagaacacccaggccccagccttcttcctggagctgctgagcctgagccgggagaagctgtgggacagcgagctgcaccctgaggagaagaccccagacagctacctgggcctgggcccccaggacctgctggccgccagcctgacagctgtgctgctgggcggctggatcctgtttgtgatgaggcagcagcagccccaggtggtggagaagcagcaggagacccccctggccccagctgactttgcccacatcagccaggatgcccagagcctgcacagcggggccagccgccgcagccagaagaggctgcagagccccagcaagcaggcccagcccctggatgatcctgaggccgagcagctgactgtggtgggcaagatctccttcaaccccaaggatgtgctgggccgcggggccggcggcacctttgtgttccggggccagtttgagggccgggctgtggccgtgaagaggctgctgagagaatgttttggcctggtgagaagagaggtgcagctgctgcaggagagtgacagacaccccaacgtgctgcgctacttctgcacagagcggggcccccagttccactacatcgccctggagctgtgccgggccagcctgcaggagtatgtggagaacccagacctggaccggggcggcctggagcctgaggtggtgctgcagcagctgatgagcggcctggcccacctgcacagcctgcacatcgtgcaccgggacctgaagccaggcaacatcctgatcaccggccctgacagccagggcctgggccgggtggtgctgagtgactttggcctgtgcaagaagctgcctgctggccgctgcagcttcagcctgcacagcggcatccctggaacagagggctggatggcccctgagctgctgcagctgctgcccccagacagccccaccagcgctgtggacatcttctctgctggctgtgtgttctactacgtgctgagcggcggcagccacccctttggagacagcctgtaccggcaggccaacatcctgaccggggccccctgcctggcccacctggaggaggaggtgcatgacaaggtggtggcccgggacctggtgggcgccatgctgagccccctgccccagccccggcccagcgccccccaggtgctggcccaccccttcttctggagccgggccaagcagctgcagttcttccaggatgtgtctgactggctggagaaggagagcgagcaggagcccctggtgcgggccctggaggccggcggctgtgctgtggtgcgggacaactggcatgagcacatctccatgcccctgcagacagacctgaggaagttccgcagctacaagggcacctctgtgcgggacctgctgcgggctgtgaggaacaagaagcaccactaccgggagctgcctgtggaggtgcggcaggccctgggccaggtgcctgatggctttgtgcagtacttcaccaaccgcttcccccggctgctgctgcacacccaccgggccatgaggagctgtgccagcgagagcctcttcctgccctactaccccccagacagcgaggcccggcggccctgccctggggccaccggccgctag

SEQ ID NO: 151147 - DNA, 2625 bp, synthetic construct
  misc_feature 1..2625: note = Description of Artificial Sequence: Synthetic coding sequence
  source 1..2625: mol_type = other DNA
atggccagcgctgtgcggggcagccggccctggccccggctgggcctgcagctgcagtttgctgccctgctgctgggcaccctgagcccccaggtgcacaccctgcggcctgagaacctgctgctggtgtccaccctggatggcagcctgcacgccctgagcaagcagacaggagacctgaagtggaccctgagagatgaccccgtcatcgagggccccatgtatgtgacagagatggccttcctgagtgaccctgcagatggcagcctgtacatcctgggcacccagaagcagcagggcctgatgaagctgcccttcaccatccctgagctggtgcacgccagcccctgccgcagcagtgatggagtcttctacacaggcaggaagcaggatgcctggtttgtggtggaccctgagagcggggagacccagatgaccctgaccacagagggccccagcaccccccggctgtacatcggccgcacccagtacacagtgaccatgcatgacccccgggccccagccctgcgctggaacaccacctaccgccgctacagcgccccacccatggatggcagccctgggaagtacatgagccacctggccagctgtggcatgggcctgctgctgactgtggaccccggcagcggcaccgtgctgtggacccaggacctgggcgtgcctgtgatgggcgtgtacacctggcaccaggacggcctgcggcagctgccccacctgaccctggcccgggacaccctgcacttcctggccctgcgctggggccacatccggctgcctgccagcggcccccgggacacagccaccctcttcagcaccctggacacccagctgctgatgaccctgtatgtgggcaaggatgaaacaggcttctacgtgtccaaggccctggtgcacactggagtggccctggtgccccggggcctgaccctggccccagcagatggccccaccacagatgaggtgaccctgcaggtgtctggagagcgggagggcagccccagcacagctgtgcgctaccccagcggctctgtggccctgcccagccagtggctgctgattggccaccacgagctgccccctgtgctgcacaccaccatgctgcgggtgcaccccaccctgggcagcggcacagctgagacccggcccccagagaacacccaggccccagccttcttcctggagcagcagccccaggtggtggagaagcagcaggagacccccctggccccagctgactttgcccacatcagccaggatgcccagagcctgcacagcggggccagccgccgcagccagaagaggctgcagagccccagcaagcaggcccagcccctggatgatcctgaggccgagcagctgactgtggtgggcaagatctccttcaaccccaaggatgtgctgggccgcggggccggcggcacctttgtgttccggggccagtttgagggccgggctgtggccgtgaagaggctgctgagagaatgttttggcctggtgagaagagaggtgcagctgctgcaggagagtgacagacaccccaacgtgctgcgctacttctgcacagagcggggcccccagttccactacatcgccctggagctgtgccgggccagcctgcaggagtatgtggagaacccagacctggaccggggcggcctggagcctgaggtggtgctgcagcagctgatgagcggcctggcccacctgcacagcctgcacatcgtgcaccgggacctgaagccaggcaacatcctgatcaccggccctgacagccagggcctgggccgggtggtgctgagtgactttggcctgtgcaagaagctgcctgctggccgctgcagcttcagcctgcacagcggcatccctggaacagagggctggatggcccctgagctgctgcagctgctgcccccagacagccccaccagcgctgtggacatcttctctgctggctgtgtgttctactacgtgctgagcggcggcagccacccctttggagacagcctgtaccggcaggccaacatcctgaccggggccccctgcctggcccacctggaggaggaggtgcatgacaaggtggtggcccgggacctggtgggcgccatgctgagccccctgccccagccccggcccagcgccccccaggtgctggcccaccccttcttctggagccgggccaagcagctgcagttcttccaggatgtgtctgactggctggagaaggagagcgagcaggagcccctggtgcgggccctggaggccggcggctgtgctgtggtgcgggacaactggcatgagcacatctccatgcccctgcagacagacctgaggaagttccgcagctacaagggcacctctgtgcgggacctgctgcgggctgtgaggaacaagaagcaccactaccgggagctgcctgtggaggtgcggcaggccctgggccaggtgcctgatggctttgtgcagtacttcaccaaccgcttcccccggctgctgctgcacacccaccgggccatgaggagctgtgccagcgagagcctcttcctgccctactaccccccagacagcgaggcccggcggccctgccctggggccaccggccgctag

SEQ ID NO: 151148 - DNA, 354 bp, synthetic construct
  misc_feature 1..354: note = Description of Artificial Sequence: Synthetic coding sequence
  source 1..354: mol_type = other DNA
atgagccagaagcaggaggaggagaacccagctgaggagaccggggaggagaagcaggacacccaggagaaggagggcatcctgcctgagcgggcagaggaggccaagctgaaggccaagtaccccagcctgggccagaagccaggcggcagtgacttcctgatgaagaggctgcagaagggccagaagtactttgattctggggactacaacatggccaaggccaagatgaagaacaagcagctgcccagcgctggccctgacaagaacctggtgactggagaccacatccccaccccccaggacctgccccagaggaagagcagcctggtgaccagcaagctggccggctag

SEQ ID NO: 151149 - DNA, 414 bp, synthetic construct
  misc_feature 1..414: note = Description of Artificial Sequence: Synthetic coding sequence
  source 1..414: mol_type = other DNA
atgagccagaagcaggaggaggagaacccagctgaggagaccggggaggagaagcaggacacccaggagaaggagggcatcctgcctgagcgggcagaggaggccaagctgaaggccaagtaccccagcctgggccagaagccaggcggcagtgacttcctgatgaagaggctgcagaagggggactacaagagcctgcactggagcgtgctgctgtgtgctgatgagatgcagaagtactttgattctggggactacaacatggccaaggccaagatgaagaacaagcagctgcccagcgctggccctgacaagaacctggtgactggagaccacatccccaccccccaggacctgccccagaggaagagcagcctggtgaccagcaagctggccggcggccaggtggagtag

SEQ ID NO: 151150 - DNA, 423 bp, synthetic construct
  misc_feature 1..423: note = Description of Artificial Sequence: Synthetic coding sequence
  source 1..423: mol_type = other DNA
atgagccagaagcaggaggaggagaacccagctgaggagaccggggaggagaagcaggacacccaggagaaggagggcatcctgcctgagcgggcagaggaggccaagctgaaggccaagtaccccagcctgggccagaagccaggcggcagtgacttcctgatgaagaggctgcagaagggcgtgtggggcatcgtgtcctaccccctgagcctggagctgaaggaggtgctgaggatgaagtctgtggagcagaagtactttgacagcggggactacaacatggccaaggccaagatgaagaacaagcagctgcccagcgctggccctgacaagaacctggtgactggagaccacatccccaccccccaggacctgccccagaggaagagcagcctggtgaccagcaagctggccggctag

SEQ ID NO: 151151 - DNA, 354 bp, synthetic construct
  misc_feature 1..354: note = Description of Artificial Sequence: Synthetic coding sequence
  source 1..354: mol_type = other DNA
atggccggcggcctgggctgtgatgtgtgctactggtttgtggaggacacccaggagaaggagggcatcctgcctgagcgggcagaggaggccaagctgaaggccaagtaccccagcctgggccagaagccaggcggcagtgacttcctgatgaagaggctgcagaagggccagaagtactttgattctggggactacaacatggccaaggccaagatgaagaacaagcagctgcccagcgctggccctgacaagaacctggtgactggagaccacatccccaccccccaggacctgccccagaggaagagcagcctggtgaccagcaagctggccggcggccaggtggagtag

SEQ ID NO: 151152 - DNA, 402 bp, synthetic construct
  misc_feature 1..402: note = Description of Artificial Sequence: Synthetic coding sequence
  source 1..402: mol_type = other DNA
atggccggcggcctgggctgtgatgtgtgctactggtttgtggaggacacccaggagaaggagggcatcctgcctgagcgggcagaggaggccaagctgaaggccaagtaccccagcctgggccagaagccaggcggcagtgacttcctgatgaagaggctgcagaagggggactacaagagcctgcactggagcgtgctgctgtgtgctgatgagatgcagaagtactttgattctggggactacaacatggccaaggccaagatgaagaacaagcagctgcccagcgctggccctgacaagaacctggtgactggagaccacatccccaccccccaggacctgccccagaggaagagcagcctggtgaccagcaagctggccggcggccaggtggagtag

SEQ ID NO: 151153 - DNA, 318 bp, synthetic construct
  misc_feature 1..318: note = Description of Artificial Sequence: Synthetic coding sequence
  source 1..318: mol_type = other DNA
atgagccagaagcaggaggaggagaacccagctgaggagaccggggaggagaagcaggacacccaggagaaggagggcatcctgcctgagcgggcagaggaggccaagctgaaggccaagtaccccagcctgggccagaagccaggcggcagtgacttcctgatgaagaggctgcagaagggcgtgtggggcatcgtgtcctaccccctgagcctggagctgaaggaggtgctgaggatgaagtctgtggaggtgctgctggaccccttcctggaggtgctgctgctgaacagaagcagaggagaatttgagatctag

SEQ ID NO: 151154 - DNA, 435 bp, synthetic construct
  misc_feature 1..435: note = Description of Artificial Sequence: Synthetic coding sequence
  source 1..435: mol_type = other DNA
atgagccagaagcaggaggaggagaacccagctgaggagaccggggaggagaagcaggacacccaggagaaggagggcatcctgcctgagcgggcagaggaggccaagctgaaggccaagtaccccagcctgggccagaagccaggcggcagtgacttcctgatgaagaggctgcagaagggcgtgtggggcatcgtgtcctaccccctgagcctggagctgaaggaggtgctgaggatgaagtctgtggagcagaagtactttgacagcggggactacaacatggccaaggccaagatgaagaacaagcagctgcccagcgctggccctgacaagaacctggtgactggagaccacatccccaccccccaggacctgccccagaggaagagcagcctggtgaccagcaagctggccggcggccaggtggagtag

SEQ ID NO: 151155 - DNA, 366 bp, synthetic construct
  misc_feature 1..366: note = Description of Artificial Sequence: Synthetic coding sequence
  source 1..366: mol_type = other DNA
atgagccagaagcaggaggaggagaacccagctgaggagaccggggaggagaagcaggacacccaggagaaggagggcatcctgcctgagcgggcagaggaggccaagctgaaggccaagtaccccagcctgggccagaagccaggcggcagtgacttcctgatgaagaggctgcagaagggccagaagtactttgattctggggactacaacatggccaaggccaagatgaagaacaagcagctgcccagcgctggccctgacaagaacctggtgactggagaccacatccccaccccccaggacctgccccagaggaagagcagcctggtgaccagcaagctggccggcggccaggtggagtag

SEQ ID NO: 151156 - DNA, 402 bp, synthetic construct
  misc_feature 1..402: note = Description of Artificial Sequence: Synthetic coding sequence
  source 1..402: mol_type = other DNA
atgagccagaagcaggaggaggagaacccagctgaggagaccggggaggagaagcaggacacccaggagaaggagggcatcctgcctgagcgggcagaggaggccaagctgaaggccaagtaccccagcctgggccagaagccaggcggcagtgacttcctgatgaagaggctgcagaagggggactacaagagcctgcactggagcgtgctgctgtgtgctgatgagatgcagaagtactttgattctggggactacaacatggccaaggccaagatgaagaacaagcagctgcccagcgctggccctgacaagaacctggtgactggagaccacatccccaccccccaggacctgccccagaggaagagcagcctggtgaccagcaagctggccggctag

SEQ ID NO: 151157 - DNA, 318 bp, synthetic construct; identical to SEQ ID NO: 151153
  misc_feature 1..318: note = Description of Artificial Sequence: Synthetic coding sequence
  source 1..318: mol_type = other DNA

SEQ ID NO: 151158 - DNA, 342 bp, synthetic construct
  misc_feature 1..342: note = Description of Artificial Sequence: Synthetic coding sequence
  source 1..342: mol_type = other DNA
atggccggcggcctgggctgtgatgtgtgctactggtttgtggaggacacccaggagaaggagggcatcctgcctgagcgggcagaggaggccaagctgaaggccaagtaccccagcctgggccagaagccaggcggcagtgacttcctgatgaagaggctgcagaagggccagaagtactttgattctggggactacaacatggccaaggccaagatgaagaacaagcagctgcccagcgctggccctgacaagaacctggtgactggagaccacatccccaccccccaggacctgccccagaggaagagcagcctggtgaccagcaagctggccggctag

SEQ ID NO: 151159 - DNA, 1173 bp, synthetic construct
  misc_feature 1..1173: note = Description of Artificial Sequence: Synthetic coding sequence
  source 1..1173: mol_type = other DNA
atgatcagcctgcccggccccctggtgaccaacctgctgcgcttcctgttcctgggcctgagcgccctggccccacccagccgggcccagctgcagctgcacctgcctgccaaccggctgcaggccgtggagggcggggaggtggtgctgcctgcctggtacaccctgcatggagaggtgagcagcagccagccctgggaggtgccctttgtgatgtggttcttcaagcagaaggagaaggaggaccaggtgctgagctacatcaatggagtgaccaccagcaagccaggagtgtccctggtgtacagcatgcccagcaggaacctgagcctgcggctggagggcctgcaggagaaggacagcggcccctacagctgcagcgtgaatgtgcaggacaagcagggcaagagccggggccacagcatcaagaccctggagctgaatgtgctggtgcccccagccccacccagctgccgcctgcagggcgtgccccacgtgggcgccaacgtgaccctgagctgccagagccccaggagcaagccagctgtgcagtaccagtgggaccggcagctgcccagcttccagaccttctttgccccagccctggatgtgatccggggcagcctgagcctgaccaacctgagcagctccatggccggcgtgtatgtgtgcaaggcccacaatgaggtgggcacagcccagtgcaatgtgaccctggaggtgtccactggacctggagctgctgtggtggccggggctgtggtgggcaccctggtgggcctgggcctgctggccggcctggtgctgctgtaccacagaagaggcaaggccctggaggagcccgccaatgacatcaaggaggatgccatcgcccccaggaccctgccctggcccaagagcagtgacaccatcagcaagaatggcaccctgagctctgtgaccagcgcccgggccctgcggccccctcatggcccccccaggcctggggccctgacccccacccccagcctgagcagccaggccctgcccagcccccggctgcccaccacagatggagcccacccccagcccatcagccccatccctgggggcgtgagcagcagcggcctgagcaggatgggcgctgtgcctgtgatggtgcctgcccagagccaggccggcagcctggtgtag

SEQ ID NO: 151160 - DNA, 426 bp, synthetic construct
  misc_feature 1..426: note = Description of Artificial Sequence: Synthetic coding sequence
  source 1..426: mol_type = other DNA
atgatcagcctgcccggccccctggtgaccaacctgctgcgcttcctgttcctgggcctgagcgccctggatgtgatccggggcagcctgagcctgaccaacctgagcagctccatggccggcgtgtatgtgtgcaaggcccacaatgaggtgggcacagcccagtgcaatgtgaccctggaggtgtccacaggccctggagctgctgtggtggccggggctgtggtgggcaccctggtgggcctgggcctgctggccggcctggtgctgctgtaccaccggcggggcaaggccctggaggagcccgccaatgacatcaaggtgcgcagccccctgggcctgtccttcagcgcccccaagatggagtggctgtggaagtggagagatgcccacttctacagagacagctacctgagcaagtggtag

SEQ ID NO: 151161 - DNA, 2613 bp, synthetic construct
  misc_feature 1..2613: note = Description of Artificial Sequence: Synthetic coding sequence
  source 1..2613: mol_type = other DNA
atgacagctgacaaggagaagaagaggagcagcagcgagaggaggaaggagaagagcagagatgctgcccgctgccgccgcagcaaggagacagaggtgttctatgagctggcccacgagctgcccctgccccacagcgtgagcagccacctggacaaggccagcatcatgaggctggccatctccttcctgcggacccacaagctgctgagctctgtgtgcagtgaaaatgaaagtgaagctgaggccgaccagcagatggacaacctgtacctgaaggccctggagggcttcatcgctgtggtgacccaggatggagacatgatcttcctgtctgagaacatcagcaagttcatgggcctgacccaggtggagctgaccggccacagcatctttgacttcacccacccctgtgaccacgaggagatccgggagaacctgagcctgaagaatggaagtggctttgggaagaagagcaaggacatgagcacagagcgggacttcttcatgaggatgaagtgcaccgtgaccaacagaggaagaacagtgaacctgaagagcgccacctggaaggtgctgcactgcaccggccaggtgaaggtgtacaacaactgccccccccacaacagcctgtgtggctacaaggagcccctgctgagctgcctgatcatcatgtgtgagcccatccagcaccccagccacatggacatccccctggacagcaagaccttcctgagccgccacagcatggacatgaagttcacctactgtgatgaccgcatcacagagctgattggctaccaccctgaggagctgctgggccgcagcgcctatgagttctaccacgccctggacagcgagaacatgaccaagagccaccagaacctgtgcaccaagggccaggtggtgtctggccagtacaggatgctggccaagcatggaggctacgtgtggctggagacccagggcaccgtcatctacaaccccaggaacctgcagccccagtgcatcatgtgtgtgaactacgtgctgtctgaaattgagaagaatgatgtggtgttctccatggaccagacagagagcctcttcaagccccacctgatggccatgaacagcatctttgacagcagtggaaaaggagctgtgtctgagaagagcaacttcctgttcaccaagctgaaggaggagcctgaggagctggcccagctggcccccaccccaggagatgccatcatcagcctggactttggaaaccagaactttgaggagagcagcgcctacggcaaggccatcctgccccccagccagccctgggccacagagctgcggagccacagcacccagagcgaggccggcagcctgcctgccttcaccgtgccccaggccgccgcccctggcagcaccaccccatctgccaccagcagcagcagcagctgcagcacccccaacagccctgaggactactacaccagcctggacaatgacctgaagattgaggtgattgagaagctgtttgccatggacacagaggccaaggaccagtgcagcacccagacagacttcaatgagctggacctggagaccctggccccctacatccccatggatggagaggacttccagctgagccccatctgcccagaggagcggctgctggccgagaacccccagagcaccccccagcactgcttcagcgccatgaccaacatcttccagcccctggcccctgtggccccccacagccccttcctgctggacaagttccagcagcagctggagagcaagaagacagagcctgagcaccggcccatgagcagcatcttctttgatgctggcagcaaggccagcctgcccccctgctgcggccaggccagcacccccctgagctccatgggcggccgcagcaacacccagtggcccccagacccccccctgcacttcggccccaccaagtgggccgtgggggaccagaggacagagttcctgggcgccgcccccctgggcccccctgtgtccccacctcatgtgtccaccttcaagaccaggtctgccaagggctttggagcccggggcccagatgtgctgagccctgccatggtggccctgagcaacaagctgaagctgaagaggcagctggagtatgaggagcaggccttccaggacctgtctggaggagaccccccaggcggcagcaccagccacctgatgtggaagaggatgaagaacctgcggggcggcagctgccccctgatgccagacaagcccctgagcgccaacgtgcccaatgacaagttcacccagaaccccatgaggggcctgggccaccccctgcggcacctgcccctgccccagcccccatctgccatcagccctggagagaacagcaagagccgcttccccccccagtgctacgccacccagtaccaggactacagcctgagcagcgcccacaaggtgtctggcatggccagccggctgctgggccccagctttgagagctacctgctgcctgagctgaccaggtatgactgtgaggtgaatgtgcctgtgctgggcagcagcaccctgctgcagggcggggacctgctgcgggccctggaccaggccacctag

SEQ ID NO: 151162 - DNA, 780 bp, synthetic construct
  misc_feature 1..780: note = Description of Artificial Sequence: Synthetic coding sequence
  source 1..780: mol_type = other DNA
atgacagctgacaaggagaagaagaggagcagcagcgagaggaggaaggagaagagcagagatgctgcccgctgccgccgcagcaaggagacagaggtgttctatgagctggcccacgagctgcccctgccccacagcgtgagcagccacctggacaaggccagcatcatgaggctggccatctccttcctgcggacccacaagctgctgagctctgtgtgcagtgaaaatgaaagtgaagctgaggccgaccagcagatggacaacctgtacctgaaggccctggagggcttcatcgctgtggtgacccaggatggagacatgatcttcctgtctgagaacatcagcaagttcatgggcctgacccaggtggagctgaccggccacagcatctttgacttcacccacccctgtgaccacgaggagatccgggagaacctgagcctgaagaatggaagtggctttgggaagaagagcaaggacatgagcacagagcgggacttcttcatgaggatgaagtgcaccgtgaccaacagaggaagaacagtgaacctgaagagcgccacctggaaggtgctgcactgcaccggccaggtgaaggtgtacaacaactgccccccccacaacagcctgtgtggctacaaggagcccctgctgagctgcctgatcatcatgtgtgagcccatccagcaccccagccacatggacatccccctggacagcaagaccttcctgagccgccacagcatggacatgaagttcacctactgtgatgactag

SEQ ID NO: 151163 - DNA, 537 bp, synthetic construct
  misc_feature 1..537: note = Description of Artificial Sequence: Synthetic coding sequence
  source 1..537: mol_type = other DNA
atggtgtctgtgcccaccacctggtgcagcgtggccctggccctgctggtggccctgcacgagggcaagggccaggccgccgccaccctggagcagcctgccagcagcagccacgcccagggcacccacctgcggctgcggcgctgcagctgcagctcctggctggacaaggaatgtgtgtacttctgccacctggacatcatctgggtgaacaccccagagcagacagccccctacggcctgggcaacccccccaggagaagaagaagaagcctgccccggcgctgccagtgcagcagcgcccgggaccctgcctgtgccaccttctgcctgcggcggccctggacagaggccggggctgtgcccagcaggaagagccctgcagatgtgttccagacaggcaagacaggagccaccaccggggagctgctgcagaggctgcgggacatcagcacagtgaagagcctgtttgccaagaggcagcaggaggccatgagggagcccaggagcacccacagccgctggaggaagaggtag

SEQ ID NO: 151164 - DNA, 660 bp, synthetic construct
  misc_feature 1..660: note = Description of Artificial Sequence: Synthetic coding sequence
  source 1..660: mol_type = other DNA
atggagcccggcctgtggctgctgtttggcctgactgtgaccagcgctgctggctttgtgccctgcagccagagcggagatgctggccggcggggcgtgtcccaggcccccacagctgcccggtctgagggggactgtgaggagaccgtggccggccctggagaggagaccgtggccggccctggagagggcaccgtggcccccacagccctgcagggccccagccctggcagccctggccaggagcaggccgctgagggcgcccctgagcaccacaggagccgccgctgcacctgcttcacctacaaggacaaggaatgtgtgtactactgccacctggacatcatctggatcaacaccccagagcagacagtgccctacggcctgagcaactaccggggcagcttccggggcaagaggtctgctggccccctgcccggcaacctgcagctgagccaccggccccacctgcgctgtgcctgtgtgggccgctatgacaaggcctgcctgcacttctgcacccagaccctggatgtgagcagcaacagcaggacagctgagaagacagacaaggaggaggagggcaaggtgcggggggccaacagaggcctgtgccagaggcggctgaagagcaggaccaacaaggccagccggctgtag

SEQ ID NO: 151165 - DNA, 717 bp, synthetic construct
  misc_feature 1..717: note = Description of Artificial Sequence: Synthetic coding sequence
  source 1..717: mol_type = other DNA
atggagcccggcctgtggctgctgtttggcctgactgtgaccagcgctgctggctttgtgccctgcagccagagcggagatgctggccggcggggcgtgtcccaggcccccacagctgcccggtctgagggggactgtgaggagaccgtggccggccctggagaggagaccgtggccggccctggagagggcaccgtggcccccacagccctgcagggccccagccctggcagccctggccaggagcaggccgctgagggcgcccctgagcaccacaggagccgccgctgcacctgcttcacctacaaggacaaggaatgtgtgtactactgccacctggacatcatctggatcaacaccccagagcagacagtgccctacggcctgagcaactaccggggcagcttccggggcaagaggtctgctggccccctgcccggcaacctgcagctgagccaccggccccacctgcgctgtgcctgtgtgggccgctatgacaaggcctgcctgcacttctgcacccagaccctggatgtgagcagcaacagcaggacagctgagaagacagacaaggaggaggagggcaaggtggaggtgaaggaccagcagagcaagcaggccctggacctgcaccaccccaagctgatgcctggcagcggcctggccctggcccccagcacctgcccccgctgcctcttccaggagggcgccccctag

SEQ ID NO: 151166 - DNA, 579 bp, synthetic construct
  misc_feature 1..579: note = Description of Artificial Sequence: Synthetic coding sequence
  source 1..579: mol_type = other DNA
atggagcccggcctgtggctgctgtttggcctgactgtgaccagcgctgctggctttgtgccctgcagccagagcggagatgctggccggcggggcgtgtcccaggcccccacagctgcccggtctgagggggactgtgaggagaccgtggccggccctggagaggagaccgtggccggccctggagagggcaccgtggcccccacagccctgcagggccccagccctggcagccctggccaggagcaggccgctgagggcgcccctgagcaccacaggagccgccgctgcacctgcttcacctacaaggacaaggaatgtgtgtactactgccacctggacatcatctggatcaacaccccagagcagacagtgccctacggcctgagcaactaccggggcagcttccggggcaagaggtctgctggccccctgcccggcaacctgcagctgagccaccggccccacctgcgctgtgcctgtgtgggccgctatgacaaggcctgcctgcacttctgcacccagaccctggatgtgtcccggctgaagagcaggaccaacaaggccagccggctgtag

SEQ ID NO: 151167 - DNA, 717 bp, synthetic construct; identical to SEQ ID NO: 151165
  misc_feature 1..717: note = Description of Artificial Sequence: Synthetic coding sequence
  source 1..717: mol_type = other DNA

SEQ ID NO: 151168 - DNA, 675 bp, synthetic construct
  misc_feature 1..675: note = Description of Artificial Sequence: Synthetic coding sequence
  source 1..675: mol_type = other DNA
atggagcccggcctgtggctgctgtttggcctgactgtgaccagcgctgctggctttgtgccctgcagccagagcggagatgctggccggcggggcgtgtcccaggcccccacagctgcccggtctgagggggactgtgaggagaccgtggccggccctggagaggagaccgtggccggccctggagagggcaccgtggcccccacagccctgcagggccccagccctggcagccctggccaggagcaggccgctgagggcgcccctgagcaccacaggagccgccgctgcacctgcttcacctacaaggacaaggaatgtgtgtactactgccacctggacatcatctggatcaacaccccagagcagacagtgccctacggcctgagcaactaccggggcagcttccggggcaagaggtctgctggccccctgcccggcaacctgcagctgagccaccggccccacctgcgctgtgcctgtgtgggccgctatgacaaggcctgcctgcacttctgcacccagaccctggatgtgtcccggcaggtggaggtgaaggaccagcagagcaagcaggccctggacctgcaccaccccaagctgatgcctggcagcggcctggccctggcccccagcacctgcccccgctgcctcttccaggagggcgccccctag

SEQ ID NO: 151169 - DNA, 2304 bp, synthetic construct
  misc_feature 1..2304: note = Description of Artificial Sequence: Synthetic coding sequence
  source 1..2304: mol_type = other DNA
atggaggccctgcgggagagcgtgctgcacctggccctgcagatgagcacctacaagagggccaccctggatgaggaggacctggtggacagcctgtctgaaggagatgcctaccccaacggcctgcaggtgaacttccacagccccaggagcggccagcgctgctgggccgcccggacccaggtggagaagaggctggtggtgctggtggtgctgctggccgccggcctggtggcctgcctggccgccctgggcatccagtaccagaccaggagccccagcgtgtgcctgtctgaggcctgtgtgtctgtgaccagcagcatcctgagctccatggaccccaccgtggacccctgccacgacttcttctcctatgcctgtggcggctggatcaaggccaaccctgtgcctgatggccacagccgctggggcaccttcagcaacctgtgggagcacaaccaggccatcatcaagcacctgctggagaacagcacagcctctgtgtctgaggccgagaggaaggcccaggtgtactaccgggcctgcatgaatgagacccgcatcgaggagctgcgggccaagcccctgatggagctgattgaaaggctgggcggctggaacatcaccggcccctgggccaaggacaacttccaggacaccctgcaggtggtgacagcccactaccgcaccagccccttcttctctgtgtatgtgtctgctgacagcaagaacagcaacagcaatgtcatccaggtggaccagagcggcctgggcctgcccagccgggactactacctgaacaagacagaaaatgagaaggtgctgaccggctacctgaactacatggtgcagctgggcaagctgctgggcggcggagatgaggaggccatccggccccagatgcagcagatcctggactttgaaacagccctggccaacatcaccatcccccaggagaagagaagagatgaggagctgatctaccacaaggtgacagctgctgagctgcagaccctggccccagccatcaactggctgcccttcctgaacaccatcttctaccctgtggagatcaatgaaagtgagcccatcgtggtgtatgacaaggagtacctggagcagatcagcaccctcatcaacaccacagaccgctgcctgctgaacaactacatgatctggaacctggtgaggaagaccagcagcttcctggaccagcgcttccaggatgctgatgagaagttcatggaggtgatgtatggcaccaagaagacctgcctgccccgctggaagttctgtgtgtctgacacagagaacaacctgggctttgccctgggccccatgtttgtgaaggccacctttgctgaggacagcaagagcatcgccacagagatcatcctggagatcaagaaggcctttgaggagagcctgagcaccctgaagtggatggatgaggagaccaggaagagcgccaaggagaaggcagatgccatctacaacatgattggctaccccaacttcatcatggaccccaaggagctggacaaggtgttcaatgactacacagctgtgcctgacctgtactttgaaaatgccatgaggttcttcaacttctcctggagggtgacagctgaccagctgaggaaggcccccaacagagaccagtggagcatgaccccacccatggtgaatgcctactacagccccaccaagaatgaaattgtgtttcctgctggcatcctgcaggcccccttctacaccaggagcagccccaaggccctgaactttggaggcatcggcgtggtggtgggccacgagctgacccacgcctttgatgaccagggccgggagtatgacaaggatggcaacctgcggccctggtggaagaacagctctgtggaggccttcaagaggcagacagagtgcatggtggagcagtacagcaactacagcgtgaatggagagcctgtgaatggccgccacaccctgggggagaacattgctgacaatggaggcctgaaggccgcctaccgggcctaccagaactgggtgaagaagaatggagctgagcacagcctgcccaccctgggcctgaccaacaaccagctgttcttcctgggctttgcccaggtgtggtgcagcgtgaggaccccagagagcagccatgagggcctcatcacagacccccacagccccagccgcttccgggtgattggcagcctgagcaacagcaaggagttcagcgagcacttccgctgccccccaggcagccccatgaaccccccccacaagtgtgaggtgtggtag

SEQ ID NO: 151170 - DNA, 2277 bp, synthetic construct
  misc_feature 1..2277: note = Description of Artificial Sequence: Synthetic coding sequence
  source 1..2277: mol_type = other DNA
atgcccctgcagggcctgggcctgcagaggaaccccttcctgcagggcaagaggggccctggcctgaccagcagcccccccctgctgccccccagcctgcaggtgaacttccacagccccaggagcggccagcgctgctgggccgcccggacccaggtggagaagaggctggtggtgctggtggtgctgctggccgccggcctggtggcctgcctggccgccctgggcatccagtaccagaccaggagccccagcgtgtgcctgtctgaggcctgtgtgtctgtgaccagcagcatcctgagctccatggaccccaccgtggacccctgccacgacttcttctcctatgcctgtggcggctggatcaaggccaaccctgtgcctgatggccacagccgctggggcaccttcagcaacctgtgggagcacaaccaggccatcatcaagcacctgctggagaacagcacagcctctgtgtctgaggccgagaggaaggcccaggtgtactaccgggcctgcatgaatgagaccagaattgaggagctgcgggccaagcccctgatggagctgattgagcggctgggcggctggaacatcaccggcccctgggccaaggacaacttccaggacaccctgcaggtggtgacagcccactaccgcaccagccccttcttctctgtgtatgtgtctgctgacagcaagaacagcaacagcaatgtcatccaggtggaccagagcggcctgggcctgcccagccgggactactacctgaacaagacagaaaatgagaaggtgctgaccggctacctgaactacatggtgcagctgggcaagctgctgggcggcggagatgaggaggccatccggccccagatgcagcagatcctggactttgaaacagccctggccaacatcaccatcccccaggagaagagaagagatgaggagctgatctaccacaaggtgacagctgctgagctgcagaccctggccccagccatcaactggctgcccttcctgaacaccatcttctaccctgtggagatcaatgaaagtgagcccatcgtggtgtatgacaaggagtacctggagcagatcagcaccctcatcaacaccacagaccgctgcctgctgaacaactacatgatctggaacctggtgaggaagaccagcagcttcctggaccagcgcttccaggatgctgatgagaagttcatggaggtgatgtatggcaccaagaagacctgcctgccccgctggaagttctgtgtgtctgacacagagaacaacctgggctttgccctgggccccatgtttgtgaaggccacctttgctgaggacagcaagagcatcgccacagagatcatcctggagatcaagaaggcctttgaggagagcctgagcaccctgaagtggatggatgaggagaccaggaagagcgccaaggagaaggcagatgccatctacaacatgattggctaccccaacttcatcatggaccccaaggagctggacaaggtgttcaatgactacacagctgtgcctgacctgtactttgaaaatgccatgaggttcttcaacttctcctggagggtgacagctgaccagctgaggaaggcccccaacagagaccagtggagcatgaccccacccatggtgaatgcctactacagccccaccaagaatgagatcgtgtttcctgctggcatcctgcaggcccccttctacaccaggagcagccccaaggccctgaactttggaggcattggagtggtggtgggccacgagctgacccacgcctttgatgaccagggccgggagtatgacaaggatggcaacctgcggccctggtggaagaacagctctgtggaggccttcaagaggcagacagagtgcatggtggagcagtacagcaactacagcgtgaatggagagcctgtgaatggccgccacaccctgggagaaaatattgctgacaatggaggcctgaaggccgcctaccgggcctaccagaactgggtgaagaagaatggagctgagcacagcctgcccaccctgggcctgaccaacaaccagctgttcttcctgggctttgcccaggtgtggtgcagcgtgaggaccccagagagcagccatgagggcctcatcacagacccccacagccccagccgcttccgggtcatcggcagcctgagcaacagcaaggagttcagcgagcacttccgctgccccccaggcagccccatgaaccccccccacaagtgtgaggtgtggtag

SEQ ID NO: 151171 - DNA, 2313 bp, synthetic construct
  misc_feature 1..2313: note = Description of Artificial Sequence: Synthetic coding sequence
  source 1..2313: mol_type = other DNA
atgagaggagtgtggcccccacctgtgtctgccctgctgagcgccctgggcatgagcacctacaagagggccaccctggatgaggaggacctggtggacagcctgtctgaaggagatgcctacccaaatggcctgcaggtgaacttccacagccccaggagcggccagcgctgctgggccgcccggacccaggtggagaagaggctggtggtgctggtggtgctgctggccgccggcctggtggcctgcctggccgccctgggcatccagtaccagaccaggagccccagcgtgtgcctgtctgaggcctgtgtgtctgtgaccagcagcatcctgagctccatggaccccaccgtggacccctgccacgacttcttctcctatgcctgtggcggctggatcaaggccaaccctgtgcctgatggccacagccgctggggcaccttcagcaacctgtgggagcacaaccaggccatcatcaagcacctgctggagaacagcacagcctctgtgtctgaggccgagaggaaggcccaggtgtactaccgggcctgcatgaatgagaccagaattgaggagctgcgggccaagcccctgatggagctgattgagcggctgggcggctggaacatcaccggcccctgggccaaggacaacttccaggacaccctgcaggtggtgacagcccactaccgcaccagccccttcttctctgtgtatgtgtctgctgacagcaagaacagcaacagcaatgtcatccaggtggaccagagcggcctgggcctgcccagccgggactactacctgaacaagacagaaaatgagaaggtgctgaccggctacctgaactacatggtgcagctgggcaagctgctgggcggcggagatgaggaggccatccggccccagatgcagcagatcctggactttgaaacagccctggccaacatcaccatcccccaggagaagagaagagatgaggagctgatctaccacaaggtgacagctgctgagctgcagaccctggccccagccatcaactggctgcccttcctgaacaccatcttctaccctgtggagatcaatgaaagtgagcccatcgtggtgtatgacaaggagtacctggagcagatcagcaccctcatcaacaccacagaccgctgcctgctgaacaactacatgatctggaacctggtgaggaagaccagcagcttcctggaccagcgcttccaggatgctgatgagaagttcatggaggtgatgtatggcaccaagaagacctgcctgccccgctggaagttctgtgtgtctgacacagagaacaacctgggctttgccctgggccccatgtttgtgaaggccacctttgctgaggacagcaagagcatcgccacagagatcatcctggagatcaagaaggcctttgaggagagcctgagcaccctgaagtggatggatgaggagaccaggaagagcgccaaggagaaggcagatgccatctacaacatgattggctaccccaacttcatcatggaccccaaggagctggacaaggtgttcaatgactacacagctgtgcctgacctgtactttgaaaatgccatgaggttcttcaacttctcctggagggtgacagctgaccagctgaggaaggcccccaacagagaccagtggagcatgaccccacccatggtgaatgcctactacagccccaccaagaatgagatcgtgtttcctgctggcatcctgcaggcccccttctacaccaggagcagccccaaggccctgaactttggaggcattggagtggtggtgggccacgagctgacccacgcctttgatgaccagggccgggagtatgacaaggatggcaacctgcggccctggtggaagaacagctctgtggaggccttcaagaggcagacagagtgcatggtggagcagtacagcaactacagcgtgaatggagagcctgtgaatggccgccacaccctgggagaaaatattgctgacaatggaggcctgaaggccgcctaccgggcctaccagaactgggtgaagaagaatggagctgagcacagcctgcccaccctgggcctgaccaacaaccagctgttcttcctgggctttgcccaggtgtggtgcagcgtgaggaccccagagagcagccatgagggcctcatcacagacccccacagccccagccgcttccgggtcatcggcagcctgagcaacagcaaggagttcagcgagcacttccgctgccccccaggcagccccatgaaccccccccacaagtgtgaggtgtggtag

SEQ ID NO: 151172 - DNA, 2265 bp, synthetic construct
  misc_feature 1..2265: note = Description of Artificial Sequence: Synthetic coding sequence
  source 1..2265: mol_type = other DNA
atgatgagcacctacaagagggccaccctggatgaggaggacctggtggacagcctgtctgaaggagatgcctacccaaatggcctgcaggtgaacttccacagccccaggagcggccagcgctgctgggccgcccggacccaggtggagaagaggctggtggtgctggtggtgctgctggccgccggcctggtggcctgcctggccgccctgggcatccagtaccagaccaggagccccagcgtgtgcctgtctgaggcctgtgtgtctgtgaccagcagcatcctgagctccatggaccccaccgtggacccctgccacgacttcttctcctatgcctgtggcggctggatcaaggccaaccctgtgcctgatggccacagccgctggggcaccttcagcaacctgtgggagcacaaccaggccatcatcaagcacctgctggagaacagcacagcctctgtgtctgaggccgagaggaaggcccaggtgtactaccgggcctgcatgaatgagaccagaattgaggagctgcgggccaagcccctgatggagctgattgagcggctgggcggctggaacatcaccggcccctgggccaaggacaacttccaggacaccctgcaggtggtgacagcccactaccgcaccagccccttcttctctgtgtatgtgtctgctgacagcaagaacagcaacagcaatgtcatccaggtggaccagagcggcctgggcctgcccagccgggactactacctgaacaagacagaaaatgagaaggtgctgaccggctacctgaactacatggtgcagctgggcaagctgctgggcggcggagatgaggaggccatccggccccagatgcagcagatcctggactttgaaacagccctggccaacatcaccatcccccaggagaagagaagagatgaggagctgatctaccacaaggtgacagctgctgagctgcagaccctggccccagccatcaactggctgcccttcctgaacaccatcttctaccctgtggagatcaatgaaagtgagcccatcgtggtgtatgacaaggagtacctggagcagatcagcaccctcatcaacaccacagaccgctgcctgctgaacaactacatgatctggaacctggtgaggaagaccagcagcttcctggaccagcgcttccaggatgctgatgagaagttcatggaggtgatgtatggcaccaagaagacctgcctgccccgctggaagttctgtgtgtctgacacagagaacaacctgggctttgccctgggccccatgtttgtgaaggccacctttgctgaggacagcaagagcatcgccacagagatcatcctggagatcaagaaggcctttgaggagagcctgagcaccctgaagtggatggatgaggagaccaggaagagcgccaaggagaaggcagatgccatctacaacatgattggctaccccaacttcatcatggaccccaaggagctggacaaggtgttcaatgactacacagctgtgcctgacctgtactttgaaaatgccatgaggttcttcaacttctcctggagggtgacagctgaccagctgaggaaggcccccaacagagaccagtggagcatgaccccacccatggtgaatgcctactacagccccaccaagaatgagatcgtgtttcctgctggcatcctgcaggcccccttctacaccaggagcagccccaaggccctgaactttggaggcattggagtggtggtgggccacgagctgacccacgcctttgatgaccagggccgggagtatgacaaggatggcaacctgcggccctggtggaagaacagctctgtggaggccttcaagaggcagacagagtgcatggtggagcagtacagcaactacagcgtgaatggagagcctgtgaatggccgccacaccctgggagaaaatattgctgacaatggaggcctgaaggccgcctaccgggcctaccagaactgggtgaagaagaatggagctgagcacagcctgcccaccctgggcctgaccaacaaccagctgttcttcctgggctttgcccaggtgtggtgcagcgtgaggaccccagagagcagccatgagggcctcatcacagacccccacagccccagccgcttccgggtcatcggcagcctgagcaacagcaaggagttcagcgagcacttccgctgccccccaggcagccccatgaaccccccccacaagtgtgaggtgtggtag

SEQ ID NO: 151173 - DNA, 2217 bp, synthetic construct
  misc_feature 1..2217: note = Description of Artificial Sequence: Synthetic coding sequence
  source 1..2217: mol_type = other DNA
atgagaggagtgtggcccccacctgtgtctgccctgctgagcgccctgggcatgagcacctacaagagggccaccctggatgaggaggacctggtggacagcctgtctgaaggagatgcctacccaaatggcctgcaggtgaacttccacagccccaggagcggccagcgctgctgggccgcccggacccaggtggagaagaggctggtggtgctggtggtgctgctggccgccggcctggtggcctgcctggccgccctgggcatccagtaccagaccaggagccccagcgtgtgcctgtctgaggcctgtgtgtctgtgaccagcagcatcctgagctccatggaccccaccgtggacccctgccacgacttcttctcctatgcctgtggcggctggatcaaggccaaccctgtgcctgatggccacagccgctggggcaccttcagcaacctgtgggagcacaaccaggccatcatcaagcacctgctggagaacagcacagcctctgtgtctgaggccgagaggaaggcccaggtgtactaccgggcctgcatgaatgagaccagaattgaggagctgcgggccaagcccctgatggagctgattgagcggctgggcggctggaacatcaccggcccctgggccaaggacaacttccaggacaccctgcaggtggtgacagcccactaccgcaccagccccttcttctctgtgtatgtgtctgctgacagcaagaacagcaacagcaatgtcatccaggtggaccagagcggcctgggcctgcccagccgggactactacctgaacaagacagaaaatgagaaggtgctgaccggctacctgaactacatggtgcagctgggcaagctgctgggcggcggagatgaggaggccatccggccccagatgcagcagatcctggactttgaaacagccctggccaacatcaccatcccccaggagaagagaagagatgaggagctgatctaccacaaggtgacagctgctgagctgcagaccctggccccagccatcaactggctgcccttcctgaacaccatcttctaccctgtggagatcaatgaaagtgagcccatcgtggtgtatgacaaggagtacctggagcagatcagcaccctcatcaacaccacagaccgctgcctgctgaacaactacatgatctggaacctggtgaggaagaccagcagcttcctggaccagcgcttccaggatgctgatgagaagttcatggaggtgatgtatggcaccaagaagacctgcctgccccgctggaagttctgtgtgtctgacacagagaacaacctgggctttgccctgggccccatgtttgtgaaggccacctttgctgaggacagcaagagcatcgccacagagatcatcctggagatcaagaaggcctttgaggagagcctgagcaccctgaagtggatggatgaggagaccaggaagagcgccaaggagaaggcagatgccatctacaacatgattggctaccccaacttcatcatggaccccaaggagctggacaaggtgttcaatgactacacagctgtgcctgacctgtactttgaaaatgccatgaggttcttcaacttctcctggagggtgacagctgaccagctgaggaaggcccccaacagagaccagtggagcatgaccccacccatggtgaatgcctactacagccccaccaagaatgagatcgtgtttcctgctggcatcctgcaggcccccttctacaccaggagcagccccaaggccctgaactttggaggcattggagtggtggtgggccacgagctgacccacgcctttgatgaccagggccgggagtatgacaaggatggcaacctgcggccctggtggaagaacagctctgtggaggccttcaagaggcagacagagtgcatggtggagcagtacagcaactacagcgtgaatggagagcctgtgaatggccgccacaccctgggagaaaatattgctgacaatggaggcctgaaggccgcctacagagtgtggtgcagcgtgaggaccccagagagcagccatgagggcctcatcacagacccccacagccccagccgcttccgggtcatcggcagcctgagcaacagcaaggagttcagcgagcacttccgctgccccccaggcagccccatgaaccccccccacaagtgtgaggtgtggtag

SEQ ID NO: 151174 - DNA, 2328 bp, synthetic construct
  misc_feature 1..2328: note = Description of Artificial Sequence: Synthetic coding sequence
  source 1..2328: mol_type = other DNA
atggagcccccctacagcctgacagcccactatgatgagttccaggaggtgaagtatgtgagccgctgtggggccggcggggcccggggggccagcctgcccccaggcttccccctgggcgccgcccggagcgccaccggggcccggagcggcctgccccgctggaacagaagagaggtgtgcctgctgagcggcctggtgtttgctgctggcctgtgtgccatcctggccgccatgctggccctgaagtacctgggccctgtggccgccggcggcggggcctgcccagagggctgcccagagaggaaggcctttgcccgggccgcccgcttcctggccgccaacctggatgccagcattgacccctgccaggacttctacagctttgcctgtggcggctggctgcggagacatgccatcccagatgacaagctgacctacggcaccatcgccgccatcggggagcagaatgaggagcggctgcggcggctgctggcccggcctgggggcggccctgggggcgccgcccagaggaaggtgcgggccttcttccgcagctgcctggacatgagagaaattgagcggctgggcccccggcccatgctggaggtgattgaggactgtggcggctgggacctgggcggcgctgaggagaggcctggggtggccgcccgctgggacctgaaccggctgctgtacaaggcccagggcgtgtacagcgctgctgccctcttcagcctgactgtgtccctggatgacaggaacagcagccgctacgtgatcagaattgaccaggacggcctgaccctgcctgagaggaccctgtacctggcccaggatgaagattctgagaagatcctggccgcctacagagtcttcatggagcgggtgctgagcctgctgggcgcagatgctgtggagcagaaggcccaggagatcctgcaggtggagcagcagctggccaacatcaccgtgtctgaacatgatgacctgcggagagatgtgtcctccatgtacaacaaggtgaccctgggccagctgcagaagatcaccccccacctgcgctggaagtggctgctggaccagatcttccaggaggacttcagcgaggaggaggaggtggtgctgctggccacagactacatgcagcaggtgtcccagctgatccgcagcaccccccaccgggtgctgcacaactacctggtgtggagggtggtggtggtgctgtctgagcacctgagcccccccttccgggaggccctgcacgagctggcccaggagatggagggcagtgacaagccccaggagctggcccgggtgtgcctgggccaggccaacagacacttcggcatggccctgggcgccctgtttgtgcatgagcacttctctgctgccagcaaggccaaggtgcagcagctggtggaggacatcaagtacatcctgggccagaggctggaggagctggactggatggatgctgagaccagggctgctgcccgggccaagctgcagtacatgatggtgatggtgggctacccagacttcctgctgaagccagatgctgtggacaaggagtatgaatttgaggtgcatgagaagacctacttcaagaacatcctgaacagcatccgcttcagcatccagctgtctgtgaagaagatccggcaggaggtggacaagagcacctggctgctgcccccccaggccctgaatgcctactacctgcccaacaagaaccagatggtgtttcctgctggcatcctgcagcccaccctgtatgaccctgacttcccccagagcctgaactatggaggcatcggcaccatcatcggccacgagctgacccacggctatgatgactggggcggccagtatgacaggagcggcaacctgctgcactggtggacagaggccagctacagccgcttcctgaggaaggccgagtgcatcgtgcggctgtatgacaacttcaccgtgtacaaccagagggtgaatggcaagcacaccctgggggagaacattgctgacatgggcggcctgaagctggcctaccacgcctaccagaagtgggtgcgggagcacggccctgagcaccccctgccccggctgaagtacacccatgaccagctgttcttcatcgcctttgcccagaactggtgcatcaagagaagaagccagagcatctacctgcaggtgctgacagacaagcacgcccctgagcactacagagtgctgggctctgtgtcccagtttgaggagtttggccgggccttccactgccccaaggacagccccatgaacccagcccacaagtgcagcgtgtggtag

SEQ ID NO: 151175 - DNA, 2322 bp, synthetic construct
  misc_feature 1..2322: note = Description of Artificial Sequence: Synthetic coding sequence
  source 1..2322: mol_type = other DNA
atggagcccccctacagcctgacagcccactatgatgagttccaggaggtgaagtatgtgagccgctgtggggccggcggggcccggggggccagcctgcccccaggcttccccctgggcgccgcccggagcgccaccggggcccggagcggcctgccccgctggaacagaagagaggtgtgcctgctgagcggcctggtgtttgctgctggcctgtgtgccatcctggccgccatgctggccctgaagtacctgggccctgtggccgccggcggcggggcctgcccagagggctgcccagagaggaaggcctttgcccgggccgcccgcttcctggccgccaacctggatgccagcattgacccctgccaggacttctacagctttgcctgtggcggctggctgcggagacatgccatcccagatgacaagctgacctacggcaccatcgccgccatcggggagcagaatgaggagcggctgcggcggctgctggcccggcctgggggcggccctgggggcgccgcccagaggaaggtgcgggccttcttccgcagctgcctggacatgagagaaattgagcggctgggcccccggcccatgctggaggtgattgaggactgtggcggctgggacctgggcggcgctgaggagaggcctggggtggccgcccgctgggacctgaaccggctgctgtacaaggcccagggcgtgtacagcgctgctgccctcttcagcctgactgtgtccctggatgacaggaacagcagccgctacgtgatcagaattgaccaggacggcctgaccctgcctgagaggaccctgtacctggcccaggatgaagattctgagaagatcctggccgcctacagagtcttcatggagcgggtgctgagcctgctgggcgcagatgctgtggagcagaaggcccaggagatcctgcaggtggagcagcagctggccaacatcaccgtgtctgaacatgatgacctgcggagagatgtgtcctccatgtacaacaaggtgaccctgggccagctgcagaagatcaccccccacctgcgctggaagtggctgctggaccagatcttccaggaggacttcagcgaggaggaggaggtggtgctgctggccacagactacatgcagcaggtgtcccagctgatccgcagcaccccccaccgggtgctgcacaactacctggtgtggagggtggtggtggtgctgtctgagcacctgagcccccccttccgggaggccctgcacgagctggcccaggagatggagggcagtgacaagccccaggagctggcccgggtgtgcctgggccaggccaacagacacttcggcatggccctgggcgccctgtttgtgcatgagcacttctctgctgccagcaaggccaaggtgcagcagctggtggaggacatcaagtacatcctgggccagaggctggaggagctggactggatggatgctgagaccagggctgctgcccgggccaagctgcagtacatgatggtgatggtgggctacccagacttcctgctgaagccagatgctgtggacaaggagtatgaatttgaggtgcatgagaagacctacttcaagaacatcctgaacagcatccgcttcagcatccagctgtctgtgaagaagatccggcaggaggtggacaagtggctgctgcccccccaggccctgaatgcctactacctgcccaacaagaaccagatggtgtttcctgctggcatcctgcagcccaccctgtatgaccctgacttcccccagagcctgaactatggaggcatcggcaccatcatcggccacgagctgacccacggctatgatgactggggcggccagtatgacaggagcggcaacctgctgcactggtggacagaggccagctacagccgcttcctgaggaaggccgagtgcatcgtgcggctgtatgacaacttcaccgtgtacaaccagagggtgaatggcaagcacaccctgggggagaacattgctgacatgggcggcctgaagctggcctaccacgcctaccagaagtgggtgcgggagcacggccctgagcaccccctgccccggctgaagtacacccatgaccagctgttcttcatcgcctttgcccagaactggtgcatcaagagaagaagccagagcatctacctgcaggtgctgacagacaagcacgcccctgagcactacagagtgctgggctctgtgtcccagtttgaggagtttggccgggccttccactgccccaaggacagccccatgaacccagcccacaagtgcagcgtgtggtag

SEQ ID NO: 151176 - DNA, 1284 bp, synthetic construct
  misc_feature 1..1284: note = Description of Artificial Sequence: Synthetic coding sequence
  source 1..1284: mol_type = other DNA
atggagaccctgtgcctgcgggccagcttctggctggccctggtgggctgtgtgatcagtgacaaccctgagcgctacagcaccaacctgagcaaccacgtggatgacttcaccaccttccggggcacagagctgtccttcctggtgaccacccaccagcccaccaacctggtgctgcccagcaatggctccatgcacaactactgcccccagcagaccaagatcaccagcgccttcaagtacatcaacacagtcatcagctgcaccatcttcatcgtgggcatggtgggcaatgccaccctgctgcgcatcatctaccagaacaagtgcatgagaaatggccccaatgccctgattgccagcctggccctgggggacctgatctacgtggtgattgacctgcccatcaacgtgttcaagctgctggccggccgctggccctttgaccacaatgactttggagtcttcctgtgcaagctgttccccttcctgcagaagagctctgtgggcatcaccgtgctgaacctgtgtgccctgtctgtggaccgctacagagctgtggcctcctggagccgggtgcagggcatcggcatccccctggtgacagccatcgagatcgtgtccatctggatcctgtccttcatcctggccatccctgaggccatcggctttgtgatggtgccctttgagtacagaggagagcagcacaagacctgcatgctgaatgccaccagcaagttcatggagttctaccaggatgtgaaggactggtggctgtttggcttctacttctgcatgcccctggtgtgcacagccatcttctacaccctgatgacctgtgagatgctgaacagaagaaatggcagcctgcgcatcgccctgtctgagcacctgaagcagaggcgggaggtggccaagacagtgttctgcctggtggtgatctttgccctgtgctggttccccctgcacctgagccgcatcctgaagaagacagtgtacaatgagatggacaagaacagatgtgagctgctgtccttcctgctgctgatggactacatcggcatcaacctggccaccatgaacagctgcatcaaccccatcgccctgtactttgtgtccaagaagttcaagaactgcttccagagctgcctgtgctgctgctgctaccagagcaagagcctgatgacctctgtgcccatgaatggcaccagcatccagtggaagaaccacgaccagaacaaccacaacacagacaggagcagccacaaggacagcatgaactag

SEQ ID NO: 151177 - DNA, 486 bp, synthetic construct
  misc_feature 1..486: note = Description of Artificial Sequence: Synthetic coding sequence
  source 1..486: mol_type = other DNA
atggagaccctgtgcctgcgggccagcttctggctggccctggtgggctgtgtgatcagtgacaaccctgagcgctacagcaccaacctgagcaaccacgtggatgacttcaccaccttccggggcacagagctgtccttcctggtgaccacccaccagcccaccaacctggtgctgcccagcaatggctccatgcacaactactgcccccagcagaccaagatcaccagcgccttcaagtacatcaacacagtcatcagctgcaccatcttcatcgtgggcatggtgggcaatgccaccctgctgcgcatcatctaccagaacaagtgcatgagaaatggccccaatgccctgattgccagcctggccctgggggacctgatctacgtggtgattgacctgcccatcaacgtgttcaaggtgcagagcagctgcctgctggagagctgcagcggcaactgggacagctttggaaactgccactag

SEQ ID NO: 151178 - DNA, 957 bp, synthetic construct
  misc_feature 1..957: note = Description of Artificial Sequence: Synthetic coding sequence
  source 1..957: mol_type = other DNA
atggagaccctgtgcctgcgggccagcttctggctggccctggtgggctgtgtgatcagtgacaaccctgagcgctacagcaccaacctgagcaaccacgtggatgacttcaccaccttccggggcacagagctgtccttcctggtgaccacccaccagcccaccaacctggtgctgcccagcaatggctccatgcacaactactgcccccagcagaccaagatcaccagcgccttcaagtacatcaacacagtcatcagctgcaccatcttcatcgtgggcatggtgggcaatgccaccctgctgcgcatcatctaccagaacaagtgcatgagaaatggccccaatgccctgattgccagcctggccctgggggacctgatctacgtggtgattgacctgcccatcaacgtgttcaagttctaccaggatgtgaaggactggtggctgtttggcttctacttctgcatgcccctggtgtgcacagccatcttctacaccctgatgacctgtgagatgctgaacagaagaaatggcagcctgagaattgccctgtctgagcacctgaagcagaggcgggaggtggccaagacagtgttctgcctggtggtgatctttgccctgtgctggttccccctgcacctgagccgcatcctgaagaagacagtgtacaatgagatggacaagaacagatgtgagctgctgtccttcctgctgctgatggactacatcggcatcaacctggccaccatgaacagctgcatcaaccccatcgccctgtactttgtgtccaagaagttcaagaactgcttccagagctgcctgtgctgctgctgctaccagagcaagagcctgatgacctctgtgcccatgaatggcaccagcatccagtggaagaaccacgaccagaacaaccacaacacagacaggagcagccacaaggacagcatgaactag

SEQ ID NO: 151179 - DNA, 564 bp, synthetic construct
  misc_feature 1..564: note = Description of Artificial Sequence: Synthetic coding sequence
  source 1..564: mol_type = other DNA
atggagaccctgtgcctgcgggccagcttctggctggccctggtgggctgtgtgatcagtgacaaccctgagcgctacagcaccaacctgagcaaccacgtggatgacttcaccaccttccggggcacagagctgtccttcctggtgaccacccaccagcccaccaacctggtgctgcccagcaatggctccatgcacaactactgcccccagcagaccaagatcaccagcgccttcaagtacatcaacacagtcatcagctgcaccatcttcatcgtgggcatggtgggcaatgccaccctgctgcgcatcatctaccagaacaagtgcatgagaaatggccccaatgccctgattgccagcctggccctgggggacctgatctacgtggtgattgacctgcccatcaacgtgttcaagctgctggccggccgctggccctttgaccacaatgactttggagtcttcctgtgcaagctgttccccttcctgcagaagagctctgtgggcatcaccgtgctgaacctgtgtgccctgtctgtggacaggaagacagagatgtag

SEQ ID NO: 151180 - DNA, 957 bp, synthetic construct; identical to SEQ ID NO: 151178
  misc_feature 1..957: note = Description of Artificial Sequence: Synthetic coding sequence
  source 1..957: mol_type = other DNA

SEQ ID NO: 151181 - DNA, 1179 bp, synthetic construct
  misc_feature 1..1179: note = Description of Artificial Sequence: Synthetic coding sequence
  source 1..1179: mol_type = other DNA
atggaggagcagcagcctgagcccaagagccagagggacagcgccctgggcgctgctgctgctgccacccctgggggcctgagcctgagcctgagccctggggccagcggcagcagcggcagcggcagtgatggagacagcgtgcctgtgagcccccagcctgccccacccagccccccagctgccccctgcctgccccccctggcccaccacccccacctgcccccccaccccccacctcctccaccccagcacctggccgccccagcccaccagccccagcctgctgcccagctgcacaggaccaccaacttcttcatcgacaacatcctgcggccagactttggctgcaagaaggagcagcccccaccccagctgctggtggccgctgctgcccggggcggggccggcggcggcggccgggtggagcgggaccggggccagacagctgctggccgggaccctgtgcaccccctgggcacccgggcccctggggccgccagcctgctgtgtgccccagatgccaactgtggccccccagatggcagccagcctgctgctgctggggccggggccagcaaggccggcaacccagctgctgctgctgctgctgctgctgctgctgtggccgctgctgctgctgctgctgctgccaagcccagcgacacaggaggcggcggcagcggcggcggggccggcagccctggggcccagggcaccaagtacccagagcacggcaacccagccatcctgctgatgggcagcgccaatggaggccctgtggtgaagacagacagccagcagcccctggtgtggccagcctgggtgtactgcacccgctacagcgaccggcccagcagcggccccaggaccaggaagctgaagaagaagaagaatgagaaggaggacaagaggcccaggacagccttcaccgctgagcagctgcagaggctgaaggccgagttccaggccaaccgctacatcacagagcagaggcggcagaccctggcccaggagctgagcctgaatgaaagccagatcaagatctggttccagaacaagagggccaagatcaagaaggccaccggcatcaagaatggcctggccctgcacctgatggcccagggcctgtacaaccacagcaccaccaccgtgcaggacaaggatgaaagtgaatag

SEQ ID NO: 151182 - DNA, 1002 bp, synthetic construct
  misc_feature 1..1002: note = Description of Artificial Sequence: Synthetic coding sequence
  source 1..1002: mol_type = other DNA
atggaggagaatgaccccaagccaggagaggccgctgctgctgtggagggccagaggcagcctgagagcagccctgggggcggcagcggcggcggcggcggcagcagccctggagaggccgacaccggcagaagaagagccctgatgctgcctgctgtgctgcaggcccctggcaaccaccagcacccccaccgcatcaccaacttcttcatcgacaacatcctgcggcctgagtttggaagaaggaaggatgctggcacctgctgtgccggggccggcggcggccggggcggcggggccggcggggagggcggggccagcggggctgagggcggcggcggggccggcggcagcgagcagctgctgggcagcggcagccgggagccccggcagaaccccccctgtgcccctggagctgggggccccctgcctgctgctggcagtgacagccctggagatggagagggcggcagcaagaccctgagcctgcacggcggggccaagaagggcggggaccccggcggccccctggatggcagcctgaaggcccggggcctgggcggcggggacctgtctgtgtccagtgacagcgacagcagccaggccggggccaacctgggcgcccagcccatgctgtggccagcctgggtgtactgcacccgctacagcgaccggcccagcagcggccccaggagcaggaagcccaagaagaagaaccccaacaaggaggacaagaggcccaggacagccttcaccgctgagcagctgcagaggctgaaggccgagttccagaccaaccgctacctgacagagcagaggcggcagagcctggcccaggagctgagcctgaatgaaagccagatcaagatctggttccagaacaagagggccaagatcaagaaggccactggaaacaagaacaccctggccgtgcacctgatggcccagggcctgtacaaccacagcaccacagccaaggagggcaagagtgacagcgagtag

SEQ ID NO: 151183 - DNA, 2184 bp, synthetic construct
  misc_feature 1..2184: note = Description of Artificial Sequence: Synthetic coding sequence
  source 1..2184: mol_type = other DNA
atgcctcctcctgctgacatcgtgaaggtggccatcgagtggccaggggcctaccccaagctgatggagattgaccagaagaagcccctgagcgccatcatcaaggaggtgtgtgatggctggagcctggccaaccacgagtactttgccctgcagcacgccgacagcagcaacttctacatcacagagaagaacagaaatgagatcaagaatggcaccatcctgcggctgaccaccagccctgcccagaatgcccagcagctgcacgagcgcatccagagcagctccatggatgccaagctggaggccctgaaggacctggccagcctgagcagagatgtgacctttgcccaggagttcatcaacctggatggcatcagcctgctgacccagatggtggagagcggcacagagcgctaccagaagctgcagaagatcatgaagccctgctttggagacatgctgtccttcaccctgacagcctttgtggagctgatggaccacggcatcgtgtcctgggacaccttctctgtggccttcatcaagaagatcgccagctttgtgaacaagagcgccatcgacatcagcatcctgcagaggagcctggccatcctggagagcatggtgctgaacagccatgacctgtaccagaaggtggcccaggagatcaccatcggccagctgatcccccacctgcagggcagtgaccaggagatccagacctacaccatcgctgtgatcaatgccctcttcctgaaggccccagatgagcggcggcaggagatggccaacatcctggcccagaagcagctgcggagcatcatcctgacccacgtgatccgggcccagagggccatcaacaatgagatggcccaccagctgtatgtgctgcaggtgctgaccttcaacctgctggaggacaggatgatgaccaagatggacccccaggaccaggcccagagggacatcatctttgagctgcggcgcatcgcctttgatgctgagagcgagcccaacaacagcagcggctccatggagaagaggaagtccatgtacacccgggactacaagaagctgggcttcatcaaccacgtgaacccagccatggacttcacccagaccccacctggcatgctggccctggacaacatgctgtactttgccaagcaccaccaggatgcctacatccgcatcgtgctggagaacagcagccgggaggacaagcatgagtgccccttcggccgcagcagcattgagctgaccaagatgctgtgtgagatcctgaaggtgggggagctgcccagcgagacctgcaatgacttccaccccatgttcttcacccatgacaggagctttgaggagttcttctgcatctgcatccagctgctgaacaagacctggaaggagatgagggccaccagcgaggacttcaacaaggtgatgcaggtggtgaaggagcaggtgatgagggccctgaccaccaagcccagcagcctggaccagttcaagagcaagctgcagaacctgagctacacagagatcctgaagatccggcagagcgagaggatgaaccaggaggacttccagagccggcccatcctggagctgaaggagaagatccagcctgagatcctggagctgatcaagcagcagaggctgaaccggctggtggagggcacctgcttcaggaagctgaatgcccggcggcggcaggacaagttctggtactgccgcctgagccccaaccacaaggtgctgcactacggggacctggaggagagcccccagggcgaggtgccccatgacagcctgcaggacaagctgcctgtggccgacatcaaggctgtggtgacaggcaaggactgcccccacatgaaggagaagggggccctgaagcagaacaaggaggtgctggagctggccttcagcatcctgtatgacagcaactgccagctgaacttcatcgccccagacaagcatgagtactgcatctggacagatggcctgaatgccctgctgggcaaggacatgatgtctgacctgaccagaaatgacctggacaccctgctgtccatggagatcaagctgcggctgctggacctggagaacatccagatcccagatgcccccccacccatccccaaggagcccagcaactatgactttgtgtatgactgcaactag

SEQ ID NO: 151184 - DNA, 1290 bp, synthetic construct
  misc_feature 1..1290: note = Description of Artificial Sequence: Synthetic coding sequence
  source 1..1290: mol_type = other DNA
atgtctgagcaccagaaggagcagaccctggacacccccagcctgaggacagtgaccctgactgtgcgggtgcacggcttcatcctggaggtgtccaagaccaagaacccccccatcccagacaccttctggcccccacgctgggaccaccggcccagccctggaggagagaccaatgcctactgccagatgaaccacgtgaacccagccatggacttcacccagaccccacctggcatgctggccctggacaacatgctgtactttgccaagcaccaccaggatgcctacatccgcatcgtgctggagaacagcagccgggaggacaagcatgagtgccccttcggccgcagcagcattgagctgaccaagatgctgtgtgagatcctgaaggtgggggagctgcccagcgagacctgcaatgacttccaccccatgttcttcacccatgacaggagctttgaggagttcttctgcatctgcatccagctgctgaacaagacctggaaggagatgagggccaccagcgaggacttcaacaaggtgatgcaggtggtgaaggagcaggtgatgagggccctgaccaccaagcccagcagcctggaccagttcaagagcaagctgcagaacctgagctacacagagatcctgaagatccggcagagcgagaggatgaaccaggaggacttccagagccggcccatcctggagctgaaggagaagatccagcctgagatcctggagctgatcaagcagcagaggctgaaccggctggtggagggcacctgcttcaggaagctgaatgcccggcggcggcaggacaagttctggtactgccgcctgagccccaaccacaaggtgctgcactacggggacctggaggagagcccccagggcgaggtgccccatgacagcctgcaggacaagctgcctgtggccgacatcaaggctgtggtgacaggcaaggactgcccccacatgaaggagaagggggccctgaagcagaacaaggaggtgctggagctggccttcagcatcctgtatgacagcaactgccagctgaacttcatcgccccagacaagcatgagtactgcatctggacagatggcctgaatgccctgctgggcaaggacatgatgtctgacctgaccagaaatgacctggacaccctgctgtccatggagatcaagctgcggctgctggacctggagaacatccagatcccagatgcccccccacccatccccaaggagcccagcaactatgactttgtgtatgactgcaactag

SEQ ID NO: 151185 - DNA, 1896 bp, synthetic construct
  misc_feature 1..1896: note = Description of Artificial Sequence: Synthetic coding sequence
  source 1..1896: mol_type = other DNA
atggatgccaagctggaggccctgaaggacctggccagcctgagcagagatgtgacctttgcccaggagttcatcaacctggatggcatcagcctgctgacccagatggtggagagcggcacagagcgctaccagaagctgcagaagatcatgaagccctgctttggagacatgctgtccttcaccctgacagcctttgtggagctgatggaccacggcatcgtgtcctgggacaccttctctgtggccttcatcaagaagatcgccagctttgtgaacaagagcgccatcgacatcagcatcctgcagaggagcctggccatcctggagagcatggtgctgaacagccatgacctgtaccagaaggtggcccaggagatcaccatcggccagctgatcccccacctgcagggcagtgaccaggagatccagacctacaccatcgctgtgatcaatgccctcttcctgaaggccccagatgagcggcggcaggagatggccaacatcctggcccagaagcagctgcggagcatcatcctgacccacgtgatccgggcccagagggccatcaacaatgagatggcccaccagctgtatgtgctgcaggtgctgaccttcaacctgctggaggacaggatgatgaccaagatggacccccaggaccaggcccagagggacatcatctttgagctgcggcgcatcgcctttgatgctgagagcgagcccaacaacagcagcggctccatggagaagaggaagtccatgtacacccgggactacaagaagctgggcttcatcaaccacgtgaacccagccatggacttcacccagaccccacctggcatgctggccctggacaacatgctgtactttgccaagcaccaccaggatgcctacatccgcatcgtgctggagaacagcagccgggaggacaagcatgagtgccccttcggccgcagcagcattgagctgaccaagatgctgtgtgagatcctgaaggtgggggagctgcccagcgagacctgcaatgacttccaccccatgttcttcacccatgacaggagctttgaggagttcttctgcatctgcatccagctgctgaacaagacctggaaggagatgagggccaccagcgaggacttcaacaaggtgatgcaggtggtgaaggagcaggtgatgagggccctgaccaccaagcccagcagcctggaccagttcaagagcaagctgcagaacctgagctacacagagatcctgaagatccggcagagcgagaggatgaaccaggaggacttccagagccggcccatcctggagctgaaggagaagatccagcctgagatcctggagctgatcaagcagcagaggctgaaccggctggtggagggcacctgcttcaggaagctgaatgcccggcggcggcaggacaagttctggtactgccgcctgagccccaaccacaaggtgctgcactacggggacctggaggagagcccccagggcgaggtgccccatgacagcctgcaggacaagctgcctgtggccgacatcaaggctgtggtgacaggcaaggactgcccccacatgaaggagaagggggccctgaagcagaacaaggaggtgctggagctggccttcagcatcctgtatgacagcaactgccagctgaacttcatcgccccagacaagcatgagtactgcatctggacagatggcctgaatgccctgctgggcaaggacatgatgtctgacctgaccagaaatgacctggacaccctgctgtccatggagatcaagctgcggctgctggacctggagaacatccagatcccagatgcccccccacccatccccaaggagcccagcaactatgactttgtgtatgactgcaactag

SEQ ID NO: 151186 - DNA, 744 bp, synthetic construct
  misc_feature 1..744: note = Description of Artificial Sequence: Synthetic coding sequence
  source 1..744: mol_type = other DNA
atgcaggtggtgaaggagcaggtgatgagggccctgaccaccaagcccagcagcctggaccagttcaagagcaagctgcagaacctgagctacacagagatcctgaagatccggcagagcgagaggatgaaccaggaggacttccagagccggcccatcctggagctgaaggagaagatccagcctgagatcctggagctgatcaagcagcagaggctgaaccggctggtggagggcacctgcttcaggaagctgaatgcccggcggcggcaggacaagttctggtactgccgcctgagccccaaccacaaggtgctgcactacggggacctggaggagagcccccagggcgaggtgccccatgacagcctgcaggacaagctgcctgtggccgacatcaaggctgtggtgacaggcaaggactgcccccacatgaaggagaagggggccctgaagcagaacaaggaggtgctggagctggccttcagcatcctgtatgacagcaactgccagctgaacttcatcgccccagacaagcatgagtactgcatctggacagatggcctgaatgccctgctgggcaaggacatgatgtctgacctgaccagaaatgacctggacaccctgctgtccatggagatcaagctgcggctgctggacctggagaacatccagatcccagatgcccccccacccatccccaaggagcccagcaactatgactttgtgtatgactgcaactag

SEQ ID NO: 151187 - DNA, 744 bp, synthetic construct; identical to SEQ ID NO: 151186
  misc_feature 1..744: note = Description of Artificial Sequence: Synthetic coding sequence
  source 1..744: mol_type = other DNA

SEQ ID NO: 151188 - DNA, 2184 bp, synthetic construct; identical to SEQ ID NO: 151183
  misc_feature 1..2184: note = Description of Artificial Sequence: Synthetic coding sequence
  source 1..2184: mol_type = other DNA

SEQ ID NO: 151189 - DNA, 180 bp, synthetic construct
  misc_feature 1..180: note = Description of Artificial Sequence: Synthetic coding sequence
  source 1..180: mol_type = other DNA
atgcctcctcctgctgacatcgtgaaggtggccatcgagtggccaggggcctaccccaagctgatggagattgaccagaagaagcccctgagcgccatcatcaaggaggtgtgtgatggctggagcctggccaaccacgagtactttgccctgcagcacgccgacagcagcaacttctag

SEQ ID NO: 151190 - DNA, 2184 bp, synthetic construct; identical to SEQ ID NO: 151183
  misc_feature 1..2184: note = Description of Artificial Sequence: Synthetic coding sequence
  source 1..2184: mol_type = other DNA

SEQ ID NO: 151191 - DNA, 246 bp, synthetic construct
  misc_feature 1..246: note = Description of Artificial Sequence: Synthetic coding sequence
  source 1..246: mol_type = other DNA
atgcctcctcctgctgacatcgtgaaggtggccatcgagtggccaggggcctaccccaagctgatggagattgaccagaagaagcccctgagcgccatcatcaaggaggtgtgtgatggctggagcctggccaaccacgagtactttgccctgcagcacgccgacagcagcaacttctacatcacagagaagaacagaaatgagatcaagaatggcaccatcctgcggctgaccaccagcccctag

SEQ ID NO: 151192 - DNA, 450 bp, synthetic construct
  misc_feature 1..450: note = Description of Artificial Sequence: Synthetic coding sequence
  source 1..450: mol_type = other DNA
atgcctcctcctgctgacatcgtgaaggtggccatcgagtggccaggggcctaccccaagctgatggagattgaccagaagaagcccctgagcgccatcatcaaggaggtgtgtgatggctggagcctggccaaccacgagtactttgccctgcagcacgccgacagcagcaacttctacatcacagagaagaacagaaatgagatcaagaatggcaccatcctgcggctgaccaccagccctgcccagaatgcccagcagctgcacgagcgcatccagagcagctccatggatgccaagctggaggccctgaaggacctggccagcctgagcagagatgtgacctttgcccaggagttcatcaacctggatggcatcagcctgctgacccagatggtggagagcggcacagagcgctaccagaagctgcagaagatcatgaagccctag

SEQ ID NO: 151193 - DNA, 2163 bp, synthetic construct
  misc_feature 1..2163: note = Description of Artificial Sequence: Synthetic coding sequence
  source 1..2163: mol_type = other DNA
atgcctcctccaagtgacatcgtgaaggtggccatcgagtggccaggggccaatgcccagctgctggagattgaccagaagaggcccctggccagcatcatcaaggaggtgtgtgatggctggagcctgcccaaccctgagtactacaccctgcgctatgcagatggcccccagctgtacatcacagagcagaccaggagtgacatcaagaatggcaccatcctgcagctggccatcagccccagccgggccgcccggcagctgatggagaggacccagagcagcaacatggagacccggctggatgccatgaaggagctggccaagctgtctgcagatgtgacctttgccacagagttcatcaacatggatggcatcatcgtgctgacccggctggtggagagcggcaccaagctgctgagccactacagcgagatgctggccttcaccctgacagccttcctggagctgatggaccacggcatcgtgtcctgggacatggtgtccatcaccttcatcaagcagattgctggctacgtgtcccagcccatggtggatgtgtccatcctgcagaggagcctggccatcctggagagcatggtgctgaacagccagagcctgtaccagaagattgctgaggagatcaccgtgggccagctgatcagccacctgcaggtgagcaaccaggagatccagacctacgccatcgccctgatcaatgccctcttcctgaaggcccctgaggacaagaggcaggacatggccaatgcctttgcccagaagcacctgcggagcatcatcctgaaccacgtgatccggggcaaccggcccatcaagacagagatggcccaccagctgtatgtgctgcaggtgctgaccttcaacctgctggaggagaggatgatgaccaagatggaccccaatgaccaggcccagagggacatcatctttgagctgcggcgcatcgcctttgatgctgagagtgaccccagcaatgcccctggcagcggcacagagaagaggaaggccatgtacaccaaggactacaagatgctgggcttcaccaaccacatcaacccagccatggacttcacccagaccccacctggcatgctggccctggacaacatgctgtacctggccaaggtgcaccaggacacctacatcagaattgtgctggagaacagcagccgggaggacaagcatgaatgtcccttcggccgcagcgccatcgagctgaccaagatgctgtgtgagatcctgcaggtgggggagctgcccaatgaaggaagaaatgactaccaccccatgttcttcacccatgaccgggcctttgaggagctgtttggcatctgcatccagctgctgaacaagacctggaaggagatgagggccacagctgaggacttcaacaaggtgatgcaggtggtgcgggagcagatcacccgggccctgcccagcaagcccaacagcctggaccagttcaagagcaagctgcggagcctgagctacagcgagatcctgcggctgcggcagagcgagaggatgagccaggatgacttccagagcccccccatcgtggagctgcgggagaagatccagcctgagatcctggagctgatcaagcagcagaggctgaaccggctgtgtgagggcagcagcttcaggaagattggcaacagaagacggcaggagcgcttctggtactgccgcctggccctgaaccacaaggtgctgcactatggagacctggatgacaacccccagggcgaggtgacctttgagagcctgcaggagaagatccctgtggccgacatcaaggccatcgtgacaggcaaggactgcccccacatgaaggagaagagcgccctgaagcagaacaaggaggtgctggagctggccttcagcatcctgtatgaccctgatgagaccctgaacttcatcgcccccaacaagtatgagtactgcatctggattgatggcctgagcgccctgctgggcaaggacatgagcagcgagctgaccaagagtgacctggacaccctgctgtccatggagatgaagctgcggctgctggacctggagaacatccagatccctgaggcccccccacccatccccaaggagcccagcagctatgactttgtgtaccactatggatag

SEQ ID NO: 151194 - DNA, 2157 bp, synthetic construct
  misc_feature 1..2157: note = Description of Artificial Sequence: Synthetic coding sequence
  source 1..2157: mol_type = other DNA
atgcctcctccaagtgacatcgtgaaggtggccatcgagtggccaggggccaatgcccagctgctggagattgaccagaagaggcccctggccagcatcatcaaggaggtgtgtgatggctggagcctgcccaaccctgagtactacaccctgcgctatgcagatggcccccagctgtacatcacagagcagaccaggagtgacatcaagaatggcaccatcctgcagctggccatcagccccagccgggccgcccggcagctgatggagaggacccagagcagcaacatggagacccggctggatgccatgaaggagctggccaagctgtctgcagatgtgacctttgccacagagttcatcaacatggatggcatcatcgtgctgacccggctggtggagagcggcaccaagctgctgagccatgagatgctggccttcaccctgacagccttcctggagctgatggaccacggcatcgtgtcctgggacatggtgtccatcaccttcatcaagcagattgctggctacgtgtcccagcccatggtggatgtgtccatcctgcagaggagcctggccatcctggagagcatggtgctgaacagccagagcctgtaccagaagattgctgaggagatcaccgtgggccagctgatcagccacctgcaggtgagcaaccaggagatccagacctacgccatcgccctgatcaatgccctcttcctgaaggcccctgaggacaagaggcaggacatggccaatgcctttgcccagaagcacctgcggagcatcatcctgaaccacgtgatccggggcaaccggcccatcaagacagagatggcccaccagctgtatgtgctgcaggtgctgaccttcaacctgctggaggagaggatgatgaccaagatggaccccaatgaccaggcccagagggacatcatctttgagctgcggcgcatcgcctttgatgctgagagtgaccccagcaatgcccctggcagcggcacagagaagaggaaggccatgtacaccaaggactacaagatgctgggcttcaccaaccacatcaacccagccatggacttcacccagaccccacctggcatgctggccctggacaacatgctgtacctggccaaggtgcaccaggacacctacatcagaattgtgctggagaacagcagccgggaggacaagcatgaatgtcccttcggccgcagcgccatcgagctgaccaagatgctgtgtgagatcctgcaggtgggggagctgcccaatgaaggaagaaatgactaccaccccatgttcttcacccatgaccgggcctttgaggagctgtttggcatctgcatccagctgctgaacaagacctggaaggagatgagggccacagctgaggacttcaacaaggtgatgcaggtggtgcgggagcagatcacccgggccctgcccagcaagcccaacagcctggaccagttcaagagcaagctgcggagcctgagctacagcgagatcctgcggctgcggcagagcgagaggatgagccaggatgacttccagagcccccccatcgtggagctgcgggagaagatccagcctgagatcctggagctgatcaagcagcagaggctgaaccggctgtgtgagggcagcagcttcaggaagattggcaacagaagacggcaggagcgcttctggtactgccgcctggccctgaaccacaaggtgctgcactatggagacctggatgacaacccccagggcgaggtgacctttgagagcctgcaggagaagatccctgtggccgacatcaaggccatcgtgacaggcaaggactgcccccacatgaaggagaagagcgccctgaagcagaacaaggaggtgctggagctggccttcagcatcctgtatgaccctgatgagaccctgaacttcatcgcccccaacaagtatgagtactgcatctggattgatggcctgagcgccctgctgggcaaggacatgagcagcgagctgaccaagagtgacctggacaccctgctgtccatggagatgaagctgcggctgctggacctggagaacatccagatccctgaggcccccccacccatccccaaggagcccagcagctatgactttgtgtaccactatggatag

SEQ ID NO: 151195 - DNA, 1899 bp, synthetic construct
  misc_feature 1..1899: note = Description of Artificial Sequence: Synthetic coding sequence
  source 1..1899: mol_type = other DNA
atggagaggacccagagcagcaacatggagacccggctggatgccatgaaggagctggccaagctgtctgcagatgtgacctttgccacagagttcatcaacatggatggcatcatcgtgctgacccggctggtggagagcggcaccaagctgctgagccactacagcgagatgctggccttcaccctgacagccttcctggagctgatggaccacggcatcgtgtcctgggacatggtgtccatcaccttcatcaagcagattgctggctacgtgtcccagcccatggtggatgtgtccatcctgcagaggagcctggccatcctggagagcatggtgctgaacagccagagcctgtaccagaagattgctgaggagatcaccgtgggccagctgatcagccacctgcaggtgagcaaccaggagatccagacctacgccatcgccctgatcaatgccctcttcctgaaggcccctgaggacaagaggcaggacatggccaatgcctttgcccagaagcacctgcggagcatcatcctgaaccacgtgatccggggcaaccggcccatcaagacagagatggcccaccagctgtatgtgctgcaggtgctgaccttcaacctgctggaggagaggatgatgaccaagatggaccccaatgaccaggcccagagggacatcatctttgagctgcggcgcatcgcctttgatgctgagagtgaccccagcaatgcccctggcagcggcacagagaagaggaaggccatgtacaccaaggactacaagatgctgggcttcaccaaccacatcaacccagccatggacttcacccagaccccacctggcatgctggccctggacaacatgctgtacctggccaaggtgcaccaggacacctacatcagaattgtgctggagaacagcagccgggaggacaagcatgaatgtcccttcggccgcagcgccatcgagctgaccaagatgctgtgtgagatcctgcaggtgggggagctgcccaatgaaggaagaaatgactaccaccccatgttcttcacccatgaccgggcctttgaggagctgtttggcatctgcatccagctgctgaacaagacctggaaggagatgagggccacagctgaggacttcaacaaggtgatgcaggtggtgcgggagcagatcacccgggccctgcccagcaagcccaacagcctggaccagttcaagagcaagctgcggagcctgagctacagcgagatcctgcggctgcggcagagcgagaggatgagccaggatgacttccagagcccccccatcgtggagctgcgggagaagatccagcctgagatcctggagctgatcaagcagcagaggctgaaccggctgtgtgagggcagcagcttcaggaagattggcaacagaagacggcaggagcgcttctggtactgccgcctggccctgaaccacaaggtgctgcactatggagacctggatgacaacccccagggcgaggtgacctttgagagcctgcaggagaagatccctgtggccgacatcaaggccatcgtgacaggcaaggactgcccccacatgaaggagaagagcgccctgaagcagaacaaggaggtgctggagctggccttcagcatcctgtatgaccctgatgagaccctgaacttcatcgcccccaacaagtatgagtactgcatctggattgatggcctgagcgccctgctgggcaaggacatgagcagcgagctgaccaagagtgacctggacaccctgctgtccatggagatgaagctgcggctgctggacctggagaacatccagatccctgaggcccccccacccatccccaaggagcccagcagctatgactttgtgtaccactatggatag

SEQ ID NO: 151196 - DNA, 2163 bp, synthetic construct; identical to SEQ ID NO: 151193
  misc_feature 1..2163: note = Description of Artificial Sequence: Synthetic coding sequence
  source 1..2163: mol_type = other DNA

SEQ ID NO: 151197 - DNA, 804 bp, synthetic construct
  misc_feature 1..804: note = Description of Artificial Sequence: Synthetic coding sequence
  source 1..804: mol_type = other DNA
gaggagatcaccgtgggccagctgatcagccacctgcaggtgagcaaccaggagatccagacctacgccatcgccctgatcaatgccctcttcctgaaggcccctgaggacaagaggcaggacatggccaatgcctttgcccagaagcacctgcggagcatcatcctgaaccacgtgatccggggcaaccggcccatcaagacagagatggcccaccagctgtatgtgctgcaggtgctgaccttcaacctgctggaggagaggatgatgaccaagatggaccccaatgaccaggcccagagggacatcatctttgagctgcggcgcatcgcctttgatgctgagagtgaccccagcaatgcccctggcagcggcacagagaagaggaaggccatgtacaccaaggactacaagatgctgggcttcaccaaccacatcaacccagccatggacttcacccagaccccacctggcatgctggccctggacaacatgctgtacctggccaaggtgcaccaggacacctacatcagaattgtgctggagaacagcagccgggaggacaagcatgaatgtcccttcggccgcagcgccatcgagctgaccaagatgctgtgtgagatcctgcaggtgggggagctgcccaatgaaggaagaaatgactaccaccccatgttcttcacccatgaccgggcctttgaggagctgtttggcatctgcatccagctgctgaacaagacctggaaggagatgagggccacagctgaggacttcaacaaggtgtctgtgtctggcctgctgtag

SEQ ID NO: 151198 - DNA, 2199 bp, synthetic construct
  misc_feature 1..2199: note = Description of Artificial Sequence: Synthetic coding sequence
  source 1..2199: mol_type = other DNA
atgcctcctccaagtgacatcgtgaaggtggccatcgagtggccaggggccaatgcccagctgctggagattgaccagaagaggcccctggccagcatcatcaaggaggtgtgtgatggctggagcctgcccaaccctgagtactacaccctgcgctatgcagatggcccccagctgtacatcacagagcagaccaggagtgacatcaagaatggcaccatcctgcagctggccatcagccccagccgggccgcccggcagctgatggagaggacccagagcagcaacatggagacccggctggatgccatgaaggagctggccaagctgtctgcagatgtgacctttgccacagagttcatcaacatggatggcatcatcgtgctgacccggctggtggagagcggcaccaagctgctgagccactacagcgagatgctggccttcaccctgacagccttcctggagctgatggaccacggcatcgtgtcctgggacatggtgtccatcaccttcatcaagcagattgctggctacgtgtcccagcccatggtggatgtgtccatcctgcagaggagcctggccatcctggagagcatggtgctgaacagccagagcctgtaccagaagattgctgaggagatcaccgtgggccagctgatcagccacctgcaggtgagcaaccaggagatccagacctacgccatcgccctgatcaatgccctcttcctgaaggcccctgaggacaagaggcaggacaagcacctgaaccccctggacctgcctgtgacagacatggccaatgcctttgcccagaagcacctgcggagcatcatcctgaaccacgtgatccggggcaaccggcccatcaagacagagatggcccaccagctgtatgtgctgcaggtgctgaccttcaacctgctggaggagaggatgatgaccaagatggaccccaatgaccaggcccagagggacatcatctttgagctgcggcgcatcgcctttgatgctgagagtgaccccagcaatgcccctggcagcggcacagagaagaggaaggccatgtacaccaaggactacaagatgctgggcttcaccaaccacatcaacccagccatggacttcacccagaccccacctggcatgctggccctggacaacatgctgtacctggccaaggtgcaccaggacacctacatcagaattgtgctggagaacagcagccgggaggacaagcatgaatgtcccttcggccgcagcgccatcgagctgaccaagatgctgtgtgagatcctgcaggtgggggagctgcccaatgaaggaagaaatgactaccaccccatgttcttcacccatgaccgggcctttgaggagctgtttggcatctgcatccagctgctgaacaagacctggaaggagatgagggccacagctgaggacttcaacaaggtgatgcaggtggtgcgggagcagatcacccgggccctgcccagcaagcccaacagcctggaccagttcaagagcaagctgcggagcctgagctacagcgagatcctgcggctgcggcagagcgagaggatgagccaggatgacttccagagcccccccatcgtggagctgcgggagaagatccagcctgagatcctggagctgatcaagcagcagaggctgaaccggctgtgtgagggcagcagcttcaggaagattggcaacagaagacggcaggagcgcttctggtactgccgcctggccctgaaccacaaggtgctgcactatggagacctggatgacaacccccagggcgaggtgacctttgagagcctgcaggagaagatccctgtggccgacatcaaggccatcgtgacaggcaaggactgcccccacatgaaggagaagagcgccctgaagcagaacaaggaggtgctggagctggccttcagcatcctgtatgaccctgatgagaccctgaacttcatcgcccccaacaagtatgagtactgcatctggattgatggcctgagcgccctgctgggcaaggacatgagcagcgagctgaccaagagtgacctggacaccctgctgtccatggagatgaagctgcggctgctggacctggagaacatccagatccctgaggcccccccacccatccccaaggagcccagcagctatgactttgtgtaccactatggatag

SEQ ID NO: 151199 - DNA, 1614 bp, synthetic construct
  misc_feature 1..1614: note = Description of Artificial Sequence: Synthetic coding sequence
  source 1..1614: mol_type = other DNA
atggtggatgtgtccatcctgcagaggagcctggccatcctggagagcatggtgctgaacagccagagcctgtaccagaagattgctgaggagatcaccgtgggccagctgatcagccacctgcaggtgagcaaccaggagatccagacctacgccatcgccctgatcaatgccctcttcctgaaggcccctgaggacaagaggcaggacatggccaatgcctttgcccagaagcacctgcggagcatcatcctgaaccacgtgatccggggcaaccggcccatcaagacagagatggcccaccagctgtatgtgctgcaggtgctgaccttcaacctgctggaggagaggatgatgaccaagatggaccccaatgaccaggcccagagggacatcatctttgagctgcggagaattgcctttgatgctgagagtgaccccagcaatgcccctggcagcggcacagagaagaggaaggccatgtacaccaaggactacaagatgctgggcttcaccaaccacatcaacccagccatggacttcacccagaccccacctggcatgctggccctggacaacatgctgtacctggccaaggtgcaccaggacacctacatccgcatcgtgctggagaacagcagccgggaggacaagcatgagtgccccttcggccgcagcgccatcgagctgaccaagatgctgtgtgagatcctgcaggtgggggagctgcccaatgaaggaagaaatgactaccaccccatgttcttcacccatgaccgggcctttgaggagctgtttggcatctgcatccagctgctgaacaagacctggaaggagatgagggccacagctgaggacttcaacaaggtgatgcaggtggtgcgggagcagatcacccgggccctgcccagcaagcccaacagcctggaccagttcaagagcaagctgcggagcctgagctacagcgagatcctgcggctgcggcagagcgagaggatgagccaggatgacttccagagcccccccatcgtggagctgcgggagaagatccagcctgagatcctggagctgatcaagcagcagaggctgaaccggctgtgtgagggcagcagcttcaggaagattggcaacagaagacggcaggagcgcttctggtactgccgcctggccctgaaccacaaggtgctgcactacggggacctggatgacaacccccagggcgaggtgacctttgagagcctgcaggagaagatccctgtggccgacatcaaggccatcgtgacaggcaaggactgcccccacatgaaggagaagagcgccctgaagcagaacaaggaggtgctggagctggccttcagcatcctgtatgaccctgatgagaccctgaacttcatcgcccccaacaagtatgagtactgcatctggattgatggcctgagcgccctgctgggcaaggacatgagcagcgagctgaccaagagtgacctggacaccctgctgtccatggagatgaagctgcggctgctggacctggagaacatccagatccctgaggcccccccacccatccccaaggagcccagcagctatgactttgtgtaccactacggctag

SEQ ID NO: 151200 - DNA, 1017 bp, synthetic construct
  misc_feature 1..1017: note = Description of Artificial Sequence: Synthetic coding sequence
  source 1..1017: mol_type = other DNA
atgcctcctccaagtgacatcgtgaaggtggccatcgagtggccaggggccaatgcccagctgctggagattgaccagaagaggcccctggccagcatcatcaaggaggtgtgtgatggctggagcctgcccaaccctgagtactacaccctgcgctatgcagatggcccccagctgtacatcacagagcagaccaggagtgacatcaagaatggcaccatcctgcagctggccatcagccccagccgggccgcccggcagctgatggagaggacccagagcagcaacatggagacccggctggatgccatgaaggagctggccaagctgtctgcagatgtgacctttgccacagagttcatcaacatggatggcatcatcgtgctgacccggctggtggagagcggcaccaagctgctgagccactacagcgagatgctggccttcaccctgacagccttcctggagctgatggaccacggcatcgtgtcctgggacatggtgtccatcaccttcatcaagcagattgctggctacgtgtcccagcccatggtggatgtgtccatcctgcagaggagcctggccatcctggagagcatggtgctgaacagccagagcctgtaccagaagattgctgaggagatcaccgtgggccagctgatcagccacctgcaggtgagcaaccaggagatccagacctacgccatcgccctgatcaatgccctcttcctgaaggcccctgaggacaagaggcaggacatggccaatgcctttgcccagaagcacctgcggagcatcatcctgaaccacgtgatccggggcaaccggcccatcaagacagagatggcccaccagctgtatgtgctgcaggtgctgaccttcaacctgctggaggagaggatgatgaccaagatggaccccaatgaccaggcccagagggacatcatctttgagctgcggcgcatcgcctttgatgctgagagtgaccccagcaatgcccctggcagcggcacctag

SEQ ID NO: 151201 - DNA, 852 bp, synthetic construct
  misc_feature 1..852: note = Description of Artificial Sequence: Synthetic coding sequence
  source 1..852: mol_type = other DNA
taccaccccatgttcttcacccatgaccgggcctttgaggagctgtttggcatctgcatccagctgctgaacaagacctggaaggagatgagggccacagctgaggacttcaacaaggtgatgcaggtggtgcgggagcagatcacccgggccctgcccagcaagcccaacagcctggaccagttcaagagcaagctgcggagcctgagctacagcgagatcctgcggctgcggcagagcgagaggatgagccaggatgacttccagagcccccccatcgtggagctgcgggagaagatccagcctgagatcctggagctgatcaagcagcagaggctgaaccggctgtgtgagggcagcagcttcaggaagattggcaacagaagacggcaggagcgcttctggtactgccgcctggccctgaaccacaaggtgctgcactacggggacctggatgacaacccccagggcgaggtgacctttgagagcctgcaggagaagaacatcaaggccatcgtgacaggcaaggactgcccccacatgaaggagaagagcgccctgaagcagaacaaggaggtgctggagctggccttcagcatcctgtatgaccctgatgagaccctgaacttcatcgcccccaacaagtatgagtactgcatctggattgatggcctgagcgccctgctgggcaaggacatgagcagcgagctgaccaagagtgacctggacaccctgctgtccatggagatgaagctgcggctgctggacctggagaacatccagatccctgaggcccccccacccatccccaaggagcccagcagctatgactttgtgtaccactacggctag

SEQ ID NO: 151202 - DNA, 1359 bp, synthetic construct
  misc_feature 1..1359: note = Description of Artificial Sequence: Synthetic coding sequence
  source 1..1359: mol_type = other DNA
atgcacgtgatccggggcaaccggcccatcaagacagagatggcccaccagctgtatgtgctgcaggtgctgaccttcaacctgctggaggagaggatgatgaccaagatggaccccaatgaccaggcccagagggacatcatctttgagctgcggcgcatcgcctttgatgctgagagtgaccccagcaatgcccctggcagcggcacagagaagaggaaggccatgtacaccaaggactacaagatgctgggcttcaccaaccacatcaacccagccatggacttcacccagaccccacctggcatgctggccctggacaacatgctgtacctggccaaggtgcaccaggacacctacatcagaattgtgctggagaacagcagccgggaggacaagcatgaatgtcccttcggccgcagcgccatcgagctgaccaagatgctgtgtgagatcctgcaggtgggggagctgcccaatgaaggaagaaatgactaccaccccatgttcttcacccatgaccgggcctttgaggagctgtttggcatctgcatccagctgctgaacaagacctggaaggagatgagggccacagctgaggacttcaacaaggtgatgcaggtggtgcgggagcagatcacccgggccctgcccagcaagcccaacagcctggaccagttcaagagcaagctgcggagcctgagctacagcgagatcctgcggctgcggcagagcgagaggatgagccaggatgacttccagagcccccccatcgtggagctgcgggagaagatccagcctgagatcctggagctgatcaagcagcagaggctgaaccggctgtgtgagggcagcagcttcaggaagattggcaacagaagacggcaggagcgcttctggtactgccgcctggccctgaaccacaaggtgctgcactatggagacctggatgacaacccccagggcgaggtgacctttgagagcctgcaggagaagatccctgtggccgacatcaaggccatcgtgacaggcaaggactgcccccacatgaaggagaagagcgccctgaagcagaacaaggaggtgctggagctggccttcagcatcctgtatgaccctgatgagaccctgaacttcatcgcccccaacaagtatgagtactgcatctggattgatggcctgagcgccctgctgggcaaggacatgagcagcgagctgaccaagagtgacctggacaccctgctgtccatggagatgaagctgcggctgctggacctggagaacatccagatccctgaggcccccccacccatccccaaggagcccagcagctatgactttgtgtaccactatggatag

SEQ ID NO: 151203 - DNA, 2322 bp, synthetic construct
  misc_feature 1..2322: note = Description of Artificial Sequence: Synthetic coding sequence
  source 1..2322: mol_type = other DNA
atggcccggagcagcagcctgggccgggagtgtggcacccccaggagcggcctgggcaagggcggccccccccggccccagggcccccaggcccgctgcaccctgggccgccgctgcaccgtgtctgggaagtgccggcggccccggcccagctggaccatggcccccccaagaaatgtggtgaagatcgccatcaagatgagagatgccatcccccagctgatccagctggaccaggccaagcccctggccgctgtgctgaaggaggtgtgtgatgcctggagcctgacccacagcgagagatatgccctgcagtttgctgatggccaccggcgctacatcacagagaacaacagagctgagatcaagaatggcagcatcctgtgcctgagcacagccccagacctggaggccgagcagctgctgggcggcctgcagagcaacagccctgagggcagaagagaggccctgcggcggctggtgcccctggccagtgacatgatctttgcccgggaggtgatcagcagaaatggcctgcagatcctgggcaccatcattgaagatggagatgacctgggggaggtgctggccctgagcctgcgggccttcagcgagctgatggagcacggcgtggtgtcctgggagaccctgagcatcccctttgtgaggaaggtggtgtgctacgtgaacatgaacctgatggatgcctctgtgccccccctggccctgggcctgctggagagcgtgaccctgagcagccctgccctgggccagctggtgaagtctgaggtgcccctggaccggctgctggtgcacctgcaggtgatgaaccagcagctgcagaccaaggccatggccctgctgacagccctgctgcagggcgccagccctgtggagaggaagcacatgctggactacctgtggcagaggaacctgcggcagttcatctacaagaacatcatccacagcgctgcccccatgggagatgagatggcccaccacctgtatgtgctgcaggccctgatgctgggcctgctggagcccaggatgaggacccccctggacccctacagccaggagcagcgggagcagctgcaggtgctgcggcaggccgcctttgaggtggagggggagagcagcggggccggcctgtctgctgacagaagaagaagcctgtgtgcccgggagttcaggaagctgggcttcagcaacagcaacccagcccaggacctggagcgggtgcccccaggcctgctggccctggacaacatgctgtacttcagcagaaatgcccccagcgcctacagcagatttgtgctggagaacagcagccgggaggacaagcatgagtgcccctttgcccggggcagcatccagctgactgtgctgctgtgtgagctgctgcgggtgggggagccctgcagcgagacagcccaggacttcagccccatgttcttcggccaggaccagagcttccacgagctgttctgtgtgggcatccagctgctgaacaagacctggaaggagatgagggccacccaggaggactttgacaaggtgatgcaggtggtgcgggagcagctggcccggaccctggccctgaagcccaccagcctggagctgttccgcaccaaggtgaatgccctgacctatggagaggtgctgcggctgcggcagacagagcggctgcaccaggagggcaccctggccccacccatcctggagctgcgggagaagctgaagccagagctgatgggcctcatccggcagcagaggctgctgcggctgtgtgagggcaccctcttcaggaagatcagcagcagaagacggcaggacaagctgtggttctgctgcctgagccccaaccacaagctgctgcagtacggggacatggaggagggcgccagcccccccaccctggagagcctgcctgagcagctgcctgtggccgacatgagggccctgctgaccgggaaggactgcccccacgtgcgggagaagggcagcggcaagcagaacaaggacctgtatgagctggccttcagcatctcctatgacagaggagaggaggaggcctacctgaacttcatcgcccccagcaagcgggagttctacctgtggacagatggcctgagcgccctgctgggcagccccatgggcagcgagcagacccggctggacctggagcagctgctgaccatggagaccaagctgcggctgctggagctggagaatgtgcccatccctgagcggcccccacctgtgcccccaccacccaccaacttcaacttctgctatgactgcagcattgctgagccctag

SEQ ID NO: 151204 - DNA, 2511 bp, synthetic construct
  misc_feature 1..2511: note = Description of Artificial Sequence: Synthetic coding sequence
  source 1..2511: mol_type = other DNA
atgagcaagctgtccttccgggcccgggccctggatgccagcaagcccctgcccgtcttccgctgtgaggacctgcctgacctgcatgaatatgccagcatcaacagagctgtgccccagatgcccaccggcatggagaaggaggaggagagcgagcaccacctgcagagggccatcagcgcccagcaggtgtatggagagaagagggacaacatggtgattcctgtgcctgaggccgagagcaacatcgcctactatgagagcatctacccaggagagttcaagatgcccaagcagctgatccacatccagcccttcagcctggatgctgagcagcctgactatgacctggacagtgaagatgaggtgtttgtgaacaagctgaagaagaagatggacatctgccccctgcagtttgaggagatgattgaccggctggagaagggcagcggccagcagcctgtgtccctgcaggaggccaagctgctgctgaaggaggatgatgagctgatccgggaggtgtatgagtactggatcaagaagaggaagaactgccggggccccagcctcatccccagcgtgaagcaggagaagagagatggcagcagcaccaatgacccctacgtggccttcagaagaagaacagagaagatgcagaccaggaagaacaggaagaatgatgaggccagctatgagaagatgctgaagctgcggcgggacctgagcagagctgtgaccatcctggagatgatcaagagaagagagaagagcaagcgggagctgctgcacctgaccctggagatcatggagaagcgctacaacctgggggactacaatggagagatcatgtctgaggtgatggcccagaggcagcccatgaagcccacctacgccatccccatcatccccatcaccaacagcagccagttcaagcaccaggaggccatggatgtgaaggagttcaaggtgaacaagcaggacaaggctgacctgatccggcccaagaggaaatatgagaagaagcccaaggtgctgcccagcagcgctgctgccaccccccagcagaccagccctgctgccctgcccgtcttcaatgccaaggacctgaaccagtatgacttccccagcagtgatgaggagcccctgagccaggtgctgagcggcagcagcgaggccgaggaggacaatgaccctgatggcccctttgccttccggaggaaggccggctgccagtactatgccccccacctggaccagacaggcaactggccctggaccagccccaaggatggcggcctgggagatgtgcgctaccgctactgcctgaccaccctgactgtgccccagcgctgcatcggctttgccaggagaagagtgggccggggcggccgggtgctgctggaccgggcccacagcgactatgacagcgtcttccaccacctggacctggagatgctgagcagcccccagcacagccctgtgaaccagtttgccaacaccagcgagaccaacaccagtgacaagagcttcagcaaggacctgagccagatcctggtgaacatcaagagctgccgctggaggcacttccggcccaggacccccagcctgcatgacagcgacaatgatgagctgagctgcaggaagctgtaccgcagcatcaacagaactggaacagcccagcccggcacccagacctgcagcaccagcacccagagcaagagcagcagcggcagcgcccactttgccttcaccgctgagcagtaccagcagcaccagcagcagctggccctgatgcagaagcagcagctggcccagatccagcagcagcaggccaacagcaacagcagcaccaacaccagccagaacctggccagcaaccagcagaagagcggcttccggctgaacatccagggcctggagaggaccctgcagggctttgtgtccaagaccctggacagcgccagcgcccagtttgctgccagcgccctggtgaccagcgagcagctgatgggcttcaagatgaaggatgatgtggtgctgggcatcggcgtgaatggagtgctgcctgccagcggcgtgtacaagggcctgcacctgagcagcaccacccccacagccctggtgcacaccagccccagcacagctggcagcgccctgctgcagcccagcaacatcacccagaccagcagcagccacagcgccctgagccaccaggtgacagctgccaacagcgccaccacccaggtgctgattggcaacaacatccggctgactgtgcccagctctgtggccaccgtgaacagcatcgcccccatcaatgcccggcacatccccaggaccctgtctgctgtgcccagcagcgccctgaagctggccgccgccgccaactgccaggtgtccaaggtgcccagcagcagctctgtggacagcgtgccccgggagaaccacgagagcgagaagccagccctgaacaacattgctgacaacacagtggccatggaggtgacctag

SEQ ID NO: 151205 - DNA, 2442 bp, synthetic construct
  misc_feature 1..2442: note = Description of Artificial Sequence: Synthetic coding sequence
  source 1..2442: mol_type = other DNA
atgagcaagctgtccttccgggcccgggccctggatgccagcaagcccctgcccgtcttccgctgtgaggacctgcctgacctgcatgaatatgccagcatcaacagagctgtgccccagatgcccaccggcatggagaaggaggaggagagcgagcaccacctgcagagggccatcagcgcccagcaggtgtatggagagaagagggacaacatggtgattcctgtgcctgaggccgagagcaacatcgcctactatgagagcatctacccaggagagttcaagatgcccaagcagctgatccacatccagcccttcagcctggatgctgagcagcctgactatgacctggacagtgaagatgaggtgtttgtgaacaagctgaagaagaagatggacatctgccccctgcagtttgaggagatgattgaccggctggagaagggcagcggccagcagcctgtgtccctgcaggaggccaagctgctgctgaaggaggatgatgagctgatccgggaggtgtatgagtactggatcaagaagaggaagaactgccggggccccagcctcatccccagcgtgaagcaggagaagagagatggcagcagcaccaatgacccctacgtggccttcagaagaagaacagagaagatgcagaccaggaagaacaggaagaatgatgaggccagctatgagaagatgctgaagctgcggcgggacctgagcagagctgtgaccatcctggagatgatcaagagaagagagaagagcaagcgggagctgctgcacctgaccctggagatcatggagaagcgctacaacctgggggactacaatggagagatcatgtctgaggtgatggcccagaggcagcccatgaagcccacctacgccatccccatcatccccatcaccaacagcagccagttcaagcaccaggaggccatggatgtgaaggagttcaaggtgaacaagcaggacaaggctgacctgatccggcccaagaggaaatatgagaagaagcccaaggtgctgcccagcagcgctgctgccaccccccagcagaccagccctgctgccctgcccgtcttcaatgccaaggacctgaaccagtatgacttccccagcagtgatgaggagcccctgagccaggtgctgagcggcagcagcgaggccgaggaggacaatgaccctgatggcccctttgccttccggaggaaggccggctgccagtactatgccccccacctggaccagacaggcaactggccctggaccagccccaaggatggcggcctgggagatgtgcgctaccgctactgcctgaccaccctgactgtgccccagcgctgcatcggctttgccaggagaagagtgggccggggcggccgggtgctgctggaccgggcccacagcgactatgacagcgtcttccaccacctggacctggagatgctgagcagcccccagcacagccctgtgaaccagtttgccaacaccagcgagaccaacaccagtgacaagagcttcagcaaggacctgagccagatcctggtgaacatcaagagctgccgctggaggcacttccggcccaggacccccagcctgcatgacagcgacaatgatgagctgagctgcaggaagctgtaccgcagcatcaacagaactggaacagcccagcccggcacccagacctgcagcaccagcacccagagcaagagcagcagcggcagcgcccactttgccttcaccgctgagcagtaccagcagcaccagcagcagctggccctgatgcagaagcagcagctggcccagatccagcagcagcaggccaacagcaacagcagcaccaacaccagccagggctttgtgtccaagaccctggacagcgccagcgcccagtttgctgccagcgccctggtgaccagcgagcagctgatgggcttcaagatgaaggatgatgtggtgctgggcattggagtgaatggagtgctgcctgccagcggcgtgtacaagggcctgcacctgagcagcaccacccccacagccctggtgcacaccagccccagcacagctggcagcgccctgctgcagcccagcaacatcacccagaccagcagcagccacagcgccctgagccaccaggtgacagctgccaacagcgccaccacccaggtgctgattggcaacaacatccggctgactgtgcccagctctgtggccaccgtgaacagcatcgcccccatcaatgcccggcacatccccaggaccctgtctgctgtgcccagcagcgccctgaagctggccgctgctgccaactgccaggtgtccaaggtgcccagcagcagctctgtggacagcgtgcccagagaaaatcatgaaagtgagaagccagccctgaacaacattgctgacaacacagtggccatggaggtgacctag

SEQ ID NO: 151206 - DNA, 2292 bp, synthetic construct
  misc_feature 1..2292: note = Description of Artificial Sequence: Synthetic coding sequence
  source 1..2292: mol_type = other DNA
atggagcaccacctgcagagggccatcagcgcccagcaggtgtatggagagaagagggacaacatggtgattcctgtgcctgaggccgagagcaacatcgcctactatgagagcatctacccaggagagttcaagatgcccaagcagctgatccacatccagcccttcagcctggatgctgagcagcctgactatgacctggacagtgaagatgaggtgtttgtgaacaagctgaagaagaagatggacatctgccccctgcagtttgaggagatgattgaccggctggagaagggcagcggccagcagcctgtgtccctgcaggaggccaagctgctgctgaaggaggatgatgagctgatccgggaggtgtatgagtactggatcaagaagaggaagaactgccggggccccagcctcatccccagcgtgaagcaggagaagagagatggcagcagcaccaatgacccctacgtggccttcagaagaagaacagagaagatgcagaccaggaagaacaggaagaatgatgaggccagctatgagaagatgctgaagctgcggcgggacctgagcagagctgtgaccatcctggagatgatcaagagaagagagaagagcaagcgggagctgctgcacctgaccctggagatcatggagaagcgctacaacctgggggactacaatggagagatcatgtctgaggtgatggcccagaggcagcccatgaagcccacctacgccatccccatcatccccatcaccaacagcagccagttcaagcaccaggaggccatggatgtgaaggagttcaaggtgaacaagcaggacaaggctgacctgatccggcccaagaggaaatatgagaagaagcccaaggtgctgcccagcagcgctgctgccaccccccagcagaccagccctgctgccctgcccgtcttcaatgccaaggacctgaaccagtatgacttccccagcagtgatgaggagcccctgagccaggtgctgagcggcagcagcgaggccgaggaggacaatgaccctgatggcccctttgccttccggaggaaggccggctgccagtactatgccccccacctggaccagacaggcaactggccctggaccagccccaaggatggcggcctgggagatgtgcgctaccgctactgcctgaccaccctgactgtgccccagcgctgcatcggctttgccaggagaagagtgggccggggcggccgggtgctgctggaccgggcccacagcgactatgacagcgtcttccaccacctggacctggagatgctgagcagcccccagcacagccctgtgaaccagtttgccaacaccagcgagaccaacaccagtgacaagagcttcagcaaggacctgagccagatcctggtgaacatcaagagctgccgctggaggcacttccggcccaggacccccagcctgcatgacagcgacaatgatgagctgagctgcaggaagctgtaccgcagcatcaacagaactggaacagcccagcccggcacccagacctgcagcaccagcacccagagcaagagcagcagcggcagcgcccactttgccttcaccgctgagcagtaccagcagcaccagcagcagctggccctgatgcagaagcagcagctggcccagatccagcagcagcaggccaacagcaacagcagcaccaacaccagccagggctttgtgtccaagaccctggacagcgccagcgcccagtttgctgccagcgccctggtgaccagcgagcagctgatgggcttcaagatgaaggatgatgtggtgctgggcattggagtgaatggagtgctgcctgccagcggcgtgtacaagggcctgcacctgagcagcaccacccccacagccctggtgcacaccagccccagcacagctggcagcgccctgctgcagcccagcaacatcacccagaccagcagcagccacagcgccctgagccaccaggtgacagctgccaacagcgccaccacccaggtgctgattggcaacaacatccggctgactgtgcccagctctgtggccaccgtgaacagcatcgcccccatcaatgcccggcacatccccaggaccctgtctgctgtgcccagcagcgccctgaagctggccgctgctgccaactgccaggtgtccaaggtgcccagcagcagctctgtggacagcgtgcccagagaaaatcatgaaagtgagaagccagccctgaacaacattgctgacaacacagtggccatggaggtgacctag

SEQ ID NO: 151207 - DNA, 2424 bp, synthetic construct
  misc_feature 1..2424: note = Description of Artificial Sequence: Synthetic coding sequence
  source 1..2424: mol_type = other DNA
atgagcaagctgtccttccgggcccgggccctggatgctgccaagcccctgcccatctaccggggcaaggacatgccagacctgaatgactgtgtgtccatcaacagagctgtgccccagatgcccaccggcatggagaaggaggaggagagcgagcaccacctgcagagggccatcagcgcccagcaggtgttccgggagaagaaggagagcatggtgattcctgtgcctgaggccgagagcaatgtgaactactacaacagactctacaagggggagttcaagcagcccaagcagttcatccacatccagcccttcaacctggacaatgagcagcctgactatgacatggattctgaagatgagaccctgctgaaccggctgaacaggaagatggagatcaagcccctgcagtttgagatcatgattgaccggctggagaaggccagcagcaaccagctggtgaccctgcaggaggccaagctgctgctgaatgaagatgactacctgatcaaggctgtgtatgactactgggtgaggaagaggaagaactgccggggccccagcctcatcccccagatcaagcaggagaagagagatggcagcaccaacaatgacccctacgtggccttcagaagaagaacagagaagatgcagaccaggaagaacaggaagaatgatgaggccagctatgagaagatgctgaagctgcggcgggagttcagccgggccatcaccatcctggagatgatcaagagaagagagaagaccaagcgggagctgctgcacctgaccctggaggtggtggagaagcgctaccacctgggggactatggaggagagatcctgaatgaggtgaagatcagccgctctgagaaggagctgtatgccaccccagccaccctgcacaacggcaaccaccacaaggtgcaggagtgcaagaccaagcacccccaccacctgagcctgaaggaggaggccagtgatgtggtgcggcagaagaagaagtaccccaagaagcccaaggccgaggccctgatcaccagccagcagcccaccccagagaccctgcccgtcatcaacaagagtgacatcaagcagtatgacttccacagcagtgatgaagatgagttcccccaggtgctgagccctgtgtctgagcctgaggaggagaatgaccctgatggcccctgtgccttcagaagaagagctggctgccagtactatgccccccggctggaccaggccaaccacagctgtgaaaattctgagctggccgacctggacaagctgcgctaccgccactgcctgaccaccctgactgtgccccggcgctgcattggatttgcccggcggcgcatcggccggggcggccgggtcatcatggaccgcatcagcacagaacatgaccctgtgctgaagcagattgatcctgagatgctgaacagcttcagcagcagcagccagaccatcgacttcagcagcaacttcagcaggaccaatgccagcagcaagcactgtgagaaccggctgagcctgtctgagatcctgagcaacatccgcagctgccgcctgcagtgcttccagccccggctgctgaacctgcaggacagcgacagcgaggagtgcaccagcaggaagccaggccagacagtgaacaacaagagggtgtctgctgcctctgtggccctgctgaacaccagcaagaatggcatctctgtgactggaggcatcacagaggagcagttccagacccaccagcagcagctggtgcagatgcagaggcagcagctggcccagctgcagcagaagcagcagagccagcacagcagccagcagacccaccccaaggcccagggcagcagcaccagtgactgcatgagcaagaccctggacagcgccagcgcccactttgctgccagcgctgtggtgtctgcccctgtgcccagccgctctgaggtggccaaggagcagaacacaggccacaacaacatcaacggggtggtgcagcccagcggcaccagcaagaccctgtacagcaccaacatggccctgagcagcagccctggcatctctgctgtgcagctggtgaggacagtgggccacaccaccaccaaccacctgatcccagccctgtgcaccagcagcccccagaccctgcccatgaacaacagctgcctgaccaatgctgtgcacctgaacaacgtgtctgtggtgtcccctgtgaatgtgcacatcaacaccaggaccagcgcccccagccccacagccctgaagctggccaccgtggccgcctccatggacagagtgcccaaggtgacccccagcagcgccatcagcagcatcgccagagaaaatcatgagcctgagcggctgggcctgaatggaattgctgagaccaccgtggccatggaggtgacctag

SEQ ID NO: 151208 - DNA, 315 bp, synthetic construct
  misc_feature 1..315: note = Description of Artificial Sequence: Synthetic coding sequence
  source 1..315: mol_type = other DNA
atgagccacaccatcctgctggtgcagcccaccaagaggcctgagggccgcacctacgccgactatgagagcgtgaatgaatgcatggagggcgtgtgcaagatgtatgaggagcacctgaagaggatgaaccccaacagccccagcatcacctatgacatcagccagctgtttgacttcattgatgacctggccgacctgagctgcctggtgtacagagctgacacccagacctaccagccctacaacaaggactggatcaaggagaagatctacgtgctgctgcggcggcaggcccagcaggccggcaagtag

SEQ ID NO: 151209 - DNA, 2253 bp, synthetic construct
  misc_feature 1..2253: note = Description of Artificial Sequence: Synthetic coding sequence
  source 1..2253: mol_type = other DNA
tacagcaagatggagatccccaacccccccaccagcaagtgcatcacctactggaagaggaaggtgaagtctgagtacatgaggctgcggcagctgaagaggctgcaggccaacatgggcgccaaggccctgtatgtggccaactttgccaaggtgcaggagaagacccagatcctgaatgaggagtggaagaagctgcgggtgcagcctgtgcagagcatgaagcctgtgtctggccaccccttcctgaagaagtgcaccatcgagagcatcttccctggctttgccagccagcacatgctgatgaggagcctgaacacagtggccctggtgcccatcatgtacagctggagccccctgcagcagaacttcatggtggaggatgagaccgtgctgtgcaacatcccctacatgggagatgaggtgaaggaggaggatgagaccttcatcgaggagctgatcaacaactatgatggcaaggtgcacggggaggaggagatgatccctggctctgtgctgatcagtgatgctgtgttcctggagctggtggatgccctgaaccagtacagtgatgaggaggaggagggccacaatgacaccagtgatggcaagcaggatgacagcaaggaggacctgcctgtgaccaggaagaggaagagacatgccatcgagggcaacaagaagagcagcaagaagcagttccccaatgacatgatcttcagcgccatcgcctccatgtttcctgaaaatggagtgcctgatgacatgaaggagcgctaccgggagctgacagagatgtctgaccccaatgccctgcccccccagtgcacccccaacattgatggccccaatgccaagtctgtgcagcgggagcagagcctgcacagcttccacaccctcttctgccgccgctgcttcaagtatgactgcttcctgcaccccttccacgccacccccaacgtgtacaagaggaagaacaaggagatcaagattgagcctgagccctgtggcacagactgcttcctgctgctggagggcgccaaggagtatgccatgctgcacaaccccaggagcaaatgttctggaagaagaagaagaagacaccacatcgtgtctgccagctgcagcaatgccagcgccagcgctgtggccgagaccaaggagggggacagcgaccgggacacaggaaatgactgggccagcagcagcagcgaggccaacagccgctgccagacccccaccaagcagaaggccagccctgccccaccccagctgtgtgtggtggaggcccccagcgagcctgtggagtggacaggagctgaggagagcctcttccgggtcttccacggcacctacttcaacaacttctgcagcatcgcccggctgctgggcaccaagacctgcaagcaggtgttccagtttgctgtgaaggagagcctcatcctgaagctgcccacagatgagctgatgaaccccagccagaagaagaagaggaagcaccggctgtgggccgcccactgcaggaagatccagctgaagaaggacaacagcagcacccaggtgtacaactaccagccctgtgaccacccagaccggccctgtgacagcacctgcccctgcatcatgacccagaacttctgtgagaagttctgccagtgcaacccagactgccagaaccgcttccctggctgccgctgcaagacccagtgcaacaccaagcagtgcccctgctacctggccgtgagagaatgtgaccctgacctgtgcctgacctgtggggccagcgagcactgggactgcaaggtggtgtcctgcaagaactgcagcatccagaggggcctgaagaagcacctgctgctggcccccagtgatgtggccggctggggcaccttcatcaaggagagcgtgcagaagaatgagttcatcagcgagtactgtggggagctgatcagccaggatgaagctgacagaagaggcaaggtgtatgacaagtacatgagcagcttcctgttcaacctgaacaatgactttgtggtggatgccaccaggaagggcaacaagatccgctttgccaaccacagcgtgaaccccaactgctacgccaaggtggtgatggtgaatggagaccaccgcatcggcatctttgccaagagggccatccaggccggggaggagctgttctttgactaccgctacagccaggctgatgccctgaagtatgtgggcatcgagcgggagacagatgtgctgtag

SEQ ID NO: 151210 - DNA, 2124 bp, synthetic construct
  misc_feature 1..2124: note = Description of Artificial Sequence: Synthetic coding sequence
  source 1..2124: mol_type = other DNA
atggagatccccaacccccccaccagcaagtgcatcacctactggaagaggaaggtgaagtctgagtacatgaggctgcggcagctgaagaggctgcaggccaacatgggcgccaaggccctgtatgtggccaactttgccaaggtgcaggagaagacccagatcctgaatgaggagtggaagaagctgcgggtgcagcctgtgcagagcatgaagcctgtgtctggccaccccttcctgaagaaggtggaggatgaaacagtgctgtgcaacatcccctacatgggagatgaggtgaaggaggaggatgagaccttcatcgaggagctgatcaacaactatgatggcaaggtgcatggagaggaggagatgatccctggctctgtgctgatcagtgatgctgtgttcctggagctggtggatgccctgaaccagtacagtgatgaggaggaggagggccacaatgacaccagtgatggcaagcaggatgacagcaaagaagacctgcctgtgaccaggaagaggaagagacatgccatcgagggcaacaagaagagcagcaagaagcagttccccaatgacatgatcttcagcgccatcgcctccatgtttcctgaaaatggagtgcctgatgacatgaaggagcgctaccgggagctgacagagatgtctgaccccaatgccctgcccccccagtgcacccccaacattgatggccccaatgccaagtctgtgcagcgggagcagagcctgcacagcttccacaccctcttctgccgccgctgcttcaagtatgactgcttcctgcaccccttccacgccaccccaaatgtgtacaagaggaagaacaaggagatcaagattgagcctgagccctgtggcacagactgcttcctgctgctggagggcgccaaggagtatgccatgctgcacaaccccaggagcaagtgcagcggcagaagaagaagaagacaccacatcgtgtctgccagctgcagcaatgccagcgccagcgctgtggccgagaccaaggagggggacagcgaccgggacacaggaaatgactgggccagcagcagcagcgaggccaacagccgctgccagacccccaccaagcagaaggccagccctgccccaccccagctgtgtgtggtggaggcccccagcgagcctgtggagtggacaggagctgaggagagcctcttccgggtcttccacggcacctacttcaacaacttctgcagcatcgcccggctgctgggcaccaagacctgcaagcaggtgttccagtttgctgtgaaggagagcctcatcctgaagctgcccacagatgagctgatgaaccccagccagaagaagaagaggaagcaccggctgtgggccgcccactgcaggaagatccagctgaagaaggacaacagcagcacccaggtgtacaactaccagccctgtgaccacccagaccggccctgtgacagcacctgcccctgcatcatgacccagaacttctgtgagaagttctgccagtgcaacccagactgccagaaccgcttccctggctgccgctgcaagacccagtgcaacaccaagcagtgcccctgctacctggccgtgcgggagtgtgaccctgacctgtgcctgacctgtggggccagcgagcactgggactgcaaggtggtgtcctgcaagaactgcagcatccagaggggcctgaagaagcacctgctgctggcccccagtgatgtggccggctggggcaccttcatcaaggagagcgtgcagaagaatgagttcatcagcgagtactgtggggagctgatcagccaggatgaggccgaccggcggggcaaggtgtatgacaagtacatgagcagcttcctgttcaacctgaacaatgactttgtggtggatgccaccaggaaaggaaacaagatccgctttgccaaccacagcgtgaaccccaactgctacgccaaggtggtgatggtgaatggagaccacagaattggcatctttgccaagagggccatccaggccggggaggagctgttctttgactaccgctacagccaggctgatgccctgaagtatgtgggcatcgagcgggagacagatgtgctgtag

SEQ ID NO: 151211 - DNA, 2244 bp, synthetic construct
  misc_feature 1..2244: note = Description of Artificial Sequence: Synthetic coding sequence
  source 1..2244: mol_type = other DNA
atggagatccccaacccccccaccagcaagtgcatcacctactggaagaggaaggtgaagtctgagtacatgaggctgcggcagctgaagaggctgcaggccaacatgggcgccaaggccctgtatgtggccaactttgccaaggtgcaggagaagacccagatcctgaatgaggagtggaagaagctgcgggtgcagcctgtgcagagcatgaagcctgtgtctggccaccccttcctgaagaagtgcaccatcgagagcatcttccctggctttgccagccagcacatgctgatgaggagcctgaacacagtggccctggtgcccatcatgtacagctggagccccctgcagcagaacttcatggtggaggatgaaacagtgctgtgcaacatcccctacatgggagatgaggtgaaggaggaggatgagaccttcatcgaggagctgatcaacaactatgatggcaaggtgcatggagaggaggagatgatccctggctctgtgctgatcagtgatgctgtgttcctggagctggtggatgccctgaaccagtacagtgatgaggaggaggagggccacaatgacaccagtgatggcaagcaggatgacagcaaagaagacctgcctgtgaccaggaagaggaagagacatgccatcgagggcaacaagaagagcagcaagaagcagttccccaatgacatgatcttcagcgccatcgcctccatgtttcctgaaaatggagtgcctgatgacatgaaggagcgctaccgggagctgacagagatgtctgaccccaatgccctgcccccccagtgcacccccaacattgatggccccaatgccaagtctgtgcagcgggagcagagcctgcacagcttccacaccctcttctgccgccgctgcttcaagtatgactgcttcctgcaccccttccacgccaccccaaatgtgtacaagaggaagaacaaggagatcaagattgagcctgagccctgtggcacagactgcttcctgctgctggagggcgccaaggagtatgccatgctgcacaaccccaggagcaagtgcagcggcagaagaagaagaagacaccacatcgtgtctgccagctgcagcaatgccagcgccagcgctgtggccgagaccaaggagggggacagcgaccgggacacaggaaatgactgggccagcagcagcagcgaggccaacagccgctgccagacccccaccaagcagaaggccagccctgccccaccccagctgtgtgtggtggaggcccccagcgagcctgtggagtggacaggagctgaggagagcctcttccgggtcttccacggcacctacttcaacaacttctgcagcatcgcccggctgctgggcaccaagacctgcaagcaggtgttccagtttgctgtgaaggagagcctcatcctgaagctgcccacagatgagctgatgaaccccagccagaagaagaagaggaagcaccggctgtgggccgcccactgcaggaagatccagctgaagaaggacaacagcagcacccaggtgtacaactaccagccctgtgaccacccagaccggccctgtgacagcacctgcccctgcatcatgacccagaacttctgtgagaagttctgccagtgcaacccagactgccagaaccgcttccctggctgccgctgcaagacccagtgcaacaccaagcagtgcccctgctacctggccgtgcgggagtgtgaccctgacctgtgcctgacctgtggggccagcgagcactgggactgcaaggtggtgtcctgcaagaactgcagcatccagaggggcctgaagaagcacctgctgctggcccccagtgatgtggccggctggggcaccttcatcaaggagagcgtgcagaagaatgagttcatcagcgagtactgtggggagctgatcagccaggatgaggccgaccggcggggcaaggtgtatgacaagtacatgagcagcttcctgttcaacctgaacaatgactttgtggtggatgccaccaggaaaggaaacaagatccgctttgccaaccacagcgtgaaccccaactgctacgccaaggtggtgatggtgaatggagaccacagaattggcatctttgccaagagggccatccaggccggggaggagctgttctttgactaccgctacagccaggctgatgccctgaagtatgtgggcatcgagcgggagacagatgtgctgtag

SEQ ID NO: 151212 - DNA, 1827 bp, synthetic construct
  misc_feature 1..1827: note = Description of Artificial Sequence: Synthetic coding sequence
  source 1..1827: mol_type = other DNA
atggaggaggccagctgccccacctgcagcgtgaatgaggcctgtgagtggacccccttcagccagaaggagatgatccctggctctgtgctgatcagtgatgctgtgttcctggagctggtggatgccctgaaccagtacagtgatgaggaggaggagggccacaatgacaccagtgatggcaagcaggatgacagcaaggaggacctgcctgtgaccaggaagaggaagagacatgccatcgagggcaacaagaagagcagcaagaagcagttccccaatgacatgatcttcagcgccatcgcctccatgtttcctgaaaatggagtgcctgatgacatgaaggagcgctaccgggagctgacagagatgtctgaccccaatgccctgcccccccagtgcacccccaacattgatggccccaatgccaagtctgtgcagcgggagcagagcctgcacagcttccacaccctcttctgccgccgctgcttcaagtatgactgcttcctgcaccccttccacgccacccccaacgtgtacaagaggaagaacaaggagatcaagattgagcctgagccctgtggcacagactgcttcctgctgctggagggcgccaaggagtatgccatgctgcacaaccccaggagcaaatgttctggaagaagaagaagaagacaccacatcgtgtctgccagctgcagcaatgccagcgccagcgctgtggccgagaccaaggagggggacagcgaccgggacacaggaaatgactgggccagcagcagcagcgaggccaacagccgctgccagacccccaccaagcagaaggccagccctgccccaccccagctgtgtgtggtggaggcccccagcgagcctgtggagtggacaggagctgaggagagcctcttccgggtcttccacggcacctacttcaacaacttctgcagcatcgcccggctgctgggcaccaagacctgcaagcaggtgttccagtttgctgtgaaggagagcctcatcctgaagctgcccacagatgagctgatgaaccccagccagaagaagaagaggaagcaccggctgtgggccgcccactgcaggaagatccagctgaagaaggacaacagcagcacccaggtgtacaactaccagccctgtgaccacccagaccggccctgtgacagcacctgcccctgcatcatgacccagaacttctgtgagaagttctgccagtgcaacccagactgccagaaccgcttccctggctgccgctgcaagacccagtgcaacaccaagcagtgcccctgctacctggccgtgagagaatgtgaccctgacctgtgcctgacctgtggggccagcgagcactgggactgcaaggtggtgtcctgcaagaactgcagcatccagaggggcctgaagaagcacctgctgctggcccccagtgatgtggccggctggggcaccttcatcaaggagagcgtgcagaagaatgagttcatcagcgagtactgtggggagctgatcagccaggatgaagctgacagaagaggcaaggtgtatgacaagtacatgagcagcttcctgttcaacctgaacaatgactttgtggtggatgccaccaggaagggcaacaagatccgctttgccaaccacagcgtgaaccccaactgctacgccaaggtggtgatggtgaatggagaccaccgcatcggcatctttgccaagagggccatccaggccggggaggagctgttctttgactaccgctacagccaggctgatgccctgaagtatgtgggcatcgagcgggagacagatgtgctgtag

SEQ ID NO: 151213 - DNA, 2256 bp, synthetic construct
  misc_feature 1..2256: note = Description of Artificial Sequence: Synthetic coding sequence
  source 1..2256: mol_type = other DNA
atgggccagacaggcaagaagtctgagaagggccctgtgtgctggaggaagagggtgaagtctgagtacatgaggctgcggcagctgaagcgcttcagaagagcagatgaggtgaagtccatgttcagcagcaaccggcagaagatcctggagaggacagagatcctgaaccaggagtggaagcagaggcgcatccagcctgtgcacatcctgacctctgtgagcagcctgcggggcacccgggagtgcagcgtgaccagtgacctggacttccccacccaggtgatccccctgaagaccctgaatgctgtggcctctgtgcccatcatgtacagctggagccccctgcagcagaacttcatggtggaggatgagaccgtgctgcacaacatcccctacatgggagatgaggtgctggaccaggacggcaccttcatcgaggagctgatcaagaactatgatggcaaggtgcacggggaccgggagtgtggcttcatcaatgatgagatctttgtggagctggtgaatgccctgggccagtacaatgatgatgatgatgatgatgatggagatgatcctgaggagcgggaggagaagcagaaggacctggaggaccacagagatgacaaggagagccggccccccaggaagttccccagcgacaagatctttgaggccatcagctccatgtttcctgacaagggcacagctgaggagctgaaggagaagtacaaggagctgacagagcagcagctgcccggggccctgcccccagaatgtacccccaacattgatggccccaatgccaagtctgtgcagcgggagcagagcctgcacagcttccacaccctcttctgccgccgctgcttcaagtatgactgcttcctgcacaggaagtgcaactacagcttccacgccacccccaacacctacaagaggaagaacacagaaacagccctggacaacaagccctgtggcccccagtgctaccagcacctggagggcgccaaggagtttgctgctgccctgacagctgagcgcatcaagaccccacccaagaggcctgggggcagaagaagaggccgcctgcccaacaacagcagccggcccagcacccccaccatcaacgtgctggagagcaaggacacagacagcgaccgggaggccggcacagaaacaggaggagagaacaatgacaaggaggaggaggagaagaaggatgagaccagcagcagcagcgaggccaacagccgctgccagacccccatcaagatgaagcccaacatcgagcccccagaaaatgtggagtggagcggggctgaggcctccatgttccgggtgctgattggcacctactatgacaacttctgtgccatcgcccggctgattggcaccaagacctgccggcaggtgtatgagttccgggtgaaggagagcagcatcatcgccccagccccagcagaagatgtggacaccccacccaggaagaagaagaggaagcaccggctgtgggccgcccactgcaggaagatccagctgaagaaggatggcagcagcaaccacgtgtacaactaccagccctgtgaccacccccggcagccctgtgacagcagctgcccctgtgtgattgcccagaacttctgtgagaagttctgccagtgcagcagcgagtgccagaaccgcttccctggctgccgctgcaaggcccagtgcaacaccaagcagtgcccctgctacctggccgtgcgggagtgtgaccctgacctgtgcctgacctgtggggctgctgaccactgggacagcaagaatgtgtcctgcaagaactgcagcatccagaggggcagcaagaagcacctgctgctggcccccagtgatgtggccggctggggcatcttcatcaaggaccctgtgcagaagaatgagttcatcagcgagtactgtggggagatcatcagccaggatgaggccgaccggcggggcaaggtgtatgacaagtacatgtgcagcttcctgttcaacctgaacaatgactttgtggtggatgccaccaggaaaggaaacaagatccgctttgccaaccacagcgtgaaccccaactgctacgccaaggtgatgatggtgaatggagaccacagaattggcatctttgccaagagggccatccagacaggagaggagctgttctttgactaccgctacagccaggctgatgccctgaagtatgtgggcatcgagcgggagatggagatcccctag

SEQ ID NO: 151214 - DNA, 2124 bp, synthetic construct
  misc_feature 1..2124: note = Description of Artificial Sequence: Synthetic coding sequence
  source 1..2124: mol_type = other DNA
atgggccagacaggcaagaagtctgagaagggccctgtgtgctggaggaagagggtgaagtctgagtacatgaggctgcggcagctgaagcgcttcagaagagcagatgaggtgaagtccatgttcagcagcaaccggcagaagatcctggagaggacagagatcctgaaccaggagtggaagcagaggcgcatccagcctgtgcacatcctgacctctgtgagcagcctgcggggcacccgggaggtggaggatgaaacagtgctgcacaacatcccctacatgggagatgaggtgctggaccaggacggcaccttcatcgaggagctgatcaagaactatgatggcaaggtgcatggagacagagaatgtggcttcatcaatgatgagatctttgtggagctggtgaatgccctgggccagtacaatgatgatgatgatgatgatgatggagatgatcctgaggagcgggaggagaagcagaaggacctggaggaccacagagatgacaaggagagcaggcctcccaggaagttccccagcgacaagatctttgaggccatcagctccatgtttcctgacaagggcacagctgaggagctgaaggagaagtacaaggagctgacagagcagcagctgcccggggccctgcccccagagtgcacccccaacattgatggccccaatgccaagtctgtgcagcgggagcagagcctgcacagcttccacaccctcttctgccgccgctgcttcaagtatgactgcttcctgcaccccttccacgccacccccaacacctacaagaggaagaacacagaaacagccctggacaacaagccctgtggcccccagtgctaccagcacctggagggcgccaaggagtttgctgctgccctgacagctgagcgcatcaagaccccacccaagaggcctgggggcagaagaagaggccgcctgcccaacaacagcagccggcccagcacccccaccatcaacgtgctggagagcaaggacacagacagcgaccgggaggccggcacagaaacaggaggagagaacaatgacaaggaggaggaggagaagaaggatgagaccagcagcagcagcgaggccaacagccgctgccagacccccatcaagatgaagcccaacatcgagcccccagaaaatgtggagtggagcggggctgaggcctccatgttccgggtgctgattggcacctactatgacaacttctgtgccatcgcccggctgattggcaccaagacctgccggcaggtgtatgagttccgggtgaaggagagcagcatcatcgccccagccccagcagaagatgtggacaccccacccaggaagaagaagaggaagcaccggctgtgggccgcccactgcaggaagatccagctgaagaaggatggcagcagcaaccacgtgtacaactaccagccctgtgaccacccccggcagccctgtgacagcagctgcccctgtgtgattgcccagaacttctgtgagaagttctgccagtgcagcagcgagtgccagaaccgcttccctggctgccgctgcaaggcccagtgcaacaccaagcagtgcccctgctacctggccgtgcgggagtgtgaccctgacctgtgcctgacctgtggggctgctgaccactgggacagcaagaatgtgtcctgcaagaactgcagcatccagaggggcagcaagaagcacctgctgctggcccccagtgatgtggccggctggggcatcttcatcaaggaccctgtgcagaagaatgagttcatcagcgagtactgtggggagatcatcagccaggatgaggccgaccggcggggcaaggtgtatgacaagtacatgtgcagcttcctgttcaacctgaacaatgactttgtggtggatgccaccaggaaaggaaacaagatccgctttgccaaccacagcgtgaaccccaactgctacgccaaggtgatgatggtgaatggagaccacagaattggcatctttgccaagagggccatccagacaggagaggagctgttctttgactaccgctacagccaggctgatgccctgaagtatgtgggcatcgagcgggagatggagatcccctag

SEQ ID NO: 151215 - DNA, 2241 bp, synthetic construct
  misc_feature 1..2241: note = Description of Artificial Sequence: Synthetic coding sequence
  source 1..2241: mol_type = other DNA
atgggccagacaggcaagaagtctgagaagggccctgtgtgctggaggaagagggtgaagtctgagtacatgaggctgcggcagctgaagcgcttcagaagagcagatgaggtgaagtccatgttcagcagcaaccggcagaagatcctggagaggacagagatcctgaaccaggagtggaagcagaggcgcatccagcctgtgcacatcctgacctctgtgagcagcctgcggggcacccgggagtgcagcgtgaccagtgacctggacttccccacccaggtgatccccctgaagaccctgaatgctgtggcctctgtgcccatcatgtacagctggagccccctgcagcagaacttcatggtggaggatgagaccgtgctgcacaacatcccctacatgggagatgaggtgctggaccaggacggcaccttcatcgaggagctgatcaagaactatgatggcaaggtgcacggggaccgggagtgtggcttcatcaatgatgagatctttgtggagctggtgaatgccctgggccagtacaatgatgatgatgatgatgatgatggagatgatcctgaggagcgggaggagaagcagaaggacctggaggaccacagagatgacaaggagagccggccccccaggaagttccccagcgacaagatctttgaggccatcagctccatgtttcctgacaagggcacagctgaggagctgaaggagaagtacaaggagctgacagagcagcagctgcccggggccctgcccccagaatgtacccccaacattgatggccccaatgccaagtctgtgcagcgggagcagagcctgcacagcttccacaccctcttctgccgccgctgcttcaagtatgactgcttcctgcaccccttccacgccacccccaacacctacaagaggaagaacacagaaacagccctggacaacaagccctgtggcccccagtgctaccagcacctggagggcgccaaggagtttgctgctgccctgacagctgagcgcatcaagaccccacccaagaggcctgggggcagaagaagaggccgcctgcccaacaacagcagccggcccagcacccccaccatcaacgtgctggagagcaaggacacagacagcgaccgggaggccggcacagaaacaggaggagaaaataatgacaaggaggaggaggagaagaaggatgagaccagcagcagcagcgaggccaacagccgctgccagacccccatcaagatgaagcccaacatcgagcccccagaaaatgtggagtggagcggggctgaggcctccatgttccgggtgctgattggcacctactatgacaacttctgtgccatcgcccggctcatcggcaccaagacctgccggcaggtgtatgagttccgggtgaaggagagcagcatcatcgccccagccccagcagaagatgtggacaccccacccaggaagaagaagaggaagcaccggctgtgggccgcccactgcaggaagatccagctgaagaaggatggcagcagcaaccacgtgtacaactaccagccctgtgaccacccccggcagccctgtgacagcagctgcccctgcgtcatcgcccagaacttctgtgagaagttctgccagtgcagcagcgagtgccagaaccgcttccctggctgccgctgcaaggcccagtgcaacaccaagcagtgcccctgctacctggccgtgagagaatgtgaccctgacctgtgcctgacctgtggggctgctgaccactgggacagcaagaatgtgtcctgcaagaactgcagcatccagaggggcagcaagaagcacctgctgctggcccccagtgatgtggccggctggggcatcttcatcaaggaccctgtgcagaagaatgagttcatcagcgagtactgtggggagatcatcagccaggatgaagctgacagaagaggcaaggtgtatgacaagtacatgtgcagcttcctgttcaacctgaacaatgactttgtggtggatgccaccaggaagggcaacaagatccgctttgccaaccacagcgtgaaccccaactgctacgccaaggtgatgatggtgaatggagaccaccgcatcggcatctttgccaagagggccatccagacaggagaggagctgttctttgactaccgctacagccaggctgatgccctgaagtatgtgggcatcgagcgggagatggagatcccctag

SEQ ID NO: 151216 - DNA, 678 bp, synthetic construct
  misc_feature 1..678: note = Description of Artificial Sequence: Synthetic coding sequence
  source 1..678: mol_type = other DNA
atgtacagctggagccccctgcagcagaacttcatggtggaggatgaaacagtgctgcacaacatcccctacatgggagatgaggtgctggaccaggacggcaccttcatcgaggagctgatcaagaactatgatggcaaggtgcatggagacagagaatgtggcttcatcaatgatgagatctttgtggagctggtgaatgccctgggccagtacaatgatgatgatgatgatgatgatggagatgatcctgaggagcgggaggagaagcagaaggacctggaggaccacagagatgacaaggagagcaggcctcccaggaagttccccagcgacaagatctttgaggccatcagctccatgtttcctgacaagggcacagctgaggagctgaaggagaagtacaaggagctgacagagcagcagctgcccggggccctgcccccagagtgcacccccaacattgatggccccaatgccaagtctgtgcagcgggagcagagcctgcacagcttccacaccctcttctgccgccgctgcttcaagtatgactgcttcctgcaccccttccacgccacccccaacacctacaagaggaagaacacagaaacagccctggacaacaagccctgtggcccccagtgctaccagcacctgcccctgctgcccaggaactag

SEQ ID NO: 151217 - DNA, 2088 bp, synthetic construct
  misc_feature 1..2088: note = Description of Artificial Sequence: Synthetic coding sequence
  source 1..2088: mol_type = other DNA
atgggccagacaggcaagaagtctgagaagggccctgtgtgctggaggaagagggtgaagtctgagtacatgaggctgcggcagctgaagcgcttcagaagagcagatgaggtgaagtccatgttcagcagcaaccggcagaagatcctggagaggacagagatcctgaaccaggagtggaagcagaggcgcatccagcctgtgcacatcctgaccagctgcagcgtgaccagtgacctggacttccccacccaggtgatccccctgaagaccctgaatgctgtggcctctgtgcccatcatgtacagctggagccccctgcagcagaacttcatggtggaggatgaaacagtgctgcacaacatcccctacatgggagatgaggtgctggaccaggacggcaccttcatcgaggagctgatcaagaactatgatggcaaggtgcatggagacagagaatgtggcttcatcaatgatgagatctttgtggagctggtgaatgccctgggccagtacaatgatgatgatgatgatgatgatggagatgatcctgaggagcgggaggagaagcagaaggacctggaggaccacagagatgacaaggagagcaggcctcccaggaagttccccagcgacaagatctttgaggccatcagctccatgtttcctgacaagggcacagctgaggagctgaaggagaagtacaaggagctgacagagcagcagctgcccggggccctgcccccagagtgcacccccaacattgatggccccaatgccaagtctgtgcagcgggagcagagcctgcacagcttccacaccctcttctgccgccgctgcttcaagtatgactgcttcctgcaccccttccacgccacccccaacacctacaagaggaagaacacagaaacagccctggacaacaagccctgtggcccccagtgctaccagcacctggagggcgccaaggagtttgctgctgccctgacagctgagcgcatcaagaccccacccaagaggcctgggggcagaagaagaggccgcctgcccaacaacagcagccggcccagcacccccaccatcaacgtgctggagagcaaggacacagacagcgaccgggaggccggcacagaaacaggaggagagaacaatgacaaggaggaggaggagaagaaggatgagaccagcagcagcagcgaggccaacagccgctgccagacccccatcaagatgaagcccaacatcgagcccccagaaaatgtggagtggagcggggctgaggcctccatgttccgggtgctgattggcacctactatgacaacttctgtgccatcgcccggctgattggcaccaagacctgccggcaggtgtatgagttccgggtgaaggagagcagcatcatcgccccagccccagcagaagatgtggacaccccacccaggaagaagaagaggaagcaccggctgtgggccgcccactgcaggaagatccagctgaagaagggccagaaccgcttccctggctgccgctgcaaggcccagtgcaacaccaagcagtgcccctgctacctggccgtgcgggagtgtgaccctgacctgtgcctgacctgtggggctgctgaccactgggacagcaagaatgtgtcctgcaagaactgcagcatccagaggggcagcaagaagcacctgctgctggcccccagtgatgtggccggctggggcatcttcatcaaggaccctgtgcagaagaatgagttcatcagcgagtactgtggggagatcatcagccaggatgaggccgaccggcggggcaaggtgtatgacaagtacatgtgcagcttcctgttcaacctgaacaatgactttgtggtggatgccaccaggaaaggaaacaagatccgctttgccaaccacagcgtgaaccccaactgctacgccaaggtgatgatggtgaatggagaccacagaattggcatctttgccaagagggccatccagacaggagaggagctgttctttgactaccgctacagccaggctgatgccctgaagtatgtgggcatcgagcgggagatggagatcccctag

SEQ ID NO: 151218 - DNA, 2088 bp, synthetic construct; identical to SEQ ID NO: 151217
  misc_feature 1..2088: note = Description of Artificial Sequence: Synthetic coding sequence
  source 1..2088: mol_type = other DNA

SEQ ID NO: 151219 - DNA, 2214 bp, synthetic construct
  misc_feature 1..2214: note = Description of Artificial Sequence: Synthetic coding sequence
  source 1..2214: mol_type = other DNA
atgggccagacaggcaagaagtctgagaagggccctgtgtgctggaggaagagggtgaagtctgagtacatgaggctgcggcagctgaagcgcttcagaagagcagatgaggtgaagtccatgttcagcagcaaccggcagaagatcctggagaggacagagatcctgaaccaggagtggaagcagaggcgcatccagcctgtgcacatcctgaccagctgcagcgtgaccagtgacctggacttccccacccaggtgatccccctgaagaccctgaatgctgtggcctctgtgcccatcatgtacagctggagccccctgcagcagaacttcatggtggaggatgaaacagtgctgcacaacatcccctacatgggagatgaggtgctggaccaggacggcaccttcatcgaggagctgatcaagaactatgatggcaaggtgcatggagacagagaatgtggcttcatcaatgatgagatctttgtggagctggtgaatgccctgggccagtacaatgatgatgatgatgatgatgatggagatgatcctgaggagcgggaggagaagcagaaggacctggaggaccacagagatgacaaggagagcaggcctcccaggaagttccccagcgacaagatctttgaggccatcagctccatgtttcctgacaagggcacagctgaggagctgaaggagaagtacaaggagctgacagagcagcagctgcccggggccctgcccccagagtgcacccccaacattgatggccccaatgccaagtctgtgcagcgggagcagagcctgcacagcttccacaccctcttctgccgccgctgcttcaagtatgactgcttcctgcaccccttccacgccacccccaacacctacaagaggaagaacacagaaacagccctggacaacaagccctgtggcccccagtgctaccagcacctggagggcgccaaggagtttgctgctgccctgacagctgagcgcatcaagaccccacccaagaggcctgggggcagaagaagaggccgcctgcccaacaacagcagccggcccagcacccccaccatcaacgtgctggagagcaaggacacagacagcgaccgggaggccggcacagaaacaggaggagagaacaatgacaaggaggaggaggagaagaaggatgagaccagcagcagcagcgaggccaacagccgctgccagacccccatcaagatgaagcccaacatcgagcccccagaaaatgtggagtggagcggggctgaggcctccatgttccgggtgctgattggcacctactatgacaacttctgtgccatcgcccggctgattggcaccaagacctgccggcaggtgtatgagttccgggtgaaggagagcagcatcatcgccccagccccagcagaagatgtggacaccccacccaggaagaagaagaggaagcaccggctgtgggccgcccactgcaggaagatccagctgaagaaggatggcagcagcaaccacgtgtacaactaccagccctgtgaccacccccggcagccctgtgacagcagctgcccctgtgtgattgcccagaacttctgtgagaagttctgccagtgcagcagcgagtgccagaaccgcttccctggctgccgctgcaaggcccagtgcaacaccaagcagtgcccctgctacctggccgtgcgggagtgtgaccctgacctgtgcctgacctgtggggctgctgaccactgggacagcaagaatgtgtcctgcaagaactgcagcatccagaggggcagcaagaagcacctgctgctggcccccagtgatgtggccggctggggcatcttcatcaaggaccctgtgcagaagaatgagttcatcagcgagtactgtggggagatcatcagccaggatgaggccgaccggcggggcaaggtgtatgacaagtacatgtgcagcttcctgttcaacctgaacaatgactttgtggtggatgccaccaggaaaggaaacaagatccgctttgccaaccacagcgtgaaccccaactgctacgccaaggtgatgatggtgaatggagaccacagaattggcatctttgccaagagggccatccagacaggagaggagctgttctttgactaccgctacagccaggctgatgccctgaagtatgtgggcatcgagcgggagatggagatcccctag

SEQ ID NO: 151220 - DNA, 939 bp, synthetic construct
  misc_feature 1..939: note = Description of Artificial Sequence: Synthetic coding sequence
  source 1..939: mol_type = other DNA
atggccgccctgtatgcctgcaccaagtgccaccagcgcttcccctttgaggccctgagccagggccagcagctgtgcaaggagtgcagaattgcccaccctgtggtgaagtgcacctactgcaggacagagtaccagcaggagcggctggagtgcaatggcaccatcagcgcccactgcaacctgcacctgcccggcagcagtgacagccctgccagcagcagccgggtggccggcatcaccggcatcaagaccaacaccatctgcaagaagtgtgcccagaatgtgcagctgtatggcacccccaagccctgccagtactgcaacatcatcgccgccttcatcggcaacaagtgccagcgctgcaccaacagcgagaagaagtatggccccccctacagctgtgagcagtgcaagcagcagtgtgcctttgacaggaaggatgacaggaagaaggtggatggcaagctgctgtgctggctgtgcaccctgagctacaagagggtgctgcagaagaccaaggagcagaggaagcacctgagcagcagcagccgggccggccaccaggagaaggagcagtacagccggctgagcggcggcggccactacaacagcttctccccagacctggccctggacagccctggaacagaccacttcgtcatcatcgcccagctgaaggaggaggtggccaccctgaagaagatgctgcaccagaaggaccagatgatcctggagaaggagaagaagatcacagagctgaaggctgacttccagtaccaggagagccagatgagggccaagatgaaccagatggagaagacccacaaggaggtgacagagcagctgcaggccaagaaccgggagctgctgaagcaggccgccgccctgagcaagagcaagaagtctgagaagagcggggccatcaccagcccctag

SEQ ID NO: 151221 - DNA, 861 bp, synthetic construct
  misc_feature 1..861: note = Description of Artificial Sequence: Synthetic coding sequence
  source 1..861: mol_type = other DNA
atggctgaagatggagaggaggccgagttccactttgctgccctgtacatcagcggccagtggccccggctgcgggctgacacagacctgcagaggctgggcagcagcgccatggcccccagcaggaagttctttgtgggcggcaactggaagatgaatggaaggaagcagagcctgggggagctgattggcaccctgaatgctgccaaggtgcctgctgacacagaggtggtgtgtgccccacccacagcctacatcgactttgcccggcagaagctggaccccaagattgctgtggccgcccagaactgctacaaggtgaccaatggagccttcaccggggagatcagccctggcatgatcaaggactgtggggccacctgggtggtgctgggccacagcgagcggcggcacgtgtttggagagagtgatgagctgattggccagaaggtggcccacgccctggccgagggcctgggcgtcatcgcctgcattggagagaagctggatgagcgggaggccggcatcacagagaaggtggtgtttgagcagaccaaggtgattgctgacaacgtgaaggactggagcaaggtggtgctggcctatgagcctgtgtgggccatcggcaccgggaagacagccaccccccagcaggcccaggaggtgcatgagaagctgcggggctggctgaagagcaatgtgtctgatgctgtggcccagagcacccgcatcatctacggcggctctgtgactggagccacctgcaaggagctggccagccagccagatgtggatggcttcctggtgggcggggccagcctgaagccagagtttgtggacatcatcaatgccaagcagtag

SEQ ID NO: 151222 - DNA, 1305 bp, synthetic construct; identical to SEQ ID NO: 144710
  misc_feature 1..1305: note = Description of Artificial Sequence: Synthetic coding sequence
  source 1..1305: mol_type = other DNA

SEQ ID NO: 151223 - DNA, 1176 bp, synthetic construct
  misc_feature 1..1176: note = Description of Artificial Sequence: Synthetic coding sequence
  source 1..1176: mol_type = other DNA
atgagcattgagaagatctgggcccgggagatcctggacagccggggcaaccccaccgtggaggtggacctgtacacagccaagggcctcttccgggctgctgtgcccagcggggccagcacaggcatctatgaggccctggagctgagagatggagacaagcagcgctacctgggcaaggccaagtttggagccaatgccatcctgggcgtgtccctggccgtgtgcaaggccggggctgctgagcgggagctgcccctgtaccgccacatcgcccagctggccggcaacagcgacctgatcctgcctgtgcctgccttcaacgtcatcaatggaggcagccacgccggcaacaagctggccatgcaggagttcatgatcctgcctgtgggcgctgagagcttcagagatgccatgaggctgggcgctgaggtgtaccacaccctgaagggcgtcatcaaggacaagtatggcaaggatgccaccaacgtgggagatgagggcggctttgcccccaacatcctggagaacagcgaggccctggagctggtgaaggaggccatcgacaaggccggctacacagagaagatcgtgattggcatggatgtggccgccagcgagttctacagagatggcaagtatgacctggacttcaagagccccacagaccccagccgctacatcactggagaccagctgggcgccctgtaccaggactttgtgcgggactaccctgtggtgtccattgaggacccctttgaccaggatgactgggccgcctggagcaagttcaccgccaacgtgggcatccagatcgtgggagatgacctgactgtgaccaaccccaagagaattgaaagagctgtggaggagaaggcctgcaactgcctgctgctgaaggtgaaccagatcggctctgtgacagaggccatccaggcctgcaagctggcccaggagaatggctggggcgtgatggtgagccacaggtctggagaaacagaggacaccttcatcgctgacctggtggtgggcctgtgcaccggccagatcaagacaggagccccctgccgctctgagcggctggccaagtacaaccagctgatgagaattgaggaggagctgggagatgaggccaggtttgctggccacaacttcaggaaccccagcgtgctgtag

SEQ ID NO: 151224 - DNA, 1305 bp, synthetic construct; identical to SEQ ID NO: 144710
  misc_feature 1..1305: note = Description of Artificial Sequence: Synthetic coding sequence
  source 1..1305: mol_type = other DNA

SEQ ID NO: 151225 - DNA, 1176 bp, synthetic construct; identical to SEQ ID NO: 151223
  misc_feature 1..1176: note = Description of Artificial Sequence: Synthetic coding sequence
  source 1..1176: mol_type = other DNA

SEQ ID NO: 151226 - DNA, 1176 bp, synthetic construct
  misc_feature 1..1176: note = Description of Artificial Sequence: Synthetic coding sequence
  source 1..1176: mol_type = other DNA
atggccatgcagaagatctttgcccgggagatcctggacagccggggcaaccccaccgtggaggtggacctgcacacagccaagggccgcttccgggctgctgtgcccagcggggccagcacaggcatctatgaggccctggagctgagagatggagacaagggccgctacctgggcaaggccaagtttggagccaatgccatcctgggcgtgtccctggccgtgtgcaaggccggggctgctgagaagggcgtgcccctgtaccgccacatcgctgacctggccggcaacccagacctgatcctgcctgtgcctgccttcaacgtcatcaatggaggcagccacgccggcaacaagctggccatgcaggagttcatgatcctgcctgtgggcgccagcagcttcaaggaggccatgagaattggagctgaggtgtaccaccacctgaagggcgtcatcaaggccaagtatggcaaggatgccaccaacgtgggagatgagggcggctttgcccccaacatcctggagaacaatgaggccctggagctgctgaagacagccatccaggccgccggctacccagacaaggtggtgattggcatggatgtggccgccagcgagttctacagaaatggcaagtatgacctggacttcaagagcccagatgatcctgcccggcacatcactggagagaagctgggggagctgtacaagagcttcatcaagaactaccctgtggtgtccattgaggacccctttgaccaggatgactgggccacctggaccagcttcctgagcggcgtgaacatccagatcgtgggagatgacctgactgtgaccaaccccaagagaattgcccaggccgtggagaagaaggcctgcaactgcctgctgctgaaggtgaaccagatcggctctgtgacagagagcatccaggcctgcaagctggcccagagcaatggctggggcgtgatggtgagccacaggtctggagaaacagaggacaccttcatcgctgacctggtggtgggcctgtgcaccggccagatcaagacaggagccccctgccgctctgagcggctggccaagtacaaccagctgatgagaattgaggaggccctgggggacaaggccatctttgctggcaggaagttcaggaaccccaaggccaagtag

SEQ ID NO: 151227 - DNA, 1305 bp, synthetic construct
  misc_feature 1..1305: note = Description of Artificial Sequence: Synthetic coding sequence
  source 1..1305: mol_type = other DNA
atggccatgcagaagatctttgcccgggagatcctggacagccggggcaaccccaccgtggaggtggacctgcacacagccaagggccgcttccgggctgctgtgcccagcggggccagcacaggcatctatgaggccctggagctgagagatggagacaagggccgctacctgggcaagggcgtgctgaaggctgtggagaacatcaacaacaccctgggccctgccctgctgcagaagaagctgtctgtggtggaccaggagaaggtggacaagttcatgattgagctggatggaacagagaacaagagcaagtttggagccaatgccatcctgggcgtgtccctggccgtgtgcaaggccggggctgctgagaagggcgtgcccctgtaccgccacatcgctgacctggccggcaacccagacctgatcctgcctgtgcctgccttcaacgtcatcaatggaggcagccatgctggcaacaagctggccatgcaggagttcatgatcctgcctgtgggcgccagcagcttcaaggaggccatgagaattggagctgaggtgtaccaccacctgaagggcgtcatcaaggccaagtatggcaaggatgccaccaacgtgggagatgaaggaggctttgcccccaacatcctggagaacaatgaggccctggagctgctgaagacagccatccaggccgccggctacccagacaaggtggtgattggcatggatgtggccgccagcgagttctacagaaatggcaagtatgacctggacttcaagagcccagatgatcctgcccggcacatcaccggggagaagctgggggagctgtacaagagcttcatcaagaactaccctgtggtgtccattgaggacccctttgaccaggatgactgggccacctggaccagcttcctgtctggagtgaacatccagatcgtgggagatgacctgactgtgaccaaccccaagagaattgcccaggccgtggagaagaaggcctgcaactgcctgctgctgaaggtgaaccagatcggctctgtgacagagagcatccaggcctgcaagctggcccagagcaatggctggggcgtgatggtgagccacaggtctggagaaacagaggacaccttcatcgctgacctggtggtgggcctgtgcaccggccagatcaagacaggagccccctgccgctctgagcggctggccaagtacaaccagctgatgagaattgaggaggccctgggggacaaggccatctttgctggcaggaagttcaggaaccccaaggccaagtag

SEQ ID NO: 151228 - DNA, 1305 bp, synthetic construct; identical to SEQ ID NO: 151227
  misc_feature 1..1305: note = Description of Artificial Sequence: Synthetic coding sequence
  source 1..1305: mol_type = other DNA

SEQ ID NO: 151229 - DNA, 852 bp, synthetic construct
  misc_feature 1..852: note = Description of Artificial Sequence: Synthetic coding sequence
  source 1..852: mol_type = other DNA
atggccatgcagaagatctttgcccgggagatcctggacagccggggcaaccccaccgtggaggtggacctgcacacagccaagggccgcttccgggctgctgtgcccagcggggccagcacaggcatctatgaggccctggagctgagagatggagacaagggccgctacctgggcaagggcgtgctgaaggctgtggagaacatcaacaacaccctgggccctgccctgctgcagaagaagctgtctgtggtggaccaggagaaggtggacaagttcatgattgagctggatggaacagagaacaagagcaagtttggagccaatgccatcctgggcgtgtccctggccgtgtgcaaggccggggctgctgagaagggcgtgcccctgtaccgccacatcgctgacctggccggcaacccagacctgatcctgcctgtgcctgccttcaacgtcatcaatggaggcagccatgctggcaacaagctggccatgcaggagttcatgatcctgcctgtgggcgccagcagcttcaaggaggccatgagaattggagctgaggtgtaccaccacctgaagggcgtcatcaaggccaagtatggcaaggatgccaccaacgtgggagatgaaggaggctttgcccccaacatcctggagaacaatgaggccctggagctgctgaagacagccatccaggccgccggctacccagacaaggtggtgattggcatggatgtggccgccagcgagttctacagaaatggcaagtatgacctggacttcaagagcccagatgatcctgcccggcacatcaccggggagaagctgggggagctgtacaagagcttctag

SEQ ID NO: 151230 - DNA, 465 bp, synthetic construct
  misc_feature 1..465: note = Description of Artificial Sequence: Synthetic coding sequence
  source 1..465: mol_type = other DNA
atggccatgcagaagatctttgcccgggagatcctggacagccggggcaaccccaccgtggaggtggacctgcacacagccaagggccgcttccgggctgctgtgcccagcggggccagcacaggcatctatgaggccctggagctgagagatggagacaagggccgctacctgggcaagggcgtgctgaaggctgtggagaacatcaacaacaccctgggccctgccctgctgcagaagaagctgtctgtggtggaccaggagaaggtggacaagttcatgattgagctggatggaacagagaacaagagcaagtttggagccaatgccatcctgggcgtgtccctggccgtgtgcaaggccggggctgctgagaagggcgtgcccctgtaccgccacatcgctgacctggccggcaacccagacctgatcctgcctgtgcctgccttcaacgtcatcaactag

SEQ ID NO: 151231 - DNA, 447 bp, synthetic construct
  misc_feature 1..447: note = Description of Artificial Sequence: Synthetic coding sequence
  source 1..447: mol_type = other DNA
atggccatgcagaagatctttgcccgggagatcctggacagccggggcaaccccaccgtggaggtggacctgcacacagccaagggccgcttccgggctgctgtgcccagcggggccagcacaggcatctatgaggccctggagctgagagatggagacaagggccgctacctgggcaagggcgtgctgaaggctgtggagaacatcaacaacaccctgggccctgccctgctgcagaagaagctgtctgtggtggaccaggagaaggtggacaagttcatgattgagctggatggaacagagaacaagagcaagtttggagccaatgccatcctgggcgtgtccctggccgtgtgcaaggccggggctgctgagaagggcgtgcccctgtaccgccacatcgctgacctggccggcaacccagacctgatcctgcctgtgccctag

SEQ ID NO: 151232 - DNA, 1332 bp, synthetic construct
  misc_feature 1..1332: note = Description of Artificial Sequence: Synthetic coding sequence
  source 1..1332: mol_type = other DNA
atggtgcggggccgcatcagccggctgtctgtgagagatgtgcgcttccccaccagcctgggcggccatggagcagatgccatgcacacagatcctgactacagcgctgcctacgtggtgattgaaacagatgctgaagatggcatcaagggctgcggcatcaccttcaccctgggcaagggcacagaggtggtggtgtgtgctgtgaatgccctggcccaccacgtgctgaacaaggacctgaaggacatcgtgggggacttccggggcttctaccggcagctgaccagtgatggccagctgcgctggattggccctgagaagggcgtggtgcacctggccacagctgctgtgctgaatgctgtgtgggacctgtgggccaagcaggagggcaagcctgtgtggaagctgctggtggacatggaccccaggatgctggtgtcctgcatcgacttccgctacatcacagatgtgctgacagaggaggatgccctggagatcctgcagaagggccagatcggcaagaaggagcgggagaagcagatgctggcccagggctacccagcctacaccaccagctgtgcctggctgggctacagtgatgacaccctgaagcagctgtgtgcccaggccctgaaggatggctggacccgcttcaaggtgaaggtgggcgctgacctgcaggatgacatgaggcgctgccagatcatccgggacatgattggccctgagaagaccctgatgatggatgccaaccagcgctgggatgtgcctgaggccgtggagtggatgagcaagctggccaagttcaagcccctgtggattgaggagcccaccagcccagatgacatcctgggccacgccaccatcagcaaggccctggtgcccctgggcattggaattgccactggagagcagtgccacaacagagtcatcttcaagcagctgctgcaggccaaggccctgcagttcctgcagattgacagctgccgcctgggctctgtgaatgaaaacctgtctgtgctgctgatggccaagaagtttgagatccctgtgtgcccccacgccggcggcgtgggcctgtgtgagctggtgcagcacctgatcatctttgactacatctctgtgtctgccagcctggagaacagagtgtgtgaatatgtggaccacctgcacgagcacttcaagtaccctgtgatgatccagagggccagctacatgccacccaaggaccccggctacagcacagagatgaaggaggagagcgtgaagaagcaccagtacccagatggagaggtgtggaagaagctgctgcctgcccaggagaactag

SEQ ID NO: 151233 - DNA, 642 bp, synthetic construct
  misc_feature 1..642: note = Description of Artificial Sequence: Synthetic coding sequence
  source 1..642: mol_type = other DNA
atgaggcgctgccagatcatccgggacatgattggccctgagaagaccctgatgatggatgccaaccagcgctgggatgtgcctgaggccgtggagtggatgagcaagctggccaagttcaagcccctgtggattgaggagcccaccagcccagatgacatcctgggccacgccaccatcagcaaggccctggtgcccctgggcattggaattgccactggagagcagtgccacaacagagtcatcttcaagcagctgctgcaggccaaggccctgcagttcctgcagattgacagctgccgcctgggctctgtgaatgaaaacctgtctgtgctgctgatggccaagaagtttgagatccctgtgtgcccccacgccggcggcgtgggcctgtgtgagctggtgcagcacctgatcatctttgactacatctctgtgtctgccagcctggagaacagagtgtgtgaatatgtggaccacctgcacgagcacttcaagtaccctgtgatgatccagagggccagctacatgccacccaaggaccccggctacagcacagagatgaaggaggagagcgtgaagaagcaccagtacccagatggagaggtgtggaagaagctgctgcctgcccaggagaactag

SEQ ID NO: 151234 - DNA, 1353 bp, synthetic construct
  misc_feature 1..1353: note = Description of Artificial Sequence: Synthetic coding sequence
  source 1..1353: mol_type = other DNA
atggtgtctgcagatgccatggtgtctgcagatgccatggtgtctgcagatgccatggtgtctgcagatgccatggtgtctgcagatgccatggtgtctgcagatgccatggtgtctgcagatgccatggtgtctgcagatgccatgcacacagatcctgactacagcgctgcctacgtggtgattgaaacagatgctgaagatggcatcaagggctgcggcatcaccttcaccctgggcaaaggaacagaggtggtggtgtgtgctgtgaatgccctggcccaccacgtgctgaacaaggacctgaaggacatcgtgggggacttccggggcttctaccggcagctgaccagtgatggccagctgcgctggattggccctgagaagggcgtggtgcacctggccacagctgctgtgctgaatgctgtgtgggacctgtgggccaagcaggagggcaagcctgtgtggaagctgctggtggacatggaccccaggatgctggtgtcctgcatcgacttccgctacatcacagatgtgctgacagaagaagatgccctggagatcctgcagaagggccagatcggcaagaaggagcgggagaagcagatgctggcccagggctacccagcctacaccaccagctgtgcctggctgggctacagtgatgacaccctgaagcagctgtgtgcccaggccctgaaggatggctggacccgcttcaaggtgaaggtgggcgctgacctgcaggatgacatgaggcgctgccagatcatccgggacatgattggccctgagaagaccctgatgatggatgccaaccagcgctgggatgtgcctgaggccgtggagtggatgagcaagctggccaagttcaagcccctgtggattgaggagcccaccagcccagatgacatcctgggccacgccaccatcagcaagtgccacaacagagtcatcttcaagcagctgctgcaggccaaggccctgcagttcctgcagattgacagctgccgcctgggctctgtgaatgaaaacctgtctgtgctgctgatggccaagaagtttgagatccctgtgtgcccccatgctggaggagtgggcctgtgtgagctggtgcagcacctgatcatctttgactacatctctgtgtctgccagcctggagaacagagtgtgtgaatatgtggaccacctgcacgagcacttcaagtaccctgtgatgatccagagggccagctacatgccacccaaggaccccggctacagcacagagatgaaggaggagagcgtgaagaagcaccagtacccagatggagaggtgtggaagaagctgctgcctgcccaggagaactag

SEQ ID NO: 151235 - DNA, 1086 bp, synthetic construct
  misc_feature 1..1086: note = Description of Artificial Sequence: Synthetic coding sequence
  source 1..1086: mol_type = other DNA
atgcagaagatggagagccggggcgtggagctgcccagcctgtgggagaaggccctgaagctgattggccctgagaagggcgtggtgcacctggccacagctgctgtgctgaatgctgtgtgggacctgtgggccaagcaggagggcaagcctgtgtggaagctgctggtggacatggaccccaggatgctggtgtcctgcatcgacttccgctacatcacagatgtgctgacagaggaggatgccctggagatcctgcagaagggccagatcggcaagaaggagcgggagaagcagatgctggcccagggctacccagcctacaccaccagctgtgcctggctgggctacagtgatgacaccctgaagcagctgtgtgcccaggccctgaaggatggctggacccgcttcaaggtgaaggtgggcgctgacctgcaggatgacatgaggcgctgccagatcatccgggacatgattggccctgagaagaccctgatgatggatgccaaccagcgctgggatgtgcctgaggccgtggagtggatgagcaagctggccaagttcaagcccctgtggattgaggagcccaccagcccagatgacatcctgggccacgccaccatcagcaaggccctggtgcccctgggcattggaattgccactggagagcagtgccacaacagagtcatcttcaagcagctgctgcaggccaaggccctgcagttcctgcagattgacagctgccgcctgggctctgtgaatgaaaacctgtctgtgctgctgatggccaagaagtttgagatccctgtgtgcccccacgccggcggcgtgggcctgtgtgagctggtgcagcacctgatcatctttgactacatctctgtgtctgccagcctggagaacagagtgtgtgaatatgtggaccacctgcacgagcacttcaagtaccctgtgatgatccagagggccagctacatgccacccaaggaccccggctacagcacagagatgaaggaggagagcgtgaagaagcaccagtacccagatggagaggtgtggaagaagctgctgcctgcccaggagaactag

SEQ ID NO: 151236 - DNA, 429 bp, synthetic construct
  misc_feature 1..429: note = Description of Artificial Sequence: Synthetic coding sequence
  source 1..429: mol_type = other DNA
atggtgcggggccgcatcagccggctgtctgtgagagatgtgcgcttccccaccagcctgggcggccatggagcagatgccatgcacacagatcctgactacagcgctgcctacgtggtgattgaaacagatgctgaagatggcatcaagggctgcggcatcaccttcaccctgggcaagggcacagaggtggtggtgtgtgctgtgaatgccctggcccaccacgtgctgaacaaggacctgaaggacatcgtgggggacttccggggcttctaccggcagctgaccagtgatggccagctgcgctggattggccctgagaagggcgtggtgcacctggccacagctgctgtgctgaatgctgtgtgggacctgtgggccaagcaggagggcaagcctgtgtggaagctgctggtggacatgggctag

SEQ ID NO: 151237 - DNA, 1392 bp, synthetic construct
  misc_feature 1..1392: note = Description of Artificial Sequence: Synthetic coding sequence
  source 1..1392: mol_type = other DNA
atggccaccgtgacagccaccaccaaggtgcctgagatcagagatgtgaccagaattgagcgcatcggggcccacagccacatccggggcctgggcctggatgatgccctggagccccggcaggccagccagggcatggtgggccagctggccgccaggagagctgctggggtggtgctggagatgatccgggagggcaagattgctggccgggctgtgctgattgctggccagcccggcaccgggaagacagccatcgccatgggcatggcccaggccctgggccctgacacccccttcaccgccatcgccggcagcgagatcttcagcctggagatgagcaagacagaggccctgacccaggccttccgccgcagcattggagtgcgcatcaaggaggagacagagatcatcgagggggaggtggtggagatccagattgacaggcctgccaccggcaccggcagcaaggtgggcaagctgaccctgaagaccacagagatggagaccatctatgacctgggcaccaagatgattgagagcctgaccaaggacaaggtgcaggccggagatgtgatcaccatcgacaaggccaccgggaagatcagcaagctgggccgctccttcacccgggcccgggactatgatgccatgggcagccagaccaagtttgtgcagtgcccagatggagagctgcagaagaggaaggaggtggtgcacacagtgtccctgcatgaaattgatgtgatcaacagcaggacccagggcttcctggccctcttcagcggggacacaggagagatcaagtctgaggtgcgggagcagatcaatgccaaggtggccgagtggagggaggagggcaaggccgagatcatccctggggtgctcttcattgatgaggtgcacatgctggacatcgagagcttctccttcctgaacagagccctggagagtgacatggcccctgtgctgatcatggccaccaacagaggcatcacccgcatccggggcaccagctaccagagcccccacggcatccccatcgacctgctggaccggctgctgattgtgtccaccaccccctacagcgagaaggacaccaagcagatcctgcgcatccgctgtgaggaggaggatgtggagatgtctgaagatgcctacacagtgctgaccagaattggcctggagaccagcctgcgctatgccatccagctgatcacagctgccagcctggtgtgcaggaagaggaaaggaacagaggtgcaggtggatgacatcaagagggtgtacagcctcttcctggatgagagccgcagcacccagtacatgaaggagtaccaggatgccttcctgttcaatgagctgaagggggagaccatggacaccagctag

SEQ ID NO: 151238 - DNA, 855 bp, synthetic construct
  misc_feature 1..855: note = Description of Artificial Sequence: Synthetic coding sequence
  source 1..855: mol_type = other DNA
atggccaagagcctgctgaagacagccagcctgagcggccgcaccaagctgctgcaccagacaggcctgagcctgtacagcaccagccacggcttctatgaggaggaggtgaagaagaccctgcagcagtttcctgggggcagcattgacctgcagaaggaggacaatggcatcggcatcctgaccctgaacaaccccagcaggatgaatgccttctctggagtgatgatgctgcagctgctggagaaggtgattgagctggagaactggacagagggcaagggcctgattgtgcggggggccaagaacaccttcagcagcggcagtgacctgaatgctgtgaagagcctgggcctgcagaggcggctgcccctcatctctgtggccctggtgcagggctgggccctgggcggcggcgctgagttcaccacagcctgtgacttccggctgatgaccccagagagcaagatccgctttgtgcacaaggagatgggcatcatccccagctggggcggcaccacccggctggtggagatcatcggcagccggcaggccctgaaggtgctgagcggggccctgaagctggacagcaagaatgccctgaacatcggcatggtggaggaggtgctgcagagcagtgatgagaccaagagcctggaggaggcccaggagtggctgaagcagttcatccagggccccccagaggtgatccgggccctgaagaagtctgtgtgcagcggccgggagctgtacctggaggaggccctgcagaatgaaagagacctgctgggcaccgtgtggggcggccctgccaacctggaggccatcgccaagaagggcaagttcaacaagtag

SEQ ID NO: 151239 - DNA, 438 bp, synthetic construct
  misc_feature 1..438: note = Description of Artificial Sequence: Synthetic coding sequence
  source 1..438: mol_type = other DNA
atggccaagagcctgctgaagacagccagcctgagcggccgcaccaagctgctgcaccagacaggcctgagcctgtacagcaccagccacggcttctatgaggaggaggtgaagaagaccctgcagcagtttcctgggggcagcattgacctgcagaaggaggacaatggcatcggcatcctgaccctgaacaaccccagcaggatgaatgccttctctggagtgatgatgctgcagctgctggagaaggtgattgagctggagaactggacagagggcaagggcctgattgtgcggggggccaagaacaccttcagcagcggcagtgacctgaatgctgtgaagagcctgggcaccccagagaccagcttcaacaagtgctgtgccggcagccggctgggcatcggctggaggagccgcatctactacagcatgtag

SEQ ID NO: 151240 - DNA, 441 bp, synthetic construct
  misc_feature 1..441: note = Description of Artificial Sequence: Synthetic coding sequence
  source 1..441: mol_type = other DNA
atggccaagagcctgctgaagacagccagcctgagcggccgcaccaagctgctgcaccagacaggcctgagcctgtacagcaccagccacggcttctatgaggaggaggtgaagaagaccctgcagcagtttcctgggggcagcattgacctgcagaaggaggacaatggcatcggcatcctgaccctgaacaaccccagcaggatgaatgccttctctggagtgatgatgctgcagctgctggagaaggtgattgagctggagaactggacagagggcaagggcctgattgtgcggggggccaagaacaccttcagcagcggcagtgacctgaatgctgtgaagagcctgggcaccccagaggagaccagcttcaacaagtgctgtgccggcagccggctgggcatcggctggaggagccgcatctactacagcatgtag

SEQ ID NO: 151241 - DNA, 438 bp, synthetic construct; identical to SEQ ID NO: 151239
  misc_feature 1..438: note = Description of Artificial Sequence: Synthetic coding sequence
  source 1..438: mol_type = other DNA

SEQ ID NO: 151242 - DNA, 642 bp, synthetic construct
  misc_feature 1..642: note = Description of Artificial Sequence: Synthetic coding sequence
  source 1..642: mol_type = other DNA
atgaatgccttctctggagtgatgatgctgcagctgctggagaaggtgattgagctggagaactggacagagggcaagggcctgattgtgcggggggccaagaacaccttcagcagcggcagtgacctgaatgctgtgaagagcctgggcaccccagaggagagctgccgctggaacacagagttcctgtacaccctgcaccctgtgagccccttcatcaacatcctgtacagctatggctggaatggccgcatgcacgtgcacgccaagcacctgaacaagatctatgaggtgaagaagcagaggggcaagatcctgctgggcctgagccggctgcccctcatctctgtggccctggtgcagggctgggccctgggcggcggcgctgagttcaccacagcctgtgacttccggctgatgaccccagagagcaagatccgctttgtgcacaaggagatgggcatcatccccagctggggcggcaccacccggctggtggagatcatcggcagccggcaggccctgaaggtgctgagcggggccctgaagctggacagcaagaatgccctgaacatcggcatggtggaggaggtgctgcagagcagtgatgagaccaagagcctggaggaggcccaggagtag

SEQ ID NO: 151243 - DNA, 906 bp, synthetic construct
  misc_feature 1..906: note = Description of Artificial Sequence: Synthetic coding sequence
  source 1..906: mol_type = other DNA
atggccaagagcctgctgaagacagccagcctgagcggccgcaccaagctgctgcaccagacaggcctgagcctgtacagcaccagccacggcttctatgaggaggaggtgaagaagaccctgcagcagtttcctgggggcagcattgacctgcagaaggaggacaatggcatcggcatcctgaccctgaacaaccccagcaggatgaatgccttctctggagtgatgatgctgcagctgctggagaaggtgattgagctggagaactggacagagggcaagggcctgattgtgcggggggccaagaacaccttcagcagcggcagtgacctgaatgctgtgaagagcctgggcaccccagaagatggcatggctgtgtgcatgttcatgcagaacaccctgacccgcttcatgaggctgcccctcatctctgtggccctggtgcagggctgggccctgggcggcggcgctgagttcaccacagcctgtgacttccggctgatgaccccagagagcaagatccgctttgtgcacaaggagatgggcatcatccccagctggggcggcaccacccggctggtggagatcatcggcagccggcaggccctgaaggtgctgagcggggccctgaagctggacagcaagaatgccctgaacatcggcatggtggaggaggtgctgcagagcagtgatgagaccaagagcctggaggaggcccaggagtggctgaagcagttcatccagggccccccagaggtgatccgggccctgaagaagtctgtgtgcagcggccgggagctgtacctggaggaggccctgcagaatgaaagagacctgctgggcaccgtgtggggcggccctgccaacctggaggccatcgccaagaagggcaagttcaacaagtag

SEQ ID NO: 151244 - DNA, 681 bp, synthetic construct
  misc_feature 1..681: note = Description of Artificial Sequence: Synthetic coding sequence
  source 1..681: mol_type = other DNA
atgatgctgcagctgctggagaaggtgattgagctggagaactggacagagggcaagggcctcatcgtgcggggggccaagaacaccttcagcagcggcagtgacctgaatgctgtgaagagcctgggcaccccagaagatggcatggctgtgtgcatgttcatgcagaacaccctgacccgcttcatgaggctgcccctcatctctgtggccctggtgcagggctgggccctgggcggcggcgctgagttcaccacagcctgtgacttccggctgatgaccccagagagcaagatccgctttgtgcacaaggagatgggcatcatccccagctggggcggcaccacccggctggtggagatcatcggcagccggcaggccctgaaggtgctgagcggggccctgaagctggacagcaagaatgccctgaacatcggcatggtggaggaggtgctgcagagcagtgatgagaccaagagcctggaggaggcccaggagtggctgaagcagttcatccagggccccccagaggtgatccgggccctgaagaagtctgtgtgcagcggccgggagctgtacctggaggaggccctgcagaatgaaagagacctgctgggcaccgtgtggggcggccctgccaacctggaggccatcgccaagaagggcaagttcaacaagtag

SEQ ID NO: 151245 - DNA, 906 bp, synthetic construct; identical to SEQ ID NO: 151243
  misc_feature 1..906: note = Description of Artificial Sequence: Synthetic coding sequence
  source 1..906: mol_type = other DNA

SEQ ID NO: 151246 - DNA, 906 bp, synthetic construct; identical to SEQ ID NO: 151243
  misc_feature 1..906: note = Description of Artificial Sequence: Synthetic coding sequence
  source 1..906: mol_type = other DNA

SEQ ID NO: 151247 - DNA, 408 bp, synthetic construct
  misc_feature 1..408: note = Description of Artificial Sequence: Synthetic coding sequence
  source 1..408: mol_type = other DNA
atggccaagagcctgctgaagacagccagcctgagcggccgcaccaagctgctgcaccagacaggcctgagcctgtacagcaccagccacggcttctatgaggaggaggtgaagaagaccctgcagcagtttcctgggggcagcattgacctgcagaaggaggacaatggcatcggcatcctgaccctgaacaaccccagcaggatgaatgccttctctggagtgatgatgctgcagctgctggagaaggtgattgagctggagaactggacagagggcaagggcctgattgtgcggggggccaagaacaccttcagcagcggcagtgacctgaatgctgtgaagagcctgggcaccccagaagatggcatggctgtgtgcatgttcatgcagaacaccctgacctag

SEQ ID NO: 151248 - DNA, 924 bp, synthetic construct
  misc_feature 1..924: note = Description of Artificial Sequence: Synthetic coding sequence
  source 1..924: mol_type = other DNA
atggccctgaagcaggagatggccaagagcctgctgaagacagccagcctgagcggccgcaccaagctgctgcaccagacaggcctgagcctgtacagcaccagccacggcttctatgaggaggaggtgaagaagaccctgcagcagtttcctgggggcagcattgacctgcagaaggaggacaatggcatcggcatcctgaccctgaacaaccccagcaggatgaatgccttctctggagtgatgatgctgcagctgctggagaaggtgattgagctggagaactggacagagggcaagggcctgattgtgcggggggccaagaacaccttcagcagcggcagtgacctgaatgctgtgaagagcctgggcaccccagaagatggcatggctgtgtgcatgttcatgcagaacaccctgacccgcttcatgaggctgcccctcatctctgtggccctggtgcagggctgggccctgggcggcggcgctgagttcaccacagcctgtgacttccggctgatgaccccagagagcaagatccgctttgtgcacaaggagatgggcatcatccccagctggggcggcaccacccggctggtggagatcatcggcagccggcaggccctgaaggtgctgagcggggccctgaagctggacagcaagaatgccctgaacatcggcatggtggaggaggtgctgcagagcagtgatgagaccaagagcctggaggaggcccaggagtggctgaagcagttcatccagggccccccagaggtgatccgggccctgaagaagtctgtgtgcagcggccgggagctgtacctggaggaggccctgcagaatgaaagagacctgctgggcaccgtgtggggcggccctgccaacctggaggccatcgccaagaagggcaagttcaacaagtag

SEQ ID NO: 151249 - DNA, 456 bp, synthetic construct
  misc_feature 1..456: note = Description of Artificial Sequence: Synthetic coding sequence
  source 1..456: mol_type = other DNA
atggccaagagcctgctgaagacagccagcctgagcggccgcaccaagctgctgcaccagacaggcctgagcctgtacagcaccagccacggcttctatgaggaggaggtgaagaagaccctgcagcagtttcctgggggcagcattgacctgcagaaggaggacaatggcatcggcatcctgaccctgaacaaccccagcaggatgaatgccttctctggagtgatgatgctgcagctgctggagaaggtgattgagctggagaactggacagagggcaagggcctgattgtgcggggggccaagaacaccttcagcagcggcagtgacctgaatgctgtgaagagcctgggcaccccagaagatggcatggctgtgtgcatgttcatgcagaacaccctgacccgcttcatgaggctgcccctcatctctgtggccctggtgcagggctggtag

SEQ ID NO: 151250 - DNA, 378 bp, synthetic construct
  misc_feature 1..378: note = Description of Artificial Sequence: Synthetic coding sequence
  source 1..378: mol_type = other DNA
atggccaagagcctgctgaagacagccagcctgagcggccgcaccaagctgctgcaccagacaggcctgagcctgtacagcaccagccacggcttctatgaggaggaggtgaagaagaccctgcagcagtttcctgggggcagcattgacctgcagaaggaggacaatggcatcggcatcctgaccctgaacaaccccagcaggatgaatgccttctctggagtgatgatgctgcagctgctggagaaggtgattgagctggagaactggacagagggcaagggcctgattgtgcggggggccaagaacaccttcagcagcggcagtgacctgaatgctgtgaagagcctgggcaccccagaggccaacttcctgtag

SEQ ID NO: 151251 - DNA, 213 bp, synthetic construct
  misc_feature 1..213: note = Description of Artificial Sequence: Synthetic coding sequence
  source 1..213: mol_type = other DNA
atgatgctgcagctgctggagaaggtgattgagctggagaactggacagagggcaagggcctcatcgtgcggggggccaagaacaccttcagcagcggcagtgacctgaatgctgtgaagagcctgggcaccccagagaccagcttcaacaagtgctgtgccggcagccggctgggcatcggctggaggagccgcatctactacagcatgtag

SEQ ID NO: 151252 - DNA, 873 bp, synthetic construct
  misc_feature 1..873: note = Description of Artificial Sequence: Synthetic coding sequence
  source 1..873: mol_type = other DNA
atggccgccctgcgggtgctgctgagctgtgtgcggggccccctgcggccccctgtgcgctgcccagcctggaggccctttgccagcggggccaactttgagtacatcatcgccgagaagaggggcaagaacaacacagtgggcctcatccagctgaaccggcccaaggccctgaatgccctgtgtgatggcctgattgatgagctgaaccaggccctgaagacctttgaggaggaccctgctgtgggcgccatcgtgctgaccggcggggacaaggcctttgctgctggagctgacatcaaggagatgcagaacctgtccttccaggactgctacagcagcaagttcctgaagcactgggaccacctgacccaggtgaagaagcctgtgattgctgctgtgaatggctacgcctttggaggcggctgtgagctggccatgatgtgtgacatcatctatgctggggagaaggcccagtttgcccagcctgagatcctgattggcaccatccctggagctgggggcacccagaggctgaccagggctgtgggcaagagcctggccatggagatggtgctgaccggggaccgcatcagcgcccaggatgccaagcaggccggcctggtgtccaagatctgccctgtggagaccctggtggaggaggccatccagtgtgccgagaagatcgccagcaacagcaagatcgtggtggccatggccaaggagagcgtgaatgctgcctttgagatgaccctgacagagggcagcaagctggagaagaagctgttctacagcacctttgccacagatgacaggaaggagggcatgacagcctttgtggagaagaggaaggccaacttcaaggaccagtag

SEQ ID NO: 151253 - DNA, 2271 bp, synthetic construct
  misc_feature 1..2271: note = Description of Artificial Sequence: Synthetic coding sequence
  source 1..2271: mol_type = other DNA
atgagctttgtggccggggtcatccggcggctggatgagaccgtggtgaacagaattgctgctggggaggtgatccagaggcctgccaatgccatcaaggagatgattgagaactgcctggatgccaagagcaccagcatccaggtgattgtgaaggagggcggcctgaagctgatccagatccaggacaatggcaccggcatcagaaaagaagacctggacatcgtgtgtgagcgcttcaccaccagcaagctgcagagctttgaggacctggccagcatcagcacctacggcttccggggggaggccctggccagcatcagccacgtggcccacgtgaccatcaccaccaagacagcagatggaaaatgtgcctaccgggccagctacagtgatggcaagctgaaggccccacccaagccctgtgccggcaaccagggcacccagatcaccgtggaggacctcttctacaacatcgccaccaggaggaaggccctgaagaaccccagcgaggagtatggcaagatcctggaggtggtgggccgctacagcgtgcacaatgccggcatctccttctctgtgaagaagcagggcgagaccgtggctgatgtgaggaccctgcccaatgccagcacagtggacaacatccgcagcatctttggaaatgctgtgtcccgggagctgattgaaattggctgtgaggacaagaccctggccttcaagatgaatggctacatcagcaatgccaactacagcgtgaagaagtgcatcttcctgctcttcatcaaccaccggctggtggagagcaccagcctgaggaaggccatcgagaccgtgtatgctgcctacctgcccaagaacacccaccccttcctgtacctgagcctggagatcagcccccagaatgtggatgtgaatgtgcaccccaccaagcatgaggtgcacttcctgcacgaggagagcatcctggagcgggtgcagcagcacatcgagagcaagctgctgggcagcaacagcagcaggatgtacttcacccagaccctgctgcccggcctggccggccccagcggggagatggtgaagagcaccaccagcctgaccagcagcagcaccagcggcagcagtgacaaggtgtatgcccaccagatggtgaggacagacagccgggagcagaagctggatgccttcctgcagcccctgagcaagcccctgagcagccagccccaggccatcgtgacagaggacaagacagacatcagcagcggccgggcccggcagcaggatgaggagatgctggagctgcctgccccagctgaggtggccgccaagaaccagagcctggagggggacaccaccaagggcaccagcgagatgtctgagaagaggggccccaccagcagcaaccccaggaagaggcacagagaagattctgatgtggagatggtggaggatgacagcaggaaggagatgacagctgcctgcaccccaagaagacgcatcatcaacctgacctctgtgctgagcctgcaggaggagatcaatgagcagggccacgaggtgctgcgggagatgctgcacaaccacagctttgtgggctgtgtgaacccccagtgggccctggcccagcaccagaccaagctgtacctgctgaacaccaccaagctgtctgaggagctgttctaccagatcctgatctatgactttgccaactttggagtgctgcggctgtctgagcccgcccccctgtttgacctggccatgctggccctggacagccctgagagcggctggacagaggaggatggccccaaggagggcctggccgagtacatcgtggagttcctgaagaagaaggccgagatgctggccgactacttcagcctggagattgatgaggagggcaacctgattggcctgcccctgctgattgacaactacgtgccccccctggagggcctgcccatcttcatcctgcggctggccacagaggtgaactgggatgaggagaaggaatgttttgagagcctgagcaaagaatgtgccatgttctacagcatcaggaagcagtacatcagcgaggagagcaccctgagcggccagcagagcgaggtgcccggcagcatccccaacagctggaagtggacagtggagcacatcgtgtacaaggccctgcggagccacatcctgccccccaagcacttcacagaagatggcaacatcctgcagctggccaacctgcctgacctgtacaaggtgtttgagcgctgctag

SEQ ID NO: 151254 - DNA, 1884 bp, synthetic construct
  misc_feature 1..1884: note = Description of Artificial Sequence: Synthetic coding sequence
  source 1..1884: mol_type = other DNA
atggcctttggaggcggcctggagctggccctgggctgccactacagaattgcccacgccgaggcccaggtgggcctgcctgaggtgaccctgggcctgctgcccggggcccggggcacccagctgctgccccggctgactggagtgcctgctgccctggacctgatcaccagcggccgccgcatcctggctgatgaggccctgaagctgggcatcctggacaaggtggtgaacagcgaccctgtggaggaggccatccgctttgcccagagggtgtctgaccagcccctggagagccggcggctgtgcaacaagcccatccagagcctgcccaacatggacagcatcttcagcgaggccctgctgaagatgaggcggcagcaccctggctgcctggcccaggaggcctgtgtgcgggctgtgcaggccgctgtgcagtacccctatgaggtgggcatcaagaaggaggaggagctgttcctgtacctgctgcagagcggccaggcccgggccctgcagtatgccttctttgctgagaggaaggccaacaagtggagcaccccatctggggcctcctggaagacagccagcgcccggcctgtgtcctctgtgggcgtggtgggcctgggcaccatgggccggggcatcgtcatcagctttgcccgggcccgcatccctgtgattgctgtggacagcgacaagaaccagctggccacagccaacaagatgatcacctctgtgctggagaaggaggccagcaagatgcagcagagcggccacccctggagcggccccaagccccggctgaccagctctgtgaaggagctgggcggcgtggacctggtgattgaagctgtgtttgaggagatgagcctgaagaagcaggtgtttgctgagctgtctgctgtgtgcaagccagaggccttcctgtgcaccaacaccagcgccctggatgtggatgagatcgccagcagcacagaccggccccacctggtgattggcacccacttcttcagccctgcccacgtgatgaagctgctggaggtgatccccagccagtacagcagccccaccaccatcgccaccgtgatgaacctgagcaagaagatcaagaagattggagtggtggtgggcaactgctttggatttgtgggcaacaggatgctgaacccctactacaaccaggcctacttcctgctggaggagggcagcaagccagaggaggtggaccaggtgctggaggagtttggcttcaagatgggccccttccgggtgtctgacctggccggcctggatgtgggctggaagagcaggaagggccagggcctgaccggccccaccctgctgcccggcaccccagccaggaagaggggcaacagacgctactgccccatcccagatgtgctgtgtgagctgggccgcttcggccagaagacaggcaagggctggtaccagtatgacaagcccctgggccgcatccacaagccagacccctggctgagcaagttcctgagccgctacaggaagacccaccacatcgagcccaggaccatcagccaggatgagatcctggagcgctgcctgtacagcctcatcaatgaggccttccgcatcctgggggagggcattgctgccagccctgagcacattgatgtggtgtacctgcacggctacggctggcccaggcacaagggcggccccatgttctacgccagcacagtgggcctgcccaccgtgctggagaagctgcagaagtactaccggcagaacccagacatcccccagctggagcccagcgactacctgaagaagctggccagccagggcaacccccccctgaaggagtggcagagcctggccggcagccccagcagcaagctgtag

SEQ ID NO: 151255 - DNA, 1464 bp, synthetic construct
  misc_feature 1..1464: note = Description of Artificial Sequence: Synthetic coding sequence
  source 1..1464: mol_type = other DNA
atggccgagtacacccggctgcacaatgccctggccctgatccggctgagaaatcctcctgtgaatgccatcagcaccaccctgctgcgggacatcaaggagggcctgcagaaggctgtgattgaccacaccatcaaggccatcgtcatctgtggggctgagggcaagttctctgctggagctgacatccggggcttcagcgcccccaggaccttcggcctgaccctgggccacgtggtggatgagatccagagaaatgagaagcctgtggtggccgccatccagggcatggcctttggaggcggcctggagctggccctgggctgccactacagaattgcccacgccgaggcccaggtgggcctgcctgaggtgaccctgggcctgctgcccggggcccggggcacccagctgctgccccggctgactggagtgcctgctgccctggacctgatcaccagcggccgccgcatcctggctgatgaggccctgaagctgggcatcctggacaaggtggtgaacagcgaccctgtggaggaggccatccgctttgcccagagggtgtctgaccagcccctggagagccggcggctgtgcaacaagcccatccagagcctgcccaacatggacagcatcttcagcgaggccctgctgaagatgaggcggcagcaccctggctgcctggcccaggaggcctgtgtgcgggctgtgcaggccgctgtgcagtacccctatgaggtgggcatcaagaaggaggaggagctgttcctgtacctgctgcagagcggccaggcccgggccctgcagtatgccttctttgctgagaggaaggccaacaagtggagcaccccatctggggcctcctggaagacagccagcgcccggcctgtgtcctctgtgggcgtggtgggcctgggcaccatgggccggggcatcgtcatcagctttgcccgggcccgcatccctgtgattgctgtggacagcgacaagaaccagctggccacagccaacaagatgatcacctctgtgctggagaaggaggccagcaagatgcagcagagcggccacccctggagcggccccaagccccggctgaccagctctgtgaaggagctgggcggcgtggacctggtgattgaagctgtgtttgaggagatgagcctgaagaagcaggtgtttgctgagctgtctgctgtgtgcaagccagaggccttcctgtgcaccaacaccagcgccctggatgtggatgagatcgccagcagcacagaccggccccacctggtgattggcacccacttcttcagccctgcccacgtgatgaagctgctggaggtgatccccagccagtacagcagccccaccaccatcgccaccgtgatgaacctgagcaagaagatcaagaagattggagtggtggtgggcaactacagcgtgtccaagaagaagaagaagaagaagaagtag

SEQ ID NO: 151256 - DNA, 6102 bp, synthetic construct
  misc_feature 1..6102: note = Description of Artificial Sequence: Synthetic coding sequence
  source 1..6102: mol_type = other DNA
atgttcaagggcctgagcaagggcagccagggcaagggcagccccaagggcagccctgccaagggcagccccaagggcagccccagccgccacagccgggccgccacccaggagctggccctgctgatcagcaggatgcaggccaatgctgaccaggtggagcgggacatcctggagacccagaagaggctgcagcaggaccggctgaacagcgagcagagccaggccctgcagcaccagcaggagaccggccgcagcctgaaggaggccgaggtgctgctgaaggacctcttcctggatgtggacaaggcccggcggctgaagcacccccaggccgaggagattgagaaggacatcaagcagctgcacgagcgggtgacccaggagtgtgccgagtaccgggccctgtatgagaagatggtgctgcccccagatgtgggcccccgggtggactgggcccgggtgctggagcagaagcagaagcaggtgtgtgccggccagtatggccctggcatggccgagctggagcagcagattgctgagcacaacatcctgcagaaggagattgatgcctacggccagcagctgcggagcctggtgggcccagatgctgccaccatccgcagccagtacagagacctgctgaaggccgcctcctggaggggccagagcctgggcagcctgtacacccacctgcagggctgcacccggcagctgagcgccctggccgagcagcagaggcgcatcctgcagcaggactggagcgacctgatggctgaccctgctggggtgagaagagaatatgagcacttcaagcagcacgagctgctgagccaggagcagagcgtgaaccagctggaggatgatggagagaggatggtggagctgcggcaccctgctgtgggccccatccaggcccaccaggaggccctgaagatggagtggcagaacttcctgaacctgtgcatctgccaggagacccagctgcagcacgtggaggactaccgccgcttccaggaggaggccgacagcgtgtcccagaccctggccaagctgaacagcaacctggatgccaagtacagccctgcccctgggggccccccaggggcccccacagagctgctgcagcagctggaggccgaggagaagaggctggccgtgacagagcgggccaccggggacctgcagaggaggagcagagatgtggcccccctgccccagaggagaaatccaccccagcagcccctgcacgtggacagcatctgtgactgggacagcggggaggtgcagctgctgcagggcgagcgctacaagctggtggacaacacagacccccacgcctgggtggtgcagggccctggaggagagaccaagagggccccagctgcctgcttctgcatcccagccccagaccctgatgctgtggcccgggccagccggctggccagcgagctgcaggccctgaagcagaagctggccaccgtgcagagccggctgaaggccagcgctgtggagagcctgcggcccagccagcaggcccccagcggcagtgacctggccaacccccaggcccagaagctgctgacccagatgacccggctggatggagacctgggccagatcgagcggcaggtgctggcctgggcccgggcccccctgagccggcccacccccctggaggacctggagggccgcatccacagccatgagggcacagcccagaggctgcagagcctgggcacagagaaggagacagcccagaaggaatgtgaggccttcctgagcaccaggcctgtgggccctgctgccctgcagctgcctgtggccctgaacagcgtgaagaacaagttcagtgatgtgcaggtgctgtgcagcctgtatggagagaaggccaaggccgccctggacctggagcggcagatccaggatgctgacagagtcatccggggctttgaggccaccctggtgcaggaggcccccatcccagctgagcccggggccctgcaggagcgggtgtctgagctgcagaggcagaggcgggagctgctggagcagcagacctgtgtgctgcggctgcaccgggccctgaaggccagcgagcacgcctgtgccgccctgcagaacaacttccaggagttctgccaggacctgccccggcagcagaggcaggtgcgggccctgacagaccgctaccacgctgtgggggaccagctggacctgcgggagaaggtggtgcaggatgctgccctgacctaccagcagttcaagaactgcaaggacaacctgagctcctggctggagcacctgcccaggagccaggtgcggcccagtgatggccccagccagatcgcctacaagctgcaggcccagaagaggctgacccaggagatccagagccgggagcgggaccgggccacagccagccacctgagccaggccctgcaggccgccctgcaggactatgagctgcaggccgacacctaccgctgcagcctggagcccaccctggccgtgtctgcccccaagaggccccgggtggcccccctgcaggagagcatccaggcccaggagaagaacctggccaaggcctacacagaggtggccgccgcccagcagcagctgctgcagcagctggagtttgccaggaagatgctggagaagaaggagctgtctgaggacatccggaggacccatgatgccaagcagggcagcgagagccctgcccaggccggccgggagagcgaggccctgaaggcccagctggaggaggagaggaagagggtggcccgggtgcagcacgagctggaggcccagaggagccagctgctgcagctgcggacccagaggcccctggagcggctggaggagaaggaggtggtggagttctacagagacccccagctggagggcagcctgagccgggtgaaggcccaggtggaggaggagggcaagagaagagctggcctgcaggccgacctggaggtggccgcccagaaggtggtgcagctggagagcaagaggaagaccatgcagccccacctgctgaccaaggaggtgacccaggtggagcgggaccccggcctggacagccaggccgcccagctgcgcatccagatccagcagctgcggggagaagatgctgtgatcagcgcccggctggagggcctgaagaaggagctgctggccctggagaagcgggaggtggatgtgaaggagaaggtggtggtgaaggaggtggtgaaggtggagaagaacctggagatggtgaaggccgcccaggccctgcggctgcagatggaggaggatgctgcccggaggaagcaggccgaggaggccgtggccaagctgcaggccagaattgaggacctggagcgggccatcagctctgtggagcccaaggtgattgtgaaggaggtgaagaaggtggagcaggaccccggcctgctgcaggagagcagccggctgcggagcctgctggaggaggagaggaccaagaatgccaccctggcccgggagctgagtgacctgcacagcaagtacagcgtggtggagaagcagaggcccaaggtgcagctgcaggagcgggtgcatgagatcttccaggtggaccctgagacagagcaggagatcacccggctgaaggccaagctgcaggagatggccggcaagaggtctggagtggagaaggaggtggagaagctgctgcctgacctggaggtgctgcgggcccagaagcccaccgtggagtacaaggaggtgacccaggaggtggtgagacatgagaggagccctgaggtgctgcgggagattgaccggctgaaggcccagctgaatgagctggtgaacagccacggccgcagccaggagcagctgatccggctgcagggcgagagagatgagtggaggcgggagcgggccaaggtggagaccaagacagtgtccaaggaggtggtgagacatgagaaggaccctgtgctggagaaggaggccgagcggctgcggcaggaggtgcgggaggccgcccagaagagaagagctgctgaagatgctgtgtatgagctgcagagcaagaggctgctgctggagaggaggaagccagaggagaaggtggtggtgcaggaggtggtggtgacccagaaggaccccaagctgcgggaggagcacagccggctgagcggcagcctggatgaggaggtgggcagaagacggcagctggagctggaggtgcagcagctgcgggccggcgtggaggagcaggagggcctgctgtccttccaggaggacaggagcaagaagctggccgtggagcgggagctgcggcagctgaccctgcgcatccaggagctggagaagaggcccccaacagtgcaggagaagatcatcatggaggaggtggtgaagctggagaaggaccctgacctggagaagagcacagaggccctgcgctgggacctggaccaggagaagacccaggtgacagagctgaaccgggagtgcaagaacctgcaggtgcagattgatgtgctgcagaaggccaagagccaggagaagaccatctacaaggaggtgatccgggtgcagaaggacagagtgctggaggatgagcgggcccgggtgtgggagatgctgaaccgggagaggacagcccggcaggcccgggaggaggaggcccggcggctgcgggagagaattgacagagctgagaccctgggccgcacctggagccgggaggagagcgagctgcagagggcccgggaccaggccgaccaggagtgtggccgcctgcagcaggagctgcgggccctggagcggcagaagcagcagcagaccctgcagctgcaggaggagagcaagctgctgagccagaagacagagagcgagcggcagaaggccgcccagaggggccaggagctgagccggctggaggccgccatcctgcgggagaaggaccagatctatgagaaggagaggaccctgcgggacctgcacgccaaggtgtcccgggaggagctgagccaggagacccagacccgggagaccaacctgagcaccaagatcagcatcctggagcctgagaccgggaaggacatgagcccctatgaggcctacaagaggggcatcatcgaccggggccagtacctgcagctgcaggagctggagtgtgactgggaggaggtgaccaccagcggcccctgtggggaggagagcgtgctgctggacaggaagagcggcaagcagtacagcattgaagctgccctgcgctgccgccgcatcagcaaggaggagtaccacctgtacaaggatggccacctgcccatcagcgagtttgccctgctggtggccggggagaccaagcccagcagcagcctgagcatcggcagcatcatcagcaagagccccctggccagccctgccccccagagcaccagcttcttcagccccagcttcagcctgggcctgggagatgacagcttccccatcgccggcatctatgacaccaccacagacaacaagtgcagcatcaagacagctgtggccaagaacatgctggaccccatcaccggccagaagctgctggaggcccaggccgccactggaggcatcgtggacctgctgagccgggagcgctacagcgtgcacaaggccatggagcggggcctgattgagaacaccagcacccagaggctgctgaatgcccagaaggccttcaccggcattgaagatcctgtgaccaagaagaggctgtctgtgggggaggccgtgcagaagggctggatgccccgggagagcgtgctgccccacctgcaggtgcagcacctgactggaggcctgattgaccccaagaggacaggccgcatccccatccagcaggccctgctgagcggcatgatcagcgaggagctggcccagctgctgcaggatgagagcagctatgagaaggacctgacagaccccatcagcaaggagcggctgagctacaaggaggccatgggccgctgcaggaaggaccccctgagcggcctgctgctgctgcctgctgccctggagggctaccgctgctacagaagtgccagccccaccgtgcccaggagcctgaggtag

SEQ ID NO: 151257 - DNA, 2061 bp, synthetic construct
  misc_feature 1..2061: note = Description of Artificial Sequence: Synthetic coding sequence
  source 1..2061: mol_type = other DNA
atgcagctgggggagcagctgctggtgtcctctgtgaacctgcccggggcccacttctaccccctggagagcgcccggggcggcagcggcggcagcgctggccacctgcccagcgctgcccccagcccccagaagctggacctggacaaggccagcaagaagttcagcggcagcctgagctgtgaggccgtgtctggagagcctgctgctgccagcgctggggccccagctgccatgctgagtgacacagatgctggagatgcctttgccagcgctgctgctgtggccaagccaggccccccagatggcaggaagggcagcccctgtggggaggaggagctgcccagcgctgctgctgctgctgctgctgctgctgctgctgctgctgccacagcccgctacagcatggacagcctgagcagcgagcgctactacctgcagagccctggcccccagggcagcgagctggccgccccctgcagcctcttcccctaccaggccgctgctggggcccctcatggccctgtgtacccagccccaaatggagcccgctacccctacggctccatgctgcccccaggcggcttccctgctgctgtgtgccccccaggccgggcccagtttggacctggggccggggccggcagcggggccggcggcagcagcggcggcggcggcggccctggcacctaccagtacagccagggcgcccccctgtatggcccctacccaggagctgctgctgctggcagctgtggcggcctgggcggcctgggcgtgcccggcagcggcttccgggcccacgtgtacctgtgcaaccggcccctgtggctgaagttccaccgccaccagacagagatgatcatcaccaagcagggccgcaggatgttccccttcctgtccttcaacatcaatggcctgaaccccacagcccactacaacgtgtttgtggaggtggtgctggccgaccccaaccactggaggttccagggcggcaagtgggtgacctgtgggaaggctgacaacaacatgcagggcaacaagatgtatgtgcaccctgagagccccaacacaggcagccactggatgaggcaggagatcagctttgggaagctgaagctgaccaacaacaagggggccaacaacaacaacacccagatgattgtgctgcagagcctgcacaagtaccagccccggctgcacatcgtggaggtgacagaagatggagtggaggacctgaatgagcccagcaagacccagaccttcaccttcagcgagacccagttcatcgctgtgacagcctaccagaacacagacatcacccagctgaagattgaccacaacccctttgccaagggcttccgggacaactatgacagcagccaccagatcgtgcctgggggccgctatggagtgcagagcttcttccctgagccctttgtgaacaccctgccccaggcccgctactacaatggagagaggacagtgccccagaccaacggcctgctgagcccccagcagagcgaggaggtggccaaccccccccagcgctggctggtgacccctgtgcagcagcccggcaccaacaagctggacatcagcagctatgagagcgagtacaccagcagcaccctgctgccctacggcatcaagagcctgcccctgcagaccagccacgccctgggctactacccagaccccaccttccctgccatggccggctggggcggccggggcagctaccagaggaagatggctgctggcctgccctggaccagcaggaccagccccaccgtcttcagcgaggaccagctgagcaaggagaaggtgaaggaggagatcggcagctcctggattgagaccccacccagcatcaagagcctggacagcaatgattctggagtgtacaccagcgcctgcaagagaagaaggctgagccccagcaacagcagcaatgaaaacagccccagcatcaagtgtgaggacatcaatgctgaggagtacagcaaggacaccagcaagggcatgggcggctactatgccttctacaccaccccctag

SEQ ID NO: 151258 - DNA, 2118 bp, synthetic construct
  misc_feature 1..2118: note = Description of Artificial Sequence: Synthetic coding sequence
  source 1..2118: mol_type = other DNA
atgcagctgggggagcagctgctggtgtcctctgtgaacctgcccggggcccacttctaccccctggagagcgcccggggcggcagcggcggcagcgctggccacctgcccagcgctgcccccagcccccagaagctggacctggacaaggccagcaagaagttcagcggcagcctgagctgtgaggccgtgtctggagagcctgctgctgccagcgctggggccccagctgccatgctgagtgacacagatgctggagatgcctttgccagcgctgctgctgtggccaagccaggccccccagatggcaggaagggcagcccctgtggggaggaggagctgcccagcgctgctgctgctgctgctgctgctgctgctgctgctgctgccacagcccgctacagcatggacagcctgagcagcgagcgctactacctgcagagccctggcccccagggcagcgagctggccgccccctgcagcctcttcccctaccaggccgctgctggggcccctcatggccctgtgtacccagccccaaatggagcccgctacccctacggctccatgctgcccccaggcggcttccctgctgctgtgtgccccccaggccgggcccagtttggacctggggccggggccggcagcggggccggcggcagcagcggcggcggcggcggccctggcacctaccagtacagccagggcgcccccctgtatggcccctacccaggagctgctgctgctggcagctgtggcggcctgggcggcctgggcgtgcccggcagcggcttccgggcccacgtgtacctgtgcaaccggcccctgtggctgaagttccaccgccaccagacagagatgatcatcaccaagcagggccgcaggatgttccccttcctgtccttcaacatcaatggcctgaaccccacagcccactacaacgtgtttgtggaggtggtgctggccgaccccaaccactggaggttccagggcggcaagtgggtgacctgtgggaaggctgacaacaacatgcagggcaacaagatgtatgtgcaccctgagagccccaacacaggcagccactggatgaggcaggagatcagctttgggaagctgaagctgaccaacaacaagggggccaacaacaacaacacccagatgattgtgctgcagagcctgcacaagtaccagccccggctgcacatcgtggaggtgacagaagatggagtggaggacctgaatgagcccagcaagacccagaccttcaccttcagcgagacccagttcatcgctgtgacagcctaccagaacacagacatcacccagctgaagattgaccacaacccctttgccaagggcttccgggacaactatgacagcatgtacacagcctctgaaaatgaccggctgacccccagccccacagacagccccaggagccaccagatcgtgcctgggggccgctatggagtgcagagcttcttccctgagccctttgtgaacaccctgccccaggcccgctactacaacggggagaggacagtgccccagaccaacggcctgctgagcccccagcagagcgaggaggtggccaaccccccccagcgctggctggtgacccctgtgcagcagcccggcaccaacaagctggacatcagcagctatgaaagtgagtacaccagcagcaccctgctgccctacggcatcaagagcctgcccctgcagaccagccacgccctgggctactacccagaccccaccttccctgccatggccggctggggcggccggggcagctaccagaggaagatggccgccggcctgccctggaccagcaggaccagccccaccgtcttcagcgaggaccagctgagcaaggagaaggtgaaggaggagatcggcagctcctggattgagaccccacccagcatcaagagcctggacagcaatgacagcggcgtgtacaccagcgcctgcaagagaagaaggctgagccccagcaacagcagcaatgaaaacagccccagcatcaagtgtgaggacatcaatgctgaggagtacagcaaggacaccagcaagggcatgggcggctactatgccttctacaccaccccctag

SEQ ID NO: 151259 - DNA, 1713 bp, synthetic construct
  misc_feature 1..1713: note = Description of Artificial Sequence: Synthetic coding sequence
  source 1..1713: mol_type = other DNA
atggacagcctgagcagcgagcgctactacctgcagagccctggcccccagggcagcgagctggccgccccctgcagcctcttcccctaccaggccgccgccggggccccccacggccctgtgtacccagcccccaacggggcccgctacccctacggctccatgctgcccccaggcggcttccctgctgctgtgtgccccccaggccgggcccagtttggacctggagctggagctggcagcggggccggcggcagcagcggcggcggcggcggccctggcacctaccagtacagccagggcgcccccctgtatggcccctacccaggagctgctgctgctggcagctgtggcggcctgggcggcctgggcgtgcccggcagcggcttccgggcccacgtgtacctgtgcaaccggcccctgtggctgaagttccaccgccaccagacagagatgatcatcaccaagcagggccgcaggatgttccccttcctgtccttcaacatcaatggcctgaaccccacagcccactacaacgtgtttgtggaggtggtgctggccgaccccaaccactggaggttccagggcggcaagtgggtgacctgtgggaaggctgacaacaacatgcagggcaacaagatgtatgtgcaccctgagagccccaacacaggcagccactggatgaggcaggagatcagctttgggaagctgaagctgaccaacaacaagggggccaacaacaacaacacccagatgattgtgctgcagagcctgcacaagtaccagccccggctgcacatcgtggaggtgacagaagatggagtggaggacctgaatgagcccagcaagacccagaccttcaccttcagcgagacccagttcatcgctgtgacagcctaccagaacacagacatcacccagctgaagattgaccacaacccctttgccaagggcttccgggacaactatgacagcatgtacacagcctctgaaaatgaccggctgacccccagccccacagacagccccaggagccaccagatcgtgcctgggggccgctatggagtgcagagcttcttccctgagccctttgtgaacaccctgccccaggcccgctactacaatggagagaggacagtgccccagaccaacggcctgctgagcccccagcagagcgaggaggtggccaaccccccccagcgctggctggtgacccctgtgcagcagcccggcaccaacaagctggacatcagcagctatgagagcgagtacaccagcagcaccctgctgccctacggcatcaagagcctgcccctgcagaccagccacgccctgggctactacccagaccccaccttccctgccatggccggctggggcggccggggcagctaccagaggaagatggctgctggcctgccctggaccagcaggaccagccccaccgtcttcagcgaggaccagctgagcaaggagaaggtgaaggaggagatcggcagctcctggattgagaccccacccagcatcaagagcctggacagcaatgattctggagtgtacaccagcgcctgcaagagaagaaggctgagccccagcaacagcagcaatgaaaacagccccagcatcaagtgtgaggacatcaatgctgaggagtacagcaaggacaccagcaagggcatgggcggctactatgccttctacaccaccccctag

SEQ ID NO: 151260 - DNA, 1233 bp, synthetic construct
  misc_feature 1..1233: note = Description of Artificial Sequence: Synthetic coding sequence
  source 1..1233: mol_type = other DNA
atgttccccttcctgtccttcaacatcaatggcctgaaccccacagcccactacaacgtgtttgtggaggtggtgctggccgaccccaaccactggaggttccagggcggcaagtgggtgacctgtgggaaggctgacaacaacatgcagggcaacaagatgtatgtgcaccctgagagccccaacacaggcagccactggatgaggcaggagatcagctttgggaagctgaagctgaccaacaacaagggggccaacaacaacaacacccagatgattgtgctgcagagcctgcacaagtaccagccccggctgcacatcgtggaggtgacagaagatggagtggaggacctgaatgagcccagcaagacccagaccttcaccttcagcgagacccagttcatcgctgtgacagcctaccagaacacagacatcacccagctgaagattgaccacaacccctttgccaagggcttccgggacaactatgacagcatgtacacagcctctgaaaatgaccggctgacccccagccccacagacagccccaggagccaccagatcgtgcctgggggccgctatggagtgcagagcttcttccctgagccctttgtgaacaccctgccccaggcccgctactacaatggagagaggacagtgccccagaccaacggcctgctgagcccccagcagagcgaggaggtggccaaccccccccagcgctggctggtgacccctgtgcagcagcccggcaccaacaagctggacatcagcagctatgagagcgagtacaccagcagcaccctgctgccctacggcatcaagagcctgcccctgcagaccagccacgccctgggctactacccagaccccaccttccctgccatggccggctggggcggccggggcagctaccagaggaagatggctgctggcctgccctggaccagcaggaccagccccaccgtcttcagcgaggaccagctgagcaaggagaaggtgaaggaggagatcggcagctcctggattgagaccccacccagcatcaagagcctggacagcaatgattctggagtgtacaccagcgcctgcaagagaagaaggctgagccccagcaacagcagcaatgaaaacagccccagcatcaagtgtgaggacatcaatgctgaggagtacagcaaggacaccagcaagggcatgggcggctactatgccttctacaccaccccctag

SEQ ID NO: 151261 - DNA, 1269 bp, synthetic construct
  misc_feature 1..1269: note = Description of Artificial Sequence: Synthetic coding sequence
  source 1..1269: mol_type = other DNA
atgggccaggccggctgcaagggcctgtgcctgagcctgtttgactacaagacagagaagtatgtgattgccaagaacaagaaggtgggcctgctgtaccgcctgctgcaggccagcatcctggcctacctggtggtgtgggtgttcctgatcaagaagggctaccaggatgtggacaccagcctgcagagcgctgtgatcaccaaggtgaagggcgtggccttcaccaacaccagtgacctgggccagaggatctgggatgtggccgactatgtgatcccagcccagggagaaaatgtgttctttgtggtgaccaacctgattgtgacccccaaccagaggcagaatgtgtgtgccgagaatgaaggcatcccagatggagcctgcagcaaggacagcgactgccacgccggggaggccgtgacagctggaaatggagtgaagacaggccgctgcctgcggcgggagaacctggcccggggcacctgtgagatctttgcctggtgccccctggagaccagcagcaggcctgaggagcccttcctgaaggaggccgaggacttcaccatcttcatcaagaaccacatccgcttccccaagttcaacttcagcaagagcaatgtgatggatgtgaaggaccgctccttcctgaagagctgccacttcggccccaagaaccactactgccccatcttccggctgggcagcgtcatccgctgggccggcagtgacttccaggacatcgccctggagggcggcgtgattggcatcaacatcgagtggaactgtgacctggacaaggccgccagcgagtgccacccccactacagcttcagccggctggacaacaagctgagcaagtctgtgagcagcggctacaacttccgctttgcccgctactacagagatgctgctggggtggagttccgcaccctgatgaaggcctacggcatccgctttgatgtgatggtgaatggaaaaggagccttcttctgtgacctggtgctgatctacctgatcaagaagcgggagttctacagagacaagaagtatgaggaggtgcggggcctggaggacagcagccaggaggctgaagatgaggccagcggcctgggcctgtctgagcagctgaccagcggccctggcctgctgggcatgcctgagcagcaggagctgcaggagcccccagaggccaagaggggcagcagcagccagaagggaaatggatctgtgtgcccccagctgctggagccccacaggagcacctag

SEQ ID NO: 151262 - DNA, 564 bp, synthetic construct
  misc_feature 1..564: note = Description of Artificial Sequence: Synthetic coding sequence
  source 1..564: mol_type = other DNA
atgtctgagatggccgagctgtctgagctgtatgaggagagcagtgacctgcagatggatgtgatgcctggagagggggacctgccccagatggaggtgggcagcggcagccgggagctgagcctgcggcccagccgcagcggggcccagcagctggaggaggagggccccatggaggaggaggaggcccagcccatggccgcccctgagggcaagaggagcctggccaacggccccaatgctggggagcagcccggccaggtggccggggctgactttgaaagtgaagatgaaggagaggagtttgatgactgggaggatgattatgactacccagaggaggagcagctgagcggggccggctacagagtgtctgctgccctggaggaggccgacaagatgttcctgcggacccgggagcccgccctggatggcggcttccagatgcactatgagaagaccccatttgaccagctggccttcatcgaggagctgttcagcctgatggtggtgaaccggctgacagaggagctgggctgtgatgagatcatcgaccgggagtag

SEQ ID NO: 151263 - DNA, 711 bp, synthetic construct
  misc_feature 1..711: note = Description of Artificial Sequence: Synthetic coding sequence
  source 1..711: mol_type = other DNA
atgagcaagctgcctgctgacagctctgtgccccagacaggagctgccaatggagacagagatgtgccccaggccgaggtgggccggggcagaagagagcccgccccagcccagcctgaggaggccggggagggcgccatggctgctgcccggggcggccctgtgcctgctgcccgggagggccgcatggctgctgcccgggccgccccagctgctgctgcccggggggcccctgtggccgccgccgccctggcccgggctgctgctgctggccgggagagccctgctgctgctgctgcccgggaggccaggatggccgaggtggcccggctgctgggggagcctgtggatgaggagggccctgagggccggcccaggagcagacatggaaatggaggcctggccgccctgccctacctgcggctgcggcaccccctgtctgtgctgggcatcaactaccagcagttcctgcggcactacctggagaactaccccatcgcccctggccgcatccaggagctggaggagaggagaagaagatttgtggaggcctgccgggcccgggaggccgcctttgatgctgagtaccagaggaacccccaccgggtggacctggacatcctgaccttcaccatcgccctgacagccagcgaggtgatcaaccccctcatcgaggagctgggctgtgacaagttcatcaaccgggagtag

SEQ ID NO: 151264 - DNA, 564 bp, synthetic construct
  misc_feature 1..564: note = Description of Artificial Sequence: Synthetic coding sequence
  source 1..564: mol_type = other DNA
atgagcaagctgcctgctgacagctctgtgccccagacaggagctgccaatggagacagagatgtgccccaggccgaggtgggccggggcagaagagagcccgccccagcccagcctgaggaggccggggagagccctgctgctgctgctgcccgggaggccaggatggccgaggtggcccggctgctgggggagcctgtggatgaggagggccctgagggccggcccaggagccgccacggcaatggaggcctggccgccctgccctacctgcggctgcggcaccccctgtctgtgctgggcatcaactaccagcagttcctgcggcactacctggagaactaccccatcgcccctggccgcatccaggagctggaggagaggagaagaagatttgtggaggcctgccgggcccgggaggccgcctttgatgctgagtaccagaggaacccccaccgggtggacctggacatcctgaccttcaccatcgccctgacagccagcgaggtgatcaaccccctgattgaggagctgggctgtgacaagttcatcaaccgggagtag

SEQ ID NO: 151265 - DNA, 1002 bp, synthetic construct
  misc_feature 1..1002: note = Description of Artificial Sequence: Synthetic coding sequence
  source 1..1002: mol_type = other DNA
atgaagatggatgtgtctgtgcgggccgccggctgcagtgatgacctgagcagcggggaggctgatgtggaccccaagctgctggagctgacagcagatgaggagaagtgccgcagcatccggcggcagtaccggcagctgatgtactgtgtgcggcagaaccgggaggacatcgtgtcctctgccaacaacagcctgacagaggccctggaggaggccaacgtgctgtttgatggagtgtccaggacccgggaggccgccctggatgcccgcttcctggtgatggccagtgacctgggcaaggagaaggccaagcagctgaacagcgacatgaacttcttcaaccagctggccttctgtgacttcctgttcctgtttgtgggcctgaactggatggagggggaccctgacaagctgagtgactgtgatgacagcatcgccctgtccttctggaaggccatcgagaaggaggccacctcctggatggtgaaggccgagaccttccactttgtgtttggcagcttcaagctggagaggtctgcccccaagccccggctggagcaccagaagaaggtgaggaagatggaggagaatggaaacatgcccaccaagctgcagaagctggacctgagcagctacccagaggccacagagaagaatgtggagcgcatcctgggcctgctgcagacctacttcaggaagtacccagacacccctgtgtcctactttgaatttgtgattgaccccaacagcttcagcaggacagtggagaacatcttctacgtgtccttcatcgtgagagatggctttgcccgcatccggctggatgaagatcggctgcccatcctggagcccatgaatgtgaaccagatgggagagggcaatgacagcagctgccacggcaggaagcagggcgtcatcagcctgaccctgcaggagtggaagaacatcgtggccgcctttgagatcagcgaggccatgatcacctacagcagctactag

SEQ ID NO: 151266 - DNA, 2931 bp, synthetic construct
  misc_feature 1..2931: note = Description of Artificial Sequence: Synthetic coding sequence
  source 1..2931: mol_type = other DNA
atggagcggcgctggcccctgggcctgggcctggtgctgctgctgtgtgcccccctgcccccaggggcccgggccaaggaggtgaccctgatggacaccagcaaggcccagggcgagctgggctggctgctggacccccccaaggatggctggagcgagcagcagcagatcctgaatggcacccccctgtacatgtaccaggactgccccatgcagggccggcgggacacagaccactggctgcggagcaactggatctacagaggagaggaggccagccgggtgcacgtggagctgcagttcaccgtgcgggactgcaagagcttccctgggggcgccggccccctgggctgcaaggagaccttcaacctgctgtacatggagagtgaccaggatgtgggcatccagctgcggcggcccctcttccagaaggtgaccaccgtggccgctgaccagagcttcaccatccgggacctggtgtctggctctgtgaagctgaatgtggagcgctgcagcctgggccgcctgacccggcggggcctgtacctggccttccacaaccctggggcctgtgtggccctggtgtctgtgcgggtcttctaccagcgctgcccagagaccctgaatggcctggcccagttcccagacaccctgcccggccctgctggcctggtggaggtggccggcacctgcctgccccacgcccgggccagcccccggcccagcggggcccccaggatgcactgcagcccagatggagagtggctggtgcctgtgggccgctgccactgtgagcccggctatgaggagggcggcagcggggaggcctgtgtggcctgccccagcggcagctacaggatggacatggacaccccccactgcctgacctgcccccagcagagcacagctgagagcgagggcgccaccatctgcacctgtgagagcggccactaccgggcccctggagagggcccccaggtggcctgcaccggcccccccagcgcccccaggaacctgtccttcagcgccagcggcacccagctgagcctgcgctgggagcccccagctgacaccggcggccggcaggatgtgcgctacagcgtgcgctgcagccagtgccagggcacagcccaggacggcggcccctgccagccctgtggggtgggcgtgcacttcagccctggggcccggggcctgaccaccccagctgtgcacgtgaatggcctggagccctatgccaactacaccttcaacgtggaggcccagaatggagtgtctggcctgggcagcagcggccacgccagcacctctgtgtccatctccatgggccatgctgagagcctgagcggcctgagcctgcggctggtgaagaaggagccccggcagctggagctgacctgggccggcagccggcccaggagccctggggccaacctgacctatgagctgcacgtgctgaaccaggatgaggagcgctaccagatggtgctggagccccgggtgctgctgacagagctgcagcctgacaccacctacatcgtgcgggtgaggatgctgacccccctgggccctggccccttctccccagaccacgagttccgcaccagcccccctgtgtcccggggcctgaccggcggggagatcgtggccgtcatcttcggcctgctgctgggcgccgccctgctgctgggcatcctggtgttccgcagcagaagagcccagaggcagaggcagcagaggcagagggaccgggccacagatgtggaccgggaggacaagctgtggctgaagccctacgtggacctgcaggcctatgaggaccctgcccagggcgccctggacttcacccgggagctggaccctgcctggctgatggtggacaccgtcatcggggagggggagtttggagaggtgtaccggggcaccctgcggctgcccagccaggactgcaagacagtggccatcaagaccctgaaggacaccagccctgggggccagtggtggaacttcctgcgggaggccaccatcatgggccagttcagccacccccacatcctgcacctggagggcgtggtgaccaagaggaagcccatcatgatcatcacagagttcatggagaatggagccctggatgccttcctgcgggagcgggaggaccagctggtgcccggccagctggtggccatgctgcagggcatcgccagcggcatgaactacctgagcaaccacaactacgtgcaccgggacctggccgccaggaacatcctggtgaaccagaacctgtgctgcaaggtgtctgactttggcctgacccggctgctggatgactttgatggcacctatgagacccagggcggcaagatccccatccgctggacagcccctgaggccatcgcccaccgcatcttcaccacagccagtgatgtgtggagctttggcatcgtgatgtgggaggtgctgagctttggagacaagccctatggagagatgagcaaccaggaggtgatgaagagcattgaagatggctaccgcctgcccccacctgtggactgcccagcccccctgtatgagctgatgaagaactgctgggcctatgaccgggcccggcggccccacttccagaagctgcaggcccacctggagcagctgctggccaacccccacagcctgcggaccatcgccaactttgaccccaggatgaccctgcggctgcccagcctgagcggcagtgatggcatcccctacagaacagtgtctgagtggctggagagcatccgcatgaagcgctacatcctgcacttccacagcgctggcctggacaccatggagtgtgtgctggagctgacagctgaggacctgacccagatgggcatcaccctgcccggccaccagaagaggatcctgtgcagcatccagggcttcaaggactag

SEQ ID NO: 151267 - DNA, 888 bp, synthetic construct
  misc_feature 1..888: note = Description of Artificial Sequence: Synthetic coding sequence
  source 1..888: mol_type = other DNA
atggagacctgtgccggcccccaccccctgcggctcttcctgtgcaggatgcagctgtgcctggccctgctgctgggcccctggaggcctggaacagctgaggaggtgatcctgctggacagcaaggccagccaggccgagctgggctggacagccctgcccagcaatggctgggaggagatcagcggcgtggatgaacatgaccggcccatccgcacctaccaggtgtgcaatgtgctggagcccaaccaggacaactggctgcagacaggctggatcagccggggccggggccagaggatctttgtggagctgcagttcaccctgcgggactgcagcagcatccctggagctgctggcacctgcaaggagaccttcaacgtgtactacctggagacagaagctgacctgggccggggccggccccggctgggcggcagccggcccaggaagattgacaccatcgctgctgatgagagcttcacccagggcgacctgggggagaggaagatgaagctgaacacagaggtgcgggagatcggccccctgagcagaagaggcttccacctggccttccaggatgtgggcgcctgtgtggccctggtgtctgtgcgggtgtactacaagcagtgccgggccaccgtgcggggcctggccaccttccctgccacagctgctgagagcgccttcagcaccctggtggaggtggccggcacctgtgtggcccacagcgagggggagcccggcagcccccccaggatgcactgtggggctgatggagagtggctggtgcctgtgggccgctgcagctgcagcgctggcttccaggagcggggggacttctgtgagggcatccagctggccggcggccggggcgtgggcgtgtag

SEQ ID NO: 151268 - DNA, 1632 bp, synthetic construct
  misc_feature 1..1632: note = Description of Artificial Sequence: Synthetic coding sequence
  source 1..1632: mol_type = other DNA
atggtgaagacaggagcccccaccgtgacagtgaccaacctgaagccagccacccgctacgtgttccagatccgggccgccagccctggccccagctgggaggcccagagcttcaaccccagcattgaggtgcagaccctgggggaggccgccagcggcagccgggaccagagccctgccatcgtggtgacagtggtgaccatcagcgccctgctggtgctgggctctgtgatgtctgtgctggccatctggaggcggccctgcagctatggcaagggcggcggagatgcccatgatgaggaggagctgtacttccacttcaaggtgcccaccaggaggaccttcctggacccccagagctgtggggacctgctgcaggccgtgcacctgtttgccaaggagctggatgccaagtctgtgaccctggagaggagcctgggcggcggccgctttggagagctgtgctgcggctgcctgcagctgcccggccggcaggagctgctggtggccgtgcacatgctgcgggacagcgccagtgacagccagaggctgggcttcctggccgaggccctgaccctgggccagtttgaccacagccacatcgtgcggctggagggcgtggtgacccggggcagcaccctgatgattgtgacagagtacatgagccatggagccctggatggcttcctgcggagacatgagggccagctggtggccggccagctgatgggcctgctgcccggcctggccagcgccatgaagtacctgtctgagatgggctacgtgcaccggggcctggccgcccggcacgtgctggtgtccagtgacctggtgtgcaagatcagcggcttcggccggggcccccgggacagaagtgaggccgtgtacaccaccatgagcggccgcagccctgccctgtgggccgcccctgagaccctgcagtttggccacttcagcagcgccagtgatgtgtggagctttggcatcatcatgtgggaggtgatggcctttggagagcggccctactgggacatgagcggccaggatgtgatcaaggctgtggaggatggcttccggctgcccccacccaggaactgccccaacctgctgcaccggctgatgctggactgctggcagaaggaccccggggagcggccccgcttcagccagatccacagcatcctgagcaagatggtgcaggaccctgagccccccaagtgtgccctgaccacctgccccaggcctcccacccccctggccgaccgggccttcagcaccttccccagctttggatctgtgggcgcctggctggaggccctggacctgtgccgctacaaggacagctttgctgctgctggctacggcagcctggaggccgtggccgagatgacagcccaggacctggtgtccctgggcatcagcctggccgagcaccgggaggccctgctgagcggcatcagcgccctgcaggcccgggtgctgcagctgcagggccagggcgtgcaggacaacaagaacctgagcgtcatctggtgcctgtttgagtggcagctgctggaccactgcatcgccggcgtggagggcctgctgccccccagcagcaggactggagtgagccgcatctgtgtgtag

SEQ ID NO: 151269 - DNA, 3027 bp, synthetic construct
  misc_feature 1..3027: note = Description of Artificial Sequence: Synthetic coding sequence
  source 1..3027: mol_type = other DNA
atggagacctgtgccggcccccaccccctgcggctcttcctgtgcaggatgcagctgtgcctggccctgctgctgggcccctggaggcctggaacagctgaggaggtgatcctgctggacagcaaggccagccaggccgagctgggctggacagccctgcccagcaatggctgggaggagatcagcggcgtggatgaacatgaccggcccatccgcacctaccaggtgtgcaatgtgctggagcccaaccaggacaactggctgcagacaggctggatcagccggggccggggccagaggatctttgtggagctgcagttcaccctgcgggactgcagcagcatccctggagctgctggcacctgcaaggagaccttcaacgtgtactacctggagacagaagctgacctgggccggggccggccccggctgggcggcagccggcccaggaagattgacaccatcgctgctgatgagagcttcacccagggcgacctgggggagaggaagatgaagctgaacacagaggtgcgggagatcggccccctgagcagaagaggcttccacctggccttccaggatgtgggcgcctgtgtggccctggtgtctgtgcgggtgtactacaagcagtgccgggccaccgtgcggggcctggccaccttccctgccacagctgctgagagcgccttcagcaccctggtggaggtggccggcacctgtgtggcccacagcgagggggagcccggcagcccccccaggatgcactgtggggctgatggagagtggctggtgcctgtgggccgctgcagctgcagcgctggcttccaggagcggggggacttctgtgaggcctgccccccaggcttctacaaggtgagcccccggcggcccctgtgcagcccctgcccagagcacagccgggccctggagaatgccagcaccttctgtgtgtgccaggacagctatgcccggagccccacagatcctccttctgccagctgcaccaggcctccttctgccccccgggacctgcagtacagcctgagccgcagccccctggtgctgcggctgcgctggctgcccccagctgacagcggcggccgcagtgatgtgacctacagcctgctgtgcctgcgctgtggccgggagggccctgctggggcctgtgagccctgtggcccccgggtggccttcctgccccggcaggccggcctgcgggagagagctgccaccctgctgcacctgcggcctggggcccgctacacagtgcgggtggccgccctgaatggagtgtctggccctgctgctgctgctggcaccacctacgcccaggtgacagtgtccactggacctggggccccctgggaggaggatgagatcagaagagacagagtggagccccagagcgtgtccctgtcctggagggagcccatcccagctggggcccctggggccaatgacacagaatatgagatccgctactatgagaagggccagagcgagcagacctacagcatggtgaagacaggagcccccaccgtgacagtgaccaacctgaagccagccaccaggtatgtgttccagatccgggccgccagccctggccccagctgggaggcccagagcttcaaccccagcattgaggtgcagaccctgggggaggccgccagcggcagccgggaccagagccctgccatcgtggtgacagtggtgaccatcagcgccctgctggtgctgggctctgtgatgtctgtgctggccatctggaggcggccctgcagctatggaaaaggaggaggagatgcccatgatgaggaggagctgtacttccacttcaaggtgcccaccaggaggaccttcctggacccccagagctgtggggacctgctgcaggccgtgcacctgtttgccaaggagctggatgccaagtctgtgaccctggagaggagcctgggcggcggccgctttggagagctgtgctgcggctgcctgcagctgcccggccggcaggagctgctggtggccgtgcacatgctgcgggacagcgccagtgacagccagaggctgggcttcctggccgaggccctgaccctgggccagtttgaccacagccacatcgtgcggctggagggcgtggtgacccggggcagcaccctgatgattgtgacagagtacatgagccacggggccctggatggcttcctgcggagacatgagggccagctggtggccggccagctgatgggcctgctgcccggcctggccagcgccatgaagtacctgtctgagatgggctacgtgcaccggggcctggccgcccggcacgtgctggtgtccagtgacctggtgtgcaagatcagcggcttcggccggggcccccgggacagaagtgaagctgtgtacaccaccatgagcggccgcagccctgccctgtgggccgcccctgagaccctgcagtttggccacttcagcagcgccagtgatgtgtggagctttggcatcatcatgtgggaggtgatggccttcggggagcggccctactgggacatgagcggccaggacgtcatcaaggctgtggaggatggcttccggctgcccccaccaagaaactgccccaacctgctgcaccggctgatgctggactgctggcagaaggaccctggagagcggccccgcttcagccagatccacagcatcctgagcaagatggtgcaggaccctgagccccccaagtgtgccctgaccacctgcccccggccccccacccccctggccgaccgggccttcagcaccttccccagctttggatctgtgggcgcctggctggaggccctggacctgtgccgctacaaggacagctttgctgctgctggctacggcagcctggaggccgtggccgagatgacagcccaggacctggtgtccctgggcatcagcctggccgagcaccgggaggccctgctgagcggcatcagcgccctgcaggcccgggtgctgcagctgcagggccagggcgtgcaggtgtag

SEQ ID NO: 151270 - DNA, 3045 bp, synthetic construct
  misc_feature 1..3045: note = Description of Artificial Sequence: Synthetic coding sequence
  source 1..3045: mol_type = other DNA
atggagacctgtgccggcccccaccccctgcggctcttcctgtgcaggatgcagctgtgcctggccctgctgctgggcccctggaggcctggaacagctgaggaggtgatcctgctggacagcaaggccagccaggccgagctgggctggacagccctgcccagcaatggctgggaggagatcagcggcgtggatgaacatgaccggcccatccgcacctaccaggtgtgcaatgtgctggagcccaaccaggacaactggctgcagacaggctggatcagccggggccggggccagaggatctttgtggagctgcagttcaccctgcgggactgcagcagcatccctggagctgctggcacctgcaaggagaccttcaacgtgtactacctggagacagaagctgacctgggccggggccggccccggctgggcggcagccggcccaggaagattgacaccatcgctgctgatgagagcttcacccagggcgacctgggggagaggaagatgaagctgaacacagaggtgcgggagatcggccccctgagcagaagaggcttccacctggccttccaggatgtgggcgcctgtgtggccctggtgtctgtgcgggtgtactacaagcagtgccgggccaccgtgcggggcctggccaccttccctgccacagctgctgagagcgccttcagcaccctggtggaggtggccggcacctgtgtggcccacagcgagggggagcccggcagcccccccaggatgcactgtggggctgatggagagtggctggtgcctgtgggccgctgcagctgcagcgctggcttccaggagcggggggacttctgtgaggcctgccccccaggcttctacaaggtgagcccccggcggcccctgtgcagcccctgcccagagcacagccgggccctggagaatgccagcaccttctgtgtgtgccaggacagctatgcccggagccccacagatcctccttctgccagctgcaccaggcctccttctgccccccgggacctgcagtacagcctgagccgcagccccctggtgctgcggctgcgctggctgcccccagctgacagcggcggccgcagtgatgtgacctacagcctgctgtgcctgcgctgtggccgggagggccctgctggggcctgtgagccctgtggcccccgggtggccttcctgccccggcaggccggcctgcgggagagagctgccaccctgctgcacctgcggcctggggcccgctacacagtgcgggtggccgccctgaatggagtgtctggccctgctgctgctgctggcaccacctacgcccaggtgacagtgtccactggacctggggccccctgggaggaggatgagatcagaagagacagagtggagccccagagcgtgtccctgtcctggagggagcccatcccagctggggcccctggggccaatgacacagaatatgagatccgctactatgagaagggccagagcgagcagacctacagcatggtgaagacaggagcccccaccgtgacagtgaccaacctgaagccagccaccaggtatgtgttccagatccgggccgccagccctggccccagctgggaggcccagagcttcaaccccagcattgaggtgcagaccctgggggaggccgccagcggcagccgggaccagagccctgccatcgtggtgacagtggtgaccatcagcgccctgctggtgctgggctctgtgatgtctgtgctggccatctggaggcggccctgcagctatggaaaaggaggaggagatgcccatgatgaggaggagctgtacttccacttcaaggtgcccaccaggaggaccttcctggacccccagagctgtggggacctgctgcaggccgtgcacctgtttgccaaggagctggatgccaagtctgtgaccctggagaggagcctgggcggcggccgctttggagagctgtgctgcggctgcctgcagctgcccggccggcaggagctgctggtggccgtgcacatgctgcgggacagcgccagtgacagccagaggctgggcttcctggccgaggccctgaccctgggccagtttgaccacagccacatcgtgcggctggagggcgtggtgacccggggcagcaccctgatgattgtgacagagtacatgagccacggggccctggatggcttcctgcggagacatgagggccagctggtggccggccagctgatgggcctgctgcccggcctggccagcgccatgaagtacctgtctgagatgggctacgtgcaccggggcctggccgcccggcacgtgctggtgtccagtgacctggtgtgcaagatcagcggcttcggccggggcccccgggacagaagtgaagctgtgtacaccaccatgagcggccgcagccctgccctgtgggccgcccctgagaccctgcagtttggccacttcagcagcgccagtgatgtgtggagctttggcatcatcatgtgggaggtgatggccttcggggagcggccctactgggacatgagcggccaggacgtcatcaaggctgtggaggatggcttccggctgcccccaccaagaaactgccccaacctgctgcaccggctgatgctggactgctggcagaaggaccctggagagcggccccgcttcagccagatccacagcatcctgagcaagatggtgcaggaccctgagccccccaagtgtgccctgaccacctgcccccggccccccacccccctggccgaccgggccttcagcaccttccccagctttggatctgtgggcgcctggctggaggccctggacctgtgccgctacaaggacagctttgctgctgctggctacggcagcctggaggccgtggccgagatgacagcccaggacctggtgtccctgggcatcagcctggccgagcaccgggaggccctgctgagcggcatcagcgccctgcaggcccgggtgctgcagctgcagggccagggcgtgcaggtgatcatcaagacctgcctgtag

SEQ ID NO: 151271 - DNA, 468 bp, synthetic construct
  misc_feature 1..468: note = Description of Artificial Sequence: Synthetic coding sequence
  source 1..468: mol_type = other DNA
atggtgaagacaggagcccccaccgtgacagtgaccaacctgaagccagccacccgctacgtgttccagatccgggccgccagccctggccccagctgggaggcccagagcttcaaccccagcattgaggtgcagaccctgggggaggccgccagcggcagccgggaccagagccctgccatcgtggtgacagtggtgaccatcagcgccctgctggtgctgggctctgtgatgtctgtgctggccatctggaggcggccctgcagctatggcaagggcggcggagatgcccatgatgaggaggagctgtacttccacttcaaggtgcccaccaggaggaccttcctggacccccagagctgtggggacctgctgcaggccgtgcacctgtttgccaaggagctggatgccaagtctgtgaccctggagaggagcctgggcggcggcctggagaccagcccccactag

SEQ ID NO: 151272 - DNA, 2931 bp, synthetic construct
  misc_feature 1..2931: note = Description of Artificial Sequence: Synthetic coding sequence
  source 1..2931: mol_type = other DNA
atggagctgcaggccgcccgggcctgctttgccctgctgtggggctgtgccctggccgctgctgctgctgcccagggcaaggaggtggtgctgctggactttgctgctgctggaggagagctgggctggctgacccacccctacggcaagggctgggacctgatgcagaacatcatgaatgacatgcccatctacatgtacagcgtgtgcaatgtgatgtctggggaccaggacaactggctgcggaccaactgggtgtacagaggagaggccgagcgcatcttcatcgagctgaagttcaccgtgcgggactgcaacagcttccctggaggagccagcagctgcaaggagaccttcaacctgtactatgcagagagtgacctggactatggcaccaacttccagaagaggctcttcaccaagattgacaccatcgccccagatgagatcaccgtgtccagtgactttgaggcccggcacgtgaagctgaatgtggaggagaggtctgtgggccccctgaccaggaagggcttctacctggccttccaggacattggagcctgtgtggccctgctgtctgtgcgggtgtactacaagaagtgcccagagctgctgcagggcctggcccacttccctgagaccatcgccggcagtgatgcccccagcctggccaccgtggccggcacctgtgtggaccatgctgtggtgcccccaggaggagaggagcccaggatgcactgtgctgtggatggagagtggctggtgcccatcggccagtgcctgtgccaggccggctatgagaaggtggaggatgcctgccaggcctgcagccctggcttcttcaagtttgaggccagcgagagcccctgcctggagtgcccagagcacaccctgcccagccctgagggcgccaccagctgtgaatgtgaggagggcttcttccgggccccccaggaccctgcctccatgccctgcacccggccccccagcgccccccactacctgacagctgtgggcatgggcgccaaggtggagctgcgctggaccccaccccaggacagcggcggccgggaggacatcgtgtacagcgtgacctgtgagcagtgctggccagagagcggagaatgtggcccctgtgaggcctctgtgcgctacagcgagcccccccacggcctgaccaggacctctgtgacagtgtctgacctggagccccacatgaactacaccttcaccgtggaggccagaaatggagtgtctggcctggtgaccagccgctccttcagaacagcctctgtgtccatcaaccagacagagccccccaaggtgcggctggagggccgcagcaccaccagcctgtctgtgtcctggagcatccccccaccccagcagagccgggtgtggaagtatgaggtgacctacaggaagaagggggacagcaacagctacaacgtgagaagaacagagggcttctctgtgaccctggatgacctggccccagacaccacctacctggtgcaggtgcaggccctgacccaggagggccagggcgccggcagcaaggtgcatgagttccagaccctgagccctgagggcagcggcaacctggccgtcatcggcggcgtggccgtgggcgtggtgctgctgctggtgctggccggcgtgggcttcttcatccacagaagaaggaagaaccagagggcccggcagagcccagaagatgtgtacttcagcaagtctgagcagctgaagcccctgaagacctacgtggacccccacacctatgaggaccccaaccaggccgtgctgaagttcaccacagagatccaccccagctgtgtgacccggcagaaggtgattggagctggggagtttggagaggtgtacaagggcatgctgaagaccagcagcggcaagaaggaggtgcctgtggccatcaagaccctgaaggccggctacacagagaagcagagggtggacttcctgggggaggccggcatcatgggccagttcagccaccacaacatcatccggctggagggcgtcatcagcaagtacaagcccatgatgatcatcacagagtacatggagaatggagccctggacaagttcctgcgggagaaggatggagagttctctgtgctgcagctggtgggcatgctgcggggcattgctgctggcatgaagtacctggccaacatgaactacgtgcaccgggacctggccgccaggaacatcctggtgaacagcaacctggtgtgcaaggtgtctgactttggcctgagccgggtgctggaggatgatcctgaggccacctacaccaccagcggcggcaagatccccatccgctggacagcccctgaggccatctcctacaggaagttcaccagcgccagtgatgtgtggagctttggaattgtgatgtgggaggtgatgacctatggagagcggccctactgggagctgagcaaccacgaggtgatgaaggccatcaatgatggcttccggctgcccacccccatggactgccccagcgccatctaccagctgatgatgcagtgctggcagcaggagcgggcccggcggcccaagtttgctgacatcgtgtccatcctggacaagctgatccgggccccagacagcctgaagaccctggccgactttgacccccgggtgtccatccggctgcccagcaccagcggcagcgagggcgtgcccttcagaacagtgtctgagtggctggagagcatcaagatgcagcagtacacagagcacttcatggccgccggctacacagccatcgagaaggtggtgcagatgaccaatgatgacatcaagagaattggagtgcggctgcccggccaccagaagagaattgcctacagcctgctgggcctgaaggaccaggtgaacacagtgggcatccccatctag

SEQ ID NO: 151273 - DNA, 2952 bp, synthetic construct
  misc_feature 1..2952: note = Description of Artificial Sequence: Synthetic coding sequence
  source 1..2952: mol_type = other DNA
atggactgccagctgagcatcctgctgctgctgagctgcagcgtgctggacagctttggagagctgatcccccagcccagcaatgaggtgaacctgctggacagcaagaccatccagggcgagctgggctggatctcctaccccagccacggctgggaggagatcagcggcgtggatgagcactacacccccatccgcacctaccaggtgtgcaatgtgatggaccacagccagaacaactggctgcggaccaactgggtgcccagaaattctgcccagaagatctacgtggagctgaagttcaccctgcgggactgcaacagcatccccctggtgctgggcacctgcaaggagaccttcaacctgtactacatggagagtgatgatgaccatggagtgaagttccgggagcaccagttcaccaagattgacaccatcgccgcagatgagagcttcacccagatggacctgggggaccgcatcctgaagctgaacacagagatccgggaggtgggccctgtgaacaagaagggcttctacctggccttccaggatgtgggcgcctgtgtggccctggtgtctgtgcgggtgtacttcaagaagtgccccttcaccgtgaagaacctggccatgtttcctgacacagtgcccatggacagccagagcctggtggaggtgcggggcagctgtgtgaacaacagcaaggaggaggacccccccaggatgtactgcagcacagaaggagagtggctggtgcccatcggcaagtgcagctgcaatgccggctatgaggagcggggcttcatgtgccaggcctgcaggcctggcttctacaaggccctggatggcaacatgaagtgtgccaagtgccccccccacagcagcacccaggaggatggctccatgaactgccgctgtgagaacaactacttccgggctgacaaggaccccccatccatggcctgcaccaggcctcccagcagccccagaaatgtcatcagcaacatcaatgagaccagcgtcatcctggactggagctggcccctggacacaggaggcaggaaggatgtgaccttcaacatcatctgcaagaagtgtggctggaacatcaagcagtgtgagccctgcagccccaacgtgcgcttcctgccccggcagtttggcctgaccaacaccaccgtgacagtgacagacctgctggcccacaccaactacacctttgaaattgatgctgtgaatggagtgtctgagctgagcagccccccccggcagtttgctgctgtgtccatcaccaccaaccaggccgcccccagccctgtgctgaccatcaagaaggacaggaccagcaggaacagcatcagcctgtcctggcaggagcctgagcaccccaacggcatcatcctggactatgaggtgaagtactatgagaagcaggagcaggagaccagctacaccatcctgcgggcccggggcaccaacgtgaccatcagcagcctgaagccagacaccatctacgtgttccagatccgggccaggacagctgctggctacggcaccaacagcaggaagtttgaatttgagaccagcccagacagcttcagcatcagcggggagagcagccaggtggtgatgattgccatctctgctgctgtggccatcatcctgctgactgtggtgatctacgtgctgattggccgcttctgtggctacaagagcaagcacggggctgatgagaagaggctgcactttggaaatggccacctgaagctgcccggcctgcggacctacgtggacccccacacctatgaggaccccacccaggccgtgcatgaatttgccaaggagctggatgccaccaacatcagcattgacaaggtggtgggcgctggggagtttggagaggtgtgcagcggccgcctgaagctgcccagcaagaaggagatctctgtggccatcaagaccctgaaggtgggctacacagagaagcagaggcgggacttcctgggggaggccagcatcatgggccagtttgaccaccccaacatcatccggctggagggcgtggtgaccaagagcaagcctgtgatgattgtgacagagtacatggagaatggcagcctggacagcttcctgaggaagcatgatgcccagttcaccgtcatccagctggtgggcatgctgcggggcatcgccagcggcatgaagtacctgagtgacatgggctacgtgcaccgggacctggccgccaggaacatcctgatcaacagcaacctggtgtgcaaggtgtctgactttggcctgagccgggtgctggaggatgatcctgaggccgcctacaccacccggggcggcaagatccccatccgctggaccagccctgaggccatcgcctacaggaagttcaccagcgccagtgatgtgtggagctatggcatcgtgctgtgggaggtgatgtcctatggagagcggccctactgggagatgagcaaccaggacgtcatcaaggctgtggatgagggctaccgcctgcccccacccatggactgcccagctgccctgtaccagctgatgctggactgctggcagaaggacaggaacaaccggcccaagtttgagcagatcgtgtccatcctggacaagctgatcagaaatcctggcagcctgaagatcatcaccagcgctgctgcccggcccagcaacctgctgctggaccagagcaatgtggacatcaccaccttccgcaccaccggggactggctgaatggagtgtggacagcccactgcaaggagatcttcaccggggtggagtacagcagctgtgacaccatcgccaagatcagcacagatgacatgaagaaggtgggcgtgacagtggtgggcccccagaagaagatcatcagcagcatcaaggccctggagacccagagcaagaatggacctgtgcctgtgtag

SEQ ID NO: 151274 - DNA, 1620 bp, synthetic construct
  misc_feature 1..1620: note = Description of Artificial Sequence: Synthetic coding sequence
  source 1..1620: mol_type = other DNA
atggactgccagctgagcatcctgctgctgctgagctgcagcgtgctggacagctttggagagctgatcccccagcccagcaatgaggtgaacctgctggacagcaagaccatccagggcgagctgggctggatctcctaccccagccacggctgggaggagatcagcggcgtggatgagcactacacccccatccgcacctaccaggtgtgcaatgtgatggaccacagccagaacaactggctgcggaccaactgggtgcccagaaattctgcccagaagatctacgtggagctgaagttcaccctgcgggactgcaacagcatccccctggtgctgggcacctgcaaggagaccttcaacctgtactacatggagagtgatgatgaccatggagtgaagttccgggagcaccagttcaccaagattgacaccatcgccgcagatgagagcttcacccagatggacctgggggaccgcatcctgaagctgaacacagagatccgggaggtgggccctgtgaacaagaagggcttctacctggccttccaggatgtgggcgcctgtgtggccctggtgtctgtgcgggtgtacttcaagaagtgccccttcaccgtgaagaacctggccatgtttcctgacacagtgcccatggacagccagagcctggtggaggtgcggggcagctgtgtgaacaacagcaaggaggaggacccccccaggatgtactgcagcacagaaggagagtggctggtgcccatcggcaagtgcagctgcaatgccggctatgaggagcggggcttcatgtgccaggcctgcaggcctggcttctacaaggccctggatggcaacatgaagtgtgccaagtgccccccccacagcagcacccaggaggatggctccatgaactgccgctgtgagaacaactacttccgggctgacaaggaccccccatccatggcctgcaccaggcctcccagcagccccagaaatgtcatcagcaacatcaatgagaccagcgtcatcctggactggagctggcccctggacacaggaggcaggaaggatgtgaccttcaacatcatctgcaagaagtgtggctggaacatcaagcagtgtgagccctgcagccccaacgtgcgcttcctgccccggcagtttggcctgaccaacaccaccgtgacagtgacagacctgctggcccacaccaactacacctttgaaattgatgctgtgaatggagtgtctgagctgagcagccccccccggcagtttgctgctgtgtccatcaccaccaaccaggccgcccccagccctgtgctgaccatcaagaaggacaggaccagcaggaacagcatcagcctgtcctggcaggagcctgagcaccccaacggcatcatcctggactatgaggtgaagtactatgagaagcaggagcaggagaccagctacaccatcctgcgggcccggggcaccaacgtgaccatcagcagcctgaagccagacaccatctacgtgttccagatccgggccaggacagctgctggctacggcaccaacagcaggaagtttgaatttgagaccagcccagactgcatgtactacttcaatgctgtgtag

SEQ ID NO: 151275 - DNA, 3114 bp, synthetic construct
  misc_feature 1..3114: note = Description of Artificial Sequence: Synthetic coding sequence
  source 1..3114: mol_type = other DNA
atgaggggcagcggccccagaggagctggaagaagaagaccacccagcggcggcggggacacccccatcaccccagccagcctggccggctgctacagcgccccccggcgggcccccctgtggacctgcctgctgctgtgtgccgccctgcggaccctgctggccagccccagcaatgaggtgaacctgctggacagcaggacagtgatgggagacctgggctggatcgccttccccaagaatggctgggaggagatcggggaggtggatgaaaattatgcccccatccacacctaccaggtgtgcaaggtgatggagcagaaccagaacaactggctgctgacctcctggatcagcaatgaaggagccagccgcatcttcatcgagctgaagttcaccctgcgggactgcaacagcctgcccggcggcctgggcacctgcaaggagaccttcaacatgtactactttgaaagtgatgaccagaatggaagaaacatcaaggagaaccagtacatcaagattgacaccatcgctgctgatgagagcttcacagagctggacctgggggacagagtgatgaagctgaacacagaggtgagagatgtgggccccctgagcaagaagggcttctacctggccttccaggatgtgggcgcctgcatcgccctggtgtctgtgcgggtgtactacaagaagtgccccagcgtggtgcgccacctggccgtgtttcctgacaccatcaccggggctgacagcagccagctgctggaggtgtctggcagctgtgtgaaccacagcgtgacagatgagccccccaagatgcactgcagcgctgagggggagtggctggtgcccatcggcaagtgcatgtgcaaggccggctatgaggagaagaatggcacctgccaggtgtgcaggcctggcttcttcaaggccagcccccacatccagagctgtgggaaatgtcctccccacagctacacccatgaggaggccagcaccagctgtgtgtgtgagaaggactacttccggcgggagagtgacccccccaccatggcctgcaccaggcctccttctgcccccagaaatgccatcagcaatgtgaatgagaccagcgtcttcctggagtggatccccccagctgacacaggaggcaggaaggatgtgtcctactacatcgcctgcaagaagtgcaacagccacgccggcgtgtgtgaagaatgtggcggccacgtgcgctacctgccccggcagagcggcctgaagaacacctctgtgatgatggtggacctgctggcccacaccaactacacctttgaaattgaagctgtgaatggagtgtctgacctgagccctggggcccggcagtatgtgtctgtgaatgtgaccaccaaccaggccgcccccagccctgtgaccaacgtgaagaagggcaagatcgccaagaacagcatcagcctgtcctggcaggagccagaccggcccaacggcatcatcctggagtatgagatcaagtactttgagaaggaccaggagaccagctacaccatcatcaagagcaaggagaccaccatcacagctgagggcctgaagccagcctctgtgtatgtgttccagatccgggccaggacagctgctggctacggcgtcttcagcagaagatttgaatttgagaccacccctgtgtttgctgccagcagtgaccagagccagatccctgtgattgctgtgtctgtgacagtgggcgtcatcctgctggccgtggtgattggagtgctgctgagcggcagctgctgtgaatgtggctgcggccgggccagcagcctgtgtgctgtggcccaccccagcctcatctggaggtgtggctacagcaaggccaagcaggaccctgaggaggagaagatgcacttccacaacggccacatcaagctgcccggggtgaggacctacatcgacccccacacctatgaggaccccaaccaggccgtgcatgaatttgccaaggagattgaggccagctgcatcaccatcgagcgggtgattggagctggggagtttggagaggtgtgcagcggccgcctgaagctgcccgggaagcgggagctgcctgtggccatcaagaccctgaaggtgggctacacagagaagcagaggcgggacttcctgggggaggccagcatcatgggccagtttgaccaccccaacatcatccacctggagggcgtggtgaccaagagcaagcctgtgatgattgtgacagagtacatggagaatggcagcctggacaccttcctgaagaagaatgatggccagttcaccgtcatccagctggtgggcatgctgcggggcatctctgctggcatgaagtacctgagtgacatgggctacgtgcaccgggacctggccgccaggaacatcctgatcaacagcaacctggtgtgcaaggtgtctgactttggcctgagccgggtgctggaggatgatcctgaggccgcctacaccacccggggcggcaagatccccatccgctggacagcccctgaggccatcgccttcaggaagttcaccagcgccagtgatgtgtggagctatggcatcgtgatgtgggaggtggtgtcctatggagagcggccctactgggagatgaccaaccaggacgtcatcaaggctgtggaggagggctaccgcctgcccagccccatggactgcccagctgccctgtaccagctgatgctggactgctggcagaaggagaggaacagccggcccaagtttgatgagatcgtgaacatgctggacaagctgatccggaaccccagcagcctgaagaccctggtgaatgccagctgccgggtgagcaacctgctggccgagcacagccccctgggcagcggggcctacagatctgtgggggagtggctggaggccatcaagatgggccgctacacagagatcttcatggagaatggctacagctccatggatgctgtggcccaggtgaccctggaggacctgcggcggctgggcgtgaccctggtgggccaccagaagaagatcatgaacagcctgcaggagatgaaggtgcagctggtgaatggcatggtgcccctgtag

SEQ ID NO: 151276 - DNA, 3048 bp, synthetic construct
  misc_feature 1..3048: note = Description of Artificial Sequence: Synthetic coding sequence
  source 1..3048: mol_type = other DNA
atgaggggcagcggccccagaggagctggaagaagaagaccacccagcggcggcggggacacccccatcaccccagccagcctggccggctgctacagcgccccccggcgggcccccctgtggacctgcctgctgctgtgtgccgccctgcggaccctgctggccagccccagcaatgaggtgaacctgctggacagcaggacagtgatgggagacctgggctggatcgccttccccaagaatggctgggaggagatcggggaggtggatgaaaattatgcccccatccacacctaccaggtgtgcaaggtgatggagcagaaccagaacaactggctgctgacctcctggatcagcaatgaaggagccagccgcatcttcatcgagctgaagttcaccctgcgggactgcaacagcctgcccggcggcctgggcacctgcaaggagaccttcaacatgtactactttgaaagtgatgaccagaatggaagaaacatcaaggagaaccagtacatcaagattgacaccatcgctgctgatgagagcttcacagagctggacctgggggacagagtgatgaagctgaacacagaggtgagagatgtgggccccctgagcaagaagggcttctacctggccttccaggatgtgggcgcctgcatcgccctggtgtctgtgcgggtgtactacaagaagtgccccagcgtggtgcgccacctggccgtgtttcctgacaccatcaccggggctgacagcagccagctgctggaggtgtctggcagctgtgtgaaccacagcgtgacagatgagccccccaagatgcactgcagcgctgagggggagtggctggtgcccatcggcaagtgcatgtgcaaggccggctatgaggagaagaatggcacctgccaggtgtgcaggcctggcttcttcaaggccagcccccacatccagagctgtgggaaatgtcctccccacagctacacccatgaggaggccagcaccagctgtgtgtgtgagaaggactacttccggcgggagagtgacccccccaccatggcctgcaccaggcctccttctgcccccagaaatgccatcagcaatgtgaatgagaccagcgtcttcctggagtggatccccccagctgacacaggaggcaggaaggatgtgtcctactacatcgcctgcaagaagtgcaacagccacgccggcgtgtgtgaagaatgtggcggccacgtgcgctacctgccccggcagagcggcctgaagaacacctctgtgatgatggtggacctgctggcccacaccaactacacctttgaaattgaagctgtgaatggagtgtctgacctgagccctggggcccggcagtatgtgtctgtgaatgtgaccaccaaccaggccgcccccagccctgtgaccaacgtgaagaagggcaagatcgccaagaacagcatcagcctgtcctggcaggagccagaccggcccaacggcatcatcctggagtatgagatcaagtactttgagaaggaccaggagaccagctacaccatcatcaagagcaaggagaccaccatcacagctgagggcctgaagccagcctctgtgtatgtgttccagatccgggccaggacagctgctggctacggcgtcttcagcagaagatttgaatttgagaccacccctgtgtttgctgccagcagtgaccagagccagatccctgtgattgctgtgtctgtgacagtgggcgtcatcctgctggccgtggtgattggagtgctgctgtctggaagaagatgtggctacagcaaggccaagcaggaccctgaggaggagaagatgcacttccacaacggccacatcaagctgcccggggtgaggacctacatcgacccccacacctatgaggaccccaaccaggccgtgcatgaatttgccaaggagattgaggccagctgcatcaccatcgagcgggtgattggagctggggagtttggagaggtgtgcagcggccgcctgaagctgcccgggaagcgggagctgcctgtggccatcaagaccctgaaggtgggctacacagagaagcagaggcgggacttcctgggggaggccagcatcatgggccagtttgaccaccccaacatcatccacctggagggcgtggtgaccaagagcaagcctgtgatgattgtgacagagtacatggagaatggcagcctggacaccttcctgaagaagaatgatggccagttcaccgtcatccagctggtgggcatgctgcggggcatctctgctggcatgaagtacctgagtgacatgggctacgtgcaccgggacctggccgccaggaacatcctgatcaacagcaacctggtgtgcaaggtgtctgactttggcctgagccgggtgctggaggatgatcctgaggccgcctacaccacccggggcggcaagatccccatccgctggacagcccctgaggccatcgccttcaggaagttcaccagcgccagtgatgtgtggagctatggcatcgtgatgtgggaggtggtgtcctatggagagcggccctactgggagatgaccaaccaggacgtcatcaaggctgtggaggagggctaccgcctgcccagccccatggactgcccagctgccctgtaccagctgatgctggactgctggcagaaggagaggaacagccggcccaagtttgatgagatcgtgaacatgctggacaagctgatccggaaccccagcagcctgaagaccctggtgaatgccagctgccgggtgagcaacctgctggccgagcacagccccctgggcagcggggcctacagatctgtgggggagtggctggaggccatcaagatgggccgctacacagagatcttcatggagaatggctacagctccatggatgctgtggcccaggtgaccctggaggacctgcggcggctgggcgtgaccctggtgggccaccagaagaagatcatgaacagcctgcaggagatgaaggtgcagctggtgaatggcatggtgcccctgtag

SEQ ID NO: 151277 - DNA, 3015 bp, synthetic construct
  misc_feature 1..3015: note = Description of Artificial Sequence: Synthetic coding sequence
  source 1..3015: mol_type = other DNA
atgaggggcagcggccccagaggagctggaagaagaagaccacccagcggcggcggggacacccccatcaccccagccagcctggccggctgctacagcgccccccggcgggcccccctgtggacctgcctgctgctgtgtgccgccctgcggaccctgctggccagccccagcaatgaggtgaacctgctggacagcaggacagtgatgggagacctgggctggatcgccttccccaagaatggctgggaggagatcggggaggtggatgaaaattatgcccccatccacacctaccaggtgtgcaaggtgatggagcagaaccagaacaactggctgctgacctcctggatcagcaatgaaggagccagccgcatcttcatcgagctgaagttcaccctgcgggactgcaacagcctgcccggcggcctgggcacctgcaaggagaccttcaacatgtactactttgaaagtgatgaccagaatggaagaaacatcaaggagaaccagtacatcaagattgacaccatcgctgctgatgagagcttcacagagctggacctgggggacagagtgatgaagctgaacacagaggtgagagatgtgggccccctgagcaagaagggcttctacctggccttccaggatgtgggcgcctgcatcgccctggtgtctgtgcgggtgtactacaagaagtgccccagcgtggtgcgccacctggccgtgtttcctgacaccatcaccggggctgacagcagccagctgctggaggtgtctggcagctgtgtgaaccacagcgtgacagatgagccccccaagatgcactgcagcgctgagggggagtggctggtgcccatcggcaagtgcatgtgcaaggccggctatgaggagaagaatggcacctgccaggtgtgcaggcctggcttcttcaaggccagcccccacatccagagctgtgggaaatgtcctccccacagctacacccatgaggaggccagcaccagctgtgtgtgtgagaaggactacttccggcgggagagtgacccccccaccatggcctgcaccaggcctccttctgcccccagaaatgccatcagcaatgtgaatgagaccagcgtcttcctggagtggatccccccagctgacacaggaggcaggaaggatgtgtcctactacatcgcctgcaagaagtgcaacagccacgccggcgtgtgtgaagaatgtggcggccacgtgcgctacctgccccggcagagcggcctgaagaacacctctgtgatgatggtggacctgctggcccacaccaactacacctttgaaattgaagctgtgaatggagtgtctgacctgagccctggggcccggcagtatgtgtctgtgaatgtgaccaccaaccaggccgcccccagccctgtgaccaacgtgaagaagggcaagatcgccaagaacagcatcagcctgtcctggcaggagccagaccggcccaacggcatcatcctggagtatgagatcaagtactttgagaaggaccaggagaccagctacaccatcatcaagagcaaggagaccaccatcacagctgagggcctgaagccagcctctgtgtatgtgttccagatccgggccaggacagctgctggctacggcgtcttcagcagaagatttgaatttgagaccacccctgtgtctgtggccgccagcagtgaccagagccagatccctgtgattgctgtgtctgtgacagtgggcgtcatcctgctggccgtggtgattggagtgctgctgagcggcagctgctgtgaatgtggctgcggccgggccagcagcctgtgtgctgtggcccaccccagcctcatctggaggtgtggctacagcaaggccaagcaggaccctgaggaggagaagatgcacttccacaacggccacatcaagctgcccggggtgaggacctacatcgacccccacacctatgaggaccccaaccaggccgtgcatgaatttgccaaggagattgaggccagctgcatcaccatcgagagggtcatcggggccggggagtttggagaggtgtgcagcggccgcctgaagctgcccgggaagcgggagctgcctgtggccatcaagaccctgaaggtgggctacacagagaagcagaggcgggacttcctgggggaggccagcatcatgggccagtttgaccaccccaacatcatccacctggagggcgtggtgaccaagagcaagcctgtgatgattgtgacagagtacatggagaatggcagcctggacaccttcctgaagaagaatgatggccagttcaccgtcatccagctggtgggcatgctgcggggcatctctgctggcatgaagtacctgagtgacatgggctacgtgcaccgggacctggccgccaggaacatcctgatcaacagcaacctggtgtgcaaggtgtctgactttggcctgagccgggtgctggaggatgatcctgaggccgcctacaccacccggggcggcaagatccccatccgctggacagcccctgaggccatcgccttcaggaagttcaccagcgccagtgatgtgtggagctatggaattgtgatgtgggaggtggtgtcctatggagagcggccctactgggagatgaccaaccaggatgtgatcaaggctgtggaggagggctaccgcctgcccagccccatggactgcccagctgccctgtaccagctgatgctggactgctggcagaaggagaggaacagccggcccaagtttgatgaaattgtgaacatgctggacaagctgatccggaaccccagcagcctgaagaccctggtgaatgccagctgccgggtgagcaacctgctggccgagcacagccccctgggcagcggggcctacagatctgtgggggagtggctggaggccatcaagatgggccgctacacagagatcttcatggagaatggctacagctccatggatgctgtggcccaggtgaccctggagtag

SEQ ID NO: 151278 - DNA, 3018 bp, synthetic construct
  misc_feature 1..3018: note = Description of Artificial Sequence: Synthetic coding sequence
  source 1..3018: mol_type = other DNA
atggccccagcccggggccgcctgcccccagccctgtgggtggtgacagctgctgctgctgctgccacctgtgtgtctgctgcccggggggaggtgaacctgctggacaccagcaccatccatggagactggggctggctgacctacccagcccacggctgggacagcatcaatgaggtggatgagagcttccagcccatccacacctaccaggtgtgcaatgtgatgagccccaaccagaacaactggctgcggacctcctgggtgcccagagatggagccaggagagtgtatgcagagatcaagttcaccctgcgggactgcaacagcatgcctggggtgctgggcacctgcaaggagaccttcaacctgtactacctggagagtgaccgggacctgggcgccagcacccaggagagccagttcctgaagattgacaccatcgccgcagatgagagcttcaccggggctgacctgggcgtgcggcggctgaagctgaacacagaggtgcgctctgtgggccccctgagcaagaggggcttctacctggccttccaggacatcggggcctgcctggccatcctgagcctgcgcatctactacaagaagtgcccagccatggtgaggaacctggccgccttcagcgaggccgtgactggagctgacagcagcagcctggtggaggtgcggggccagtgtgtgcgccacagcgaggagcgggacacccccaagatgtactgcagcgctgagggggagtggctggtgcccatcggcaaatgtgtgtgcagcgctggctatgaggagaggagagatgcctgtgtggcctgtgagctgggcttctacaagagcgcccctggggaccagctgtgtgcccgctgccccccccacagccacagcgctgccccagctgcccaggcctgccactgtgacctgagctactaccgggccgccctggacccccccagcagcgcctgcacccggccccccagcgcccctgtgaacctgatcagctctgtgaatggcacctctgtgaccctggagtgggccccacccctggaccccggcggccgcagtgacatcacctacaatgctgtgtgccgccgctgcccctgggccctgagccgctgtgaggcctgtggcagcggcaccaggtttgtgccccagcagaccagcctggtgcaggccagcctgctggtggccaacctgctggcccacatgaactacagcttctggattgaggccgtgaatggagtgtctgacctgagccctgagccccggcgggctgctgtggtgaacatcaccaccaaccaggccgcccccagccaggtggtggtgatccggcaggagagagctggccagacctctgtgtccctgctgtggcaggagcctgagcagcccaacggcatcatcctggagtatgagatcaagtactatgagaaggacaaggagatgcagagctacagcaccctgaaggctgtgaccacccgggccaccgtgtctggcctgaagccaggcacccgctacgtgttccaggtgcgggcccggaccagcgctggctgcggccgcttcagccaggccatggaggtggagaccgggaagccccggcccaggtatgacaccaggaccatcgtgtggatctgcctgaccctcatcaccggcctggtggtgctgctgctgctgctgatctgcaagaagaggcactgcggctacagcaaggccttccaggacagtgatgaggagaagatgcactaccagaatggccaggcccctcctcctgtgttcctgcccctgcaccaccccccaggcaagctgcctgagccccagttctatgcagagccccacacctatgaggagcccggccgggccggccgctccttcacccgggagattgaggccagccgcatccacatcgagaagatcatcggcagcggggacagcggggaggtgtgctacggccgcctgcgggtgcccggccagagagatgtgcctgtggccatcaaggccctgaaggccggctacacagagcggcagaggcgggacttcctgtctgaggccagcatcatgggccagtttgaccaccccaacatcatccggctggagggcgtggtgacccggggccgcctggccatgattgtgacagagtacatggagaatggcagcctggacaccttcctgcggacccatgatggccagttcaccatcatgcagctggtgggcatgctgcggggcgtgggcgccggcatgagatacctgagtgacctgggctacgtgcaccgggacctggccgccagaaatgtgctggtggacagcaacctggtgtgcaaggtgtctgactttggcctgagccgggtgctggaggatgatcctgatgctgcctacaccaccaccggcggcaagatccccatccgctggacagcccctgaggccatcgccttccgcaccttcagcagcgccagtgatgtgtggagctttggagtggtgatgtgggaggtgctggcctacggggagcggccctactggaacatgaccaacagagatgtgatcagctctgtggaggagggctaccgcctgcctgcccccatgggctgcccccacgccctgcaccagctgatgctggactgctggcacaaggaccgggcccagaggccccgcttcagccagatcgtgtctgtgctggatgccctgatccgcagccctgagagcctgcgggccacagccaccgtgagccgctgccccccaccagcctttgtgcgcagctgctttgacctgcggggcggcagcggcggcggcggcggcctgactgtgggggactggctggacagcatccgcatgggccgctacagagaccactttgctgctgggggctacagcagcctgggcatggtgctgaggatgaatgcccaggatgtgcgggccctgggcatcaccctgatgggccaccagaagaagatcctgggcagcatccagaccatgagggcccagctgaccagcacccagggcccccggcggcacctgtag

SEQ ID NO: 151279 - DNA, 1488 bp, synthetic construct
  misc_feature 1..1488: note = Description of Artificial Sequence: Synthetic coding sequence
  source 1..1488: mol_type = other DNA
atggccccagcccggggccgcctgcccccagccctgtgggtggtgacagctgctgctgctgctgccacctgtgtgtctgctgcccggggggaggtgaacctgctggacaccagcaccatccatggagactggggctggctgacctacccagcccacggctgggacagcatcaatgaggtggatgagagcttccagcccatccacacctaccaggtgtgcaatgtgatgagccccaaccagaacaactggctgcggacctcctgggtgcccagagatggagccaggagagtgtatgcagagatcaagttcaccctgcgggactgcaacagcatgcctggggtgctgggcacctgcaaggagaccttcaacctgtactacctggagagtgaccgggacctgggcgccagcacccaggagagccagttcctgaagattgacaccatcgccgcagatgagagcttcaccggggctgacctgggcgtgcggcggctgaagctgaacacagaggtgcgctctgtgggccccctgagcaagaggggcttctacctggccttccaggacatcggggcctgcctggccatcctgagcctgcgcatctactacaagaagtgcccagccatggtgaggaacctggccgccttcagcgaggccgtgactggagctgacagcagcagcctggtggaggtgcggggccagtgtgtgcgccacagcgaggagcgggacacccccaagatgtactgcagcgctgagggggagtggctggtgcccatcggcaaatgtgtgtgcagcgctggctatgaggagaggagagatgcctgtgtggcctgtgagctgggcttctacaagagcgcccctggggaccagctgtgtgcccgctgccccccccacagccacagcgctgccccagctgcccaggcctgccactgtgacctgagctactaccgggccgccctggacccccccagcagcgcctgcacccggccccccagcgcccctgtgaacctgatcagctctgtgaatggcacctctgtgaccctggagtgggccccacccctggaccccggcggccgcagtgacatcacctacaatgctgtgtgccgccgctgcccctgggccctgagccgctgtgaggcctgtggcagcggcaccaggtttgtgccccagcagaccagcctggtgcaggccagcctgctggtggccaacctgctggcccacatgaactacagcttctggattgaggccgtgaatggagtgtctgacctgagccctgagccccggcgggctgctgtggtgaacatcaccaccaaccaggccggcagaagaagaaacagcgtgccccagaggcctggccccccagccagccctgccagtgaccccagccgggaccagagcagcgctggagatgtgctgtgggccttccggcaggtgcccctgtggccctgtgccccccaccaggaccctgagctggaggccctgcactgcctgtag

SEQ ID NO: 151280 - DNA, 1488 bp, synthetic construct; identical to SEQ ID NO: 151279
  misc_feature 1..1488: note = Description of Artificial Sequence: Synthetic coding sequence
  source 1..1488: mol_type = other DNA

SEQ ID NO: 151281 - DNA, 2955 bp, synthetic construct
  misc_feature 1..2955: note = Description of Artificial Sequence: Synthetic coding sequence
  source 1..2955: mol_type = other DNA
atggccctggactacctgctgctgctgctgctggccagcgctgtggccgccatggaggagaccctgatggacaccaggacagccacagctgagctgggctggacagccaacccagccagcggctgggaggaggtgtctggctatgatgagaacctgaacaccatccgcacctaccaggtgtgcaatgtgtttgagcccaaccagaacaactggctgctgaccaccttcatcaacagaagaggagcccaccgcatctacacagagatgaggttcaccgtgcgggactgcagcagcctgcccaacgtgcccggcagctgcaaggagaccttcaacctgtactactatgaaacagattctgtgattgccaccaagaagagcgccttctggagcgaggccccctacctgaaggtggacaccatcgccgcagatgagagcttcagccaggtggactttggaggccgcctgatgaaggtgaacacagaggtgcgcagctttggccccctgaccagaaatggcttctacctggccttccaggactatggagcctgcatgagcctgctgtctgtgcgggtcttcttcaagaagtgccccagcatcgtgcagaactttgctgtgtttcctgagaccatgactggagctgagagcaccagcctggtgattgcccggggcacctgcatccccaatgctgaggaggtggatgtgcccatcaagctgtactgcaatggagatggagagtggatggtgcccatcggccgctgcacctgcaagccaggctatgagcctgagaacagcgtggcctgcaaggcctgcccagctggcaccttcaaggccagccaggaggccgagggctgcagccactgccccagcaacagccgcagccctgctgaggccagccccatctgcacctgcaggacaggctactacagagctgactttgaccccccagaggtggcctgcacctctgtgcccagcggccccagaaatgtcatcagcatcgtgaatgagaccagcatcatcctggagtggcaccccccccgggagaccggcggcagagatgatgtgacctacaacatcatctgcaagaagtgcagagctgacagaagaagctgcagccgctgtgatgacaacgtggagtttgtgccccggcagctgggcctgacagagtgccgggtgtccatcagcagcctgtgggcccacaccccctacacctttgacatccaggccatcaacggggtgagcagcaagagccccttccccccccagcacgtgtctgtgaacatcaccaccaaccaggccgcccccagcacagtgcccatcatgcaccaggtgtctgccaccatgaggagcatcaccctgtcctggccccagcctgagcagcccaacggcatcatcctggactatgagatccgctactatgagaaggagcacaatgagttcaacagctccatggcccggagccagaccaacacagccagaattgatggcctgcggcccggcatggtgtatgtggtgcaggtgcgggccaggacagtggccggctacggcaagttcagcggcaagatgtgcttccagaccctgacagatgatgactacaagtctgagctgcgggagcagctgcccctgattgctggcagcgctgctgctggggtggtgtttgtggtgtccctggtggccatcagcatcgtgtgcagcaggaagagggcctacagcaaggaggccgtgtacagcgacaagctgcagcactacagcacaggccggggcagccctggcatgaagatctacatcgaccccttcacctatgaggaccccaatgaggccgtgcgggagtttgccaaggagattgatgtgtcctttgtgaagattgaggaggtgattggagctggggagtttggagaggtgtacaagggccgcctgaagctgcccgggaagcgggagatctacgtggccatcaagaccctgaaggccggctacagcgagaagcagaggcgggacttcctgtctgaggccagcatcatgggccagtttgaccaccccaacatcatccggctggagggcgtggtgaccaagagcaggcctgtgatgatcatcacagagttcatggagaatggagccctggacagcttcctgcggcagaatgatggccagttcaccgtcatccagctggtgggcatgctgcggggcattgctgctggcatgaagtacctggccgagatgaactacgtgcaccgggacctggccgccaggaacatcctggtgaacagcaacctggtgtgcaaggtgtctgactttggcctgagccgctacctgcaggatgacaccagtgaccccacctacaccagcagcctgggcggcaagatccctgtgcgctggacagcccctgaggccatcgcctacaggaagttcaccagcgccagtgatgtgtggagctatggcatcgtgatgtgggaggtgatgagctttggagagcggccctactgggacatgagcaaccaggacgtcatcaatgccatcgagcaggactaccgcctgcccccacccatggactgcccagctgccctgcaccagctgatgctggactgctggcagaaggacaggaacagccggcccaggtttgctgagatcgtgaacaccctggacaagatgatcagaaatcctgccagcctgaagacagtggccaccatcacagctgtgcccagccagcccctgctggacaggagcatcccagacttcaccgccttcaccaccgtggatgactggctgagcgccatcaagatggtgcagtacagagacagcttcctgacagctggcttcaccagcctgcagctggtgacccagatgaccagcgaggacctgctgcgcatcggcatcaccctggccggccaccagaagaagatcctgaacagcatccacagcatgagggtgcagatcagccagagccccacagccatggcctag

SEQ ID NO: 151282 - DNA, 1638 bp, synthetic construct
  misc_feature 1..1638: note = Description of Artificial Sequence: Synthetic coding sequence
  source 1..1638: mol_type = other DNA
atgcaccaggtgtctgccaccatgaggagcatcaccctgtcctggccccagcctgagcagcccaacggcatcatcctggactatgagatccgctactatgagaaggagcacaatgagttcaacagctccatggcccggagccagaccaacacagccagaattgatggcctgcggcccggcatggtgtatgtggtgcaggtgcgggccaggacagtggccggctacggcaagttcagcggcaagatgtgcttccagaccctgacagatgatgactacaagtctgagctgcgggagcagctgcccctgattgctggcagcgctgctgctggggtggtgtttgtggtgtccctggtggccatcagcatcgtgtgcagcaggaagagggcctacagcaaggaggccgtgtacagcgacaagctgcagcactacagcacaggccggggcagccctggcatgaagatctacatcgaccccttcacctatgaggaccccaatgaagctgtgcgggagtttgccaaggagattgatgtgtcctttgtgaagattgaggaggtgattggagctggggagtttggagaggtgtacaagggccgcctgaagctgcccgggaagcgggagatctacgtggccatcaagaccctgaaggccggctacagcgagaagcagaggcgggacttcctgtctgaggccagcatcatgggccagtttgaccaccccaacatcatccggctggagggcgtggtgaccaagagcaggcctgtgatgatcatcacagagttcatggagaatggagccctggacagcttcctgcggcagaatgatggccagttcaccgtcatccagctggtgggcatgctgcggggcattgctgctggcatgaagtacctggccgagatgaactacgtgcaccgggacctggccgccaggaacatcctggtgaacagcaacctggtgtgcaaggtgtctgactttggcctgagccgctacctgcaggatgacaccagtgaccccacctacaccagcagcctgggcggcaagatccctgtgcgctggacagcccctgaggccatcgcctacaggaagttcaccagcgccagtgatgtgtggagctatggaattgtgatgtgggaggtgatgagctttggagagcggccctactgggacatgagcaaccaggatgtgatcaatgccatcgagcaggactaccgcctgcccccacccatggactgcccagctgccctgcaccagctgatgctggactgctggcagaaggacaggaacagccggcccaggtttgctgagatcgtgaacaccctggacaagatgatccggaacccagccagcctgaagacagtggccaccatcacagctgtgcccagccagcccctgctggacaggagcatcccagacttcaccgccttcaccaccgtggatgactggctgagcgccatcaagatggtgcagtacagagacagcttcctgacagctggcttcaccagcctgcagctggtgacccagatgaccagcgaggacctgctgagaattggcatcaccctggccggccaccagaagaagatcctgaacagcatccacagcatgagggtgcagatcagccagagccccacagccatggcctag

SEQ ID NO: 151283 - DNA, 2997 bp, synthetic construct
  misc_feature 1..2997: note = Description of Artificial Sequence: Synthetic coding sequence
  source 1..2997: mol_type = other DNA
atggcccgggcccggcccccacctccacccagccccccacctggcctgctgcccctgctgccccccctgctgctgctgcccctgctgctgctgcctgctggctgccgggccctggaggagaccctgatggacaccaagtgggtgaccagcgagctggcctggaccagccaccctgagagcggctgggaggaggtgtctggctatgatgaggccatgaaccccatccgcacctaccaggtgtgcaatgtgcgggagagcagccagaacaactggctgaggacaggcttcatctggaggagagatgtgcagagggtgtatgtggagctgaagttcaccgtgcgggactgcaacagcatccccaacatccctggcagctgcaaggagaccttcaacctcttctactatgaagctgacagtgatgtggccagcgccagcagccccttctggatggagaacccctacgtgaaggtggacaccatcgccccagatgagagcttcagccggctggatgctggccgggtgaacaccaaggtgcgcagctttggccccctgagcaaggccggcttctacctggccttccaggaccagggcgcctgcatgagcctcatctctgtgcgggccttctacaagaagtgtgccagcaccacagctggctttgccctcttccctgagaccctgactggagctgagcccaccagcctggtgattgcccctggcacctgcatccccaatgctgtggaggtgtctgtgcccctgaagctgtactgcaatggagatggagagtggatggtgcctgtgggcgcctgcacctgtgccactggacatgagcctgctgccaaggagagccagtgccggccctgccccccaggcagctacaaggccaagcagggcgagggcccctgcctgccctgcccccccaacagcaggaccaccagccctgctgccagcatctgcacctgccacaacaacttctacagagctgacagcgacagcgctgacagcgcctgcaccaccgtgcccagccccccccggggcgtcatcagcaatgtgaatgagaccagcctcatcctggagtggagcgagccccgggacctgggcggcagagatgacctgctgtacaacgtcatctgcaagaagtgccacggggccggcggggccagcgcctgcagccgctgtgatgacaacgtggagtttgtgccccggcagctgggcctgacagagcggcgggtgcacatcagccacctgctggcccacacccgctacacctttgaggtgcaggccgtgaatggagtgtctgggaagagccccctgccccccaggtatgctgctgtgaacatcaccaccaaccaggccgcccccagcgaggtgcccaccctgcggctgcacagcagcagcggcagcagcctgaccctgtcctgggcccctcctgagcggcccaacggggtcatcctggactatgagatgaagtactttgagaagtctgagggcatcgccagcacagtgaccagccagatgaacagcgtgcagctggatggcctgcggccagatgcccgctacgtggtgcaggtgcgggccaggacagtggccggctacggccagtacagcaggcctgctgagtttgagaccaccagcgagcggggcagcggggcccagcagctgcaggagcagctgcccctcatcgtgggcagcgccacagctggcctggtgtttgtggtggccgtggtggtgattgccatcgtgtgcctgaggaagcagagacatggcagtgacagcgagtacacagagaagctgcagcagtacatcgcccctggcatgaaggtgtacatcgaccccttcacctatgaggaccccaatgaggccgtgcgggagtttgccaaggagattgatgtgtcctgtgtgaagattgaggaggtgattggagctggggagtttggagaggtgtgccggggccgcctgaagcagcctggaagaagagaggtgtttgtggccatcaagaccctgaaggtgggctacacagagcggcagaggcgggacttcctgtctgaggccagcatcatgggccagtttgaccaccccaacatcatccggctggagggcgtggtgaccaagagcaggcctgtgatgatcctgacagagttcatggagaactgtgccctggacagcttcctgcggctgaatgatggccagttcaccgtcatccagctggtgggcatgctgcggggcattgctgctggcatgaagtacctgtctgagatgaactacgtgcaccgggacctggccgccaggaacatcctggtgaacagcaacctggtgtgcaaggtgtctgactttggcctgagccgcttcctggaggatgaccccagcgaccccacctacaccagcagcctgggcggcaagatccccatccgctggacagcccctgaggccatcgcctacaggaagttcaccagcgccagtgatgtgtggagctatggcatcgtgatgtgggaggtgatgtcctatggagagcggccctactgggacatgagcaaccaggacgtcatcaatgctgtggagcaggactaccgcctgcccccacccatggactgccccacagccctgcaccagctgatgctggactgctgggtgcgggacaggaacctgcggcccaagttcagccagatcgtgaacaccctggacaagctgatcagaaatgctgccagcctgaaggtgattgccagcgcccagagcggcatgagccagcccctgctggacagaacagtgcctgactacaccaccttcaccaccgtgggggactggctggatgccatcaagatgggccgctacaaggagagctttgtgtctgctggctttgccagctttgacctggtggcccagatgacagctgaggacctgctgcgcatcggcgtgaccctggccggccaccagaagaagatcctgagcagcatccaggacatgaggctgcagatgaaccagaccctgcctgtgcaggtgtag

SEQ ID NO: 151284 - DNA, 3066 bp, synthetic construct
  misc_feature 1..3066: note = Description of Artificial Sequence: Synthetic coding sequence
  source 1..3066: mol_type = other DNA
atggccacagaaggagctgcccagctgggcaacagagtggccggcatggtgtgcagcctgtgggtgctgctgctggtgtcctctgtgctggccctggaggaggtgctgctggacaccaccggggagaccagcgagatcggctggctgacctacccacctgggggctgggatgaggtgtctgtgctggatgaccagaggcggctgaccaggacctttgaggcctgccacgtggccggggcccctcctggcaccggccaggacaactggctgcagacccactttgtggagaggagaggagcccagagggcccacatccggctgcacttctctgtgcgggcctgcagcagcctgggcgtgtctgggggcacctgccgggagaccttcaccctgtactaccggcaggccgaggagccagacagcccagattctgtgtcctcctggcacctgaagcgctggaccaaggtggacaccatcgccgcagatgagagcttccccagcagcagcagcagcagcagcagcagcagcagcgctgcctgggccgtgggcccccacggggccggccagagagctggcctgcagctgaatgtgaaggagaggagctttggccccctgacccagaggggcttctacgtggccttccaggacaccggggcctgcctggccctggtggccgtgcggctcttctcctacacctgcccagctgtgctgcggagctttgccagcttccctgagacccaggccagcggggccggcggggccagcctggtggccgctgtgggcacctgtgtggcccacgccgagcctgaggaggatggagtgggcggccaggccggcggcagccccccccggctgcactgcaatggagagggcaagtggatggtggccgtgggcggctgccgctgccagcccggctaccagcctgcccggggggacaaggcctgccaggcctgcccccggggcctgtacaagagcagcgctggaaatgccccctgcagcccctgcccagcccggagccacgcccccaacccagctgcccctgtgtgcccctgcctggagggcttctaccgggccagcagtgaccccccagaggccccctgcaccggccccccatctgccccccaggagctgtggtttgaggtgcagggcagcgccctgatgctgcactggaggctgccccgggagctgggcggccgcggggacctgctcttcaacgtggtgtgcaaggaatgtgagggccggcaggagcccgccagcggcggcggcggcacctgccaccgctgcagagatgaggtgcactttgacccccggcagaggggcctgacagagagccgggtgctggtgggcggcctgcgggcccacgtgccctacatcctggaggtgcaggccgtgaatggagtgtctgagctgagcccagaccccccccaggccgccgccatcaacgtgtccaccagccatgaggtgcccagcgctgtgcctgtggtgcaccaggtgtcccgggccagcaacagcatcaccgtgtcctggccccagcctgaccagaccaatggaaacatcctggactaccagctgcgctactatgaccaggccgaggatgagagccacagcttcaccctgaccagcgagaccaacacagccaccgtgacccagctgagccctggccacatctacggcttccaggtgcgggccaggacagctgctggccacggcccctatggaggcaaggtgtacttccagaccctgccccagggcgagctgagcagccagctgcctgagcggctgagcctggtgattggcagcatcctgggcgccctggccttcctgctgctggccgccatcaccgtgctggccgtggtgttccagaggaagagaagaggcaccggctacacagagcagctgcagcagtacagcagccctggcctgggcgtgaagtactacatcgaccccagcacctatgaggacccctgccaggccatccgggagctggcccgggaggtggaccctgcctacatcaagattgaggaggtgattggcaccggcagctttggagaggtgcggcagggccgcctgcagccccggggccggcgggagcagacagtggccatccaggccctgtgggccggcggcgctgagagcctgcagatgaccttcctgggccgggctgctgtgctgggccagttccagcaccccaacatcctgcggctggagggcgtggtgaccaagagccggcccctgatggtgctgacagagttcatggagctgggccccctggacagcttcctgcggcagcgggagggccagttcagcagcctgcagctggtggccatgcagaggggcgtggccgccgccatgcagtacctgagcagctttgcctttgtgcacaggagcctgagcgcccacagcgtgctggtgaacagccacctggtgtgcaaggtggcccggctgggccacagcccccagggccccagctgcctgctgcgctgggccgcccctgaggtgattgcccacggcaagcacaccaccagcagtgatgtgtggagctttggcatcctgatgtgggaggtgatgtcctatggagagcggccctactgggacatgtctgagcaggaggtgctgaatgccatcgagcaggagttccggctgcccccacctcctggctgccccccaggcctgcacctgctgatgctggacacctggcagaaggaccgggcccggcggccccactttgaccagctggtggccgcctttgacaagatgatcaggaagccagacaccctgcaggccggcggggaccctggagagcggcccagccaggccctgctgacccctgtggccctggacttcccctgcctggacagcccccaggcctggctgagcgccatcggcctggagtgctaccaggacaacttcagcaagtttggcctgtgcaccttcagtgatgtggcccagctgagcctggaggacctgcctgccctgggcatcaccctggccggccaccagaagaagctgctgcaccacatccagctgctgcagcagcacctgcggcagcagggctctgtggaggtgtag

SEQ ID NO: 151285 - DNA, 2235 bp, synthetic construct
  misc_feature 1..2235: note = Description of Artificial Sequence: Synthetic coding sequence
  source 1..2235: mol_type = other DNA
atggccacagaaggagctgcccagctgggcaacagagtggccggcatggtgtctgtgggcggctgccgctgccagcccggctaccagcctgcccggggggacaaggcctgccaggcctgcccccggggcctgtacaagagcagcgctggaaatgccccctgcagcccctgcccagcccggagccacgcccccaacccagctgcccctgtgtgcccctgcctggagggcttctaccgggccagcagtgaccccccagaggccccctgcaccggcccccccagcgccccccaggagctgtggtttgaggtgcagggcagcgccctgatgctgcactggaggctgccccgggagctgggcggccgcggggacctgctcttcaacgtggtgtgcaaggaatgtgagggccggcaggagcccgccagcggcggcggcggcacctgccaccgctgcagagatgaggtgcactttgacccccggcagaggggcctgacagagagccgggtgctggtgggcggcctgcgggcccacgtgccctacatcctggaggtgcaggccgtgaatggagtgtctgagctgagcccagaccccccccaggccgccgccatcaacgtgtccaccagccatgaggtgcccagcgctgtgcctgtggtgcaccaggtgtcccgggccagcaacagcatcaccgtgtcctggccccagcctgaccagaccaacggcaacatcctggactaccagctgcgctactatgaccaggctgaagatgagagccacagcttcaccctgaccagcgagaccaacacagccaccgtgacccagctgagccctggccacatctacggcttccaggtgcgggccaggacagctgctggccacggcccctacggcggcaaggtgtacttccagaccctgccccagggcgagctgagcagccagctgcctgagcggctgagcctggtgattggcagcatcctgggcgccctggccttcctgctgctggccgccatcaccgtgctggccgtggtgttccagaggaagaggcggggcaccggctacacagagcagctgcagcagtacagcagccctggcctgggcgtgaagtactacatcgaccccagcacctatgaggacccctgccaggccatccgggagctggcccgggaggtggaccctgcctacatcaagattgaggaggtgattggaacaggcagctttggagaggtgcggcagggccgcctgcagccccggggcagaagagagcagacagtggccatccaggccctgtgggccggcggcgctgagagcctgcagatgaccttcctgggccgggctgctgtgctgggccagttccagcaccccaacatcctgcggctggagggcgtggtgaccaagagccggcccctgatggtgctgacagagttcatggagctgggccccctggacagcttcctgcggcagcgggagggccagttcagcagcctgcagctggtggccatgcagaggggcgtggccgccgccatgcagtacctgagcagctttgcctttgtgcacaggagcctgagcgcccacagcgtgctggtgaacagccacctggtgtgcaaggtggcccggctgggccacagcccccagggccccagctgcctgctgcgctgggccgcccctgaggtgattgcccacggcaagcacaccaccagcagtgatgtgtggagctttggcatcctgatgtgggaggtgatgtcctatggagagcggccctactgggacatgtctgagcaggaggtgctgaatgccatcgagcaggagttccggctgcccccacctcctggctgccccccaggcctgcacctgctgatgctggacacctggcagaaggaccgggcccggcggccccactttgaccagctggtggccgcctttgacaagatgatcaggaagccagacaccctgcaggccggcggggaccccggggagcggcccagccaggccctgctgacccctgtggccctggacttcccctgcctggacagcccccaggcctggctgagcgccatcggcctggagtgctaccaggacaacttcagcaagtttggcctgtgcaccttcagtgatgtggcccagctgagcctggaggacctgcctgccctgggcatcaccctggccggccaccagaagaagctgctgcaccacatccagctgctgcagcagcacctgcggcagcagggctctgtggaggtgtag

SEQ ID NO: 151286 - DNA, 3066 bp, synthetic construct; identical to SEQ ID NO: 151284
  misc_feature 1..3066: note = Description of Artificial Sequence: Synthetic coding sequence
  source 1..3066: mol_type = other DNA

SEQ ID NO: 151287 - DNA, 654 bp, synthetic construct
  misc_feature 1..654: note = Description of Artificial Sequence: Synthetic coding sequence
  source 1..654: mol_type = other DNA
atggccggccgcacagtgcgggcagagaccaggagccgggccaaggatgacatcaagaaggtgatggccaccatcgagaaggtgcggcgctgggagaagcgctgggtgacagtgggggacaccagcctgcgcatcttcaagtgggtgcctgtggtggacccccaggaggaggagcggcggcgggccggcggcggcgctgagaggagccggggccgggagcggcggggccgcggggccagcccccggggcggcggccccctcatcctgctggacctgaatgatgagaacagcaaccagagcttccacagcgagggcagcctgcagaagggcacagagcccagccctgggggcaccccccagcccagcaggcctgtgtccccagctggccccccagagggcgtgcctgaggaggcccagcccccccggctgggccaggagcgggaccccggcggcatcacagctggcagcacagatgagccccccatgctgaccaaggaggagcctgtgcctgagctgctggaggccgaggcccctgaggcctaccctgtgtttgagcctgtgccccctgtgcctgaggccgcccagggcgacacagaagattctgagggcgccccacccctgaagaggatctgccccaatgccccagacccctag

SEQ ID NO: 151288 - DNA, 717 bp, synthetic construct
  misc_feature 1..717: note = Description of Artificial Sequence: Synthetic coding sequence
  source 1..717: mol_type = other DNA
atggctgctgcccccctgctgctgctgctgctgctggtgcctgtgcccctgctgcccctgctggcccagggccctggaggagccctgggcaacagacatgctgtgtactggaacagcagcaaccagcacctgcggcgggagggctacacagtgcaggtgaatgtgaatgactacctggacatctactgcccccactacaacagcagtggagtgggccctggagctggccctggccctgggggcggcgctgagcagtatgtgctgtacatggtgtccagaaatggctaccgcacctgcaatgccagccagggcttcaagcgctgggagtgcaaccggccccacgccccccacagccccatcaagttcagcgagaagttccagcgctacagcgccttcagcctgggctatgagttccacgccggccacgagtactactacatcagcacccccacccacaacctgcactggaagtgcctgaggatgaaggtgtttgtgtgctgtgccagcaccagccacagcggggagaagcctgtgcccaccctgccccagttcaccatgggccccaacgtgaagatcaacgtgctggaggactttgaaggagagaacccccaggtgcccaagctggagaagagcatcagcggcaccagccccaagcgggagcacctgcccctggccgtgggcatcgccttcttcctgatgaccttcctggccagctag

SEQ ID NO: 151289 - DNA, 639 bp, synthetic construct
  misc_feature 1..639: note = Description of Artificial Sequence: Synthetic coding sequence
  source 1..639: mol_type = other DNA
atggctgctgcccccctgctgctgctgctgctgctggtgcctgtgcccctgctgcccctgctggcccagggccctggaggagccctgggcaacagacatgctgtgtactggaacagcagcaaccagcacctgcggcgggagggctacacagtgcaggtgaatgtgaatgactacctggacatctactgcccccactacaacagcagtggagtgggccctggagctggccctggccctgggggcggcgctgagcagtatgtgctgtacatggtgtccagaaatggctaccgcacctgcaatgccagccagggcttcaagcgctgggagtgcaaccggccccacgccccccacagccccatcaagttcagcgagaagttccagcgctacagcgccttcagcctgggctatgagttccacgccggccacgagtactactacatcagcacccccacccacaacctgcactggaagtgcctgaggatgaaggtgtttgtgtgctgtgccagcaaggactttgaaggagagaacccccaggtgcccaagctggagaagagcatcagcggcaccagccccaagcgggagcacctgcccctggccgtgggcatcgccttcttcctgatgaccttcctggccagctag

SEQ ID NO: 151290 - DNA, 702 bp, synthetic construct
  misc_feature 1..702: note = Description of Artificial Sequence: Synthetic coding sequence
  source 1..702: mol_type = other DNA
atgaggctgctgcccctgctgaggacagtgctgtgggccgccttcctgggcagccccctgcggggcggcagcagcctgcggcacgtggtgtactggaacagcagcaaccccagcctgcggcgggagggctacacagtgcaggtgaatgtgaatgactacctggacatctactgcccccactacaacagcagcggcgtgggccctggggccggccctggccctgggggcggcgctgagcagtatgtgctgtacatggtgtccagaaatggctaccgcacctgcaatgccagccagggcttcaagcgctgggagtgcaaccggccccacgccccccacagccccatcaagttcagcgagaagttccagcgctacagcgccttcagcctgggctatgagttccacgccggccacgagtactactacatcagcacccccacccacaacctgcactggaagtgcctgaggatgaaggtgtttgtgtgctgtgccagcaccagccacagcggggagaagcctgtgcccaccctgccccagttcaccatgggccccaacgtgaagatcaacgtgctggaggactttgaaggagagaacccccaggtgcccaagctggagaagagcatcagcggcaccagccccaagcgggagcacctgcccctggccgtgggcatcgccttcttcctgatgaccttcctggccagctag

SEQ ID NO: 151291 - DNA, 582 bp, synthetic construct
  misc_feature 1..582: note = Description of Artificial Sequence: Synthetic coding sequence
  source 1..582: mol_type = other DNA
atgaggctgctgcccctgctgaggacagtgctgtgggccgccttcctgggcagccccctgcggggcggcagcagcctgcggcacgtggtgtactggaacagcagcaacccccggctgctgcggggagatgctgtggtggagctgggcctgaatgactacctggacatcgtgtgcccccactatgagggccctggccccccagagggccctgagacctttgccctgtacatggtggactggccaggctatgagagctgccaggccgagggcccccgggcctacaagcgctgggtgtgcagcctgccctttggacatgtgcagttcagcgagaagatccagcgcttcacccccttcagcctgggctttgagttcctgcccggggagacctactactacatctctgtgcccaccccagagagcagcggccagtgcctgcggctgcaggtgtctgtgtgctgcaaggagaggaacctgcccagccaccccaaggagcctgagagcagccaggaccccctggaggaggagggcagcctgctgcctgccctgggcgtgcccatccagacagacaagatggagcactag

SEQ ID NO: 151292 - DNA, 606 bp, synthetic construct
  misc_feature 1..606: note = Description of Artificial Sequence: Synthetic coding sequence
  source 1..606: mol_type = other DNA
atgaggctgctgcccctgctgaggacagtgctgtgggccgccttcctgggcagccccctgcggggcggcagcagcctgcggcacgtggtgtactggaacagcagcaacccccggctgctgcggggagatgctgtggtggagctgggcctgaatgactacctggacatcgtgtgcccccactatgagggccctggccccccagagggccctgagacctttgccctgtacatggtggactggccaggctatgagagctgccaggccgagggcccccgggcctacaagcgctgggtgtgcagcctgccctttggacatgtgcagttcagcgagaagatccagcgcttcacccccttcagcctgggctttgagttcctgcccggggagacctactactacatctctgtgcccaccccagagagcagcggccagtgcctgcggctgcaggtgtctgtgtgctgcaaggagaggaagtctgagagcgcccaccctgtgggcagccctggagagagcggcaccagcggctggaggggcggggacacccccagccccctgtgcctgctgctgctgctgctgctgctgatcctgcggctgctgcgcatcctgtag

SEQ ID NO: 151293 - DNA, 624 bp, synthetic construct
  misc_feature 1..624: note = Description of Artificial Sequence: Synthetic coding sequence
  source 1..624: mol_type = other DNA
atgaggctgctgcccctgctgaggacagtgctgtgggccgccttcctgggcagccccctgcggggcggcagcagcctgcggcacgtggtgtactggaacagcagcaacccccggctgctgcggggagatgctgtggtggagctgggcctgaatgactacctggacatcgtgtgcccccactatgagggccctggccccccagagggccctgagacctttgccctgtacatggtggactggccaggctatgagagctgccaggccgagggcccccgggcctacaagcgctgggtgtgcagcctgccctttggacatgtgcagttcagcgagaagatccagcgcttcacccccttcagcctgggctttgagttcctgcccggggagacctactactacatctctgtgcccaccccagagagcagcggccagtgcctgcggctgcaggtgtctgtgtgctgcaaggagcggcgggcccgggtgctgcccaggagccctgggggcggcggcatcccagctgcctgcacaggaggagccaacagcgaccggcaggatggagccctgatgggagagatccggggcagcgaggtgaccctggccggggcctgccccctcatcaccggctag

SEQ ID NO: 151294 - DNA, 1083 bp, synthetic construct
  misc_feature 1..1083: note = Description of Artificial Sequence: Synthetic coding sequence
  source 1..1083: mol_type = other DNA
atgtctgacagcaaggagccccggctgcagcagctgggcctgctggtgtccaaggtgcccagcagcatcagccaggagcagagccggcaggatgccatctaccagaacctgacccagctgaaggctgctgtgggggagctgtctgagaagagcaagctgcaggagatctaccaggagctgacccagctgaaggctgctgtgggggagctgcctgagaagagcaagctgcaggagatctaccaggagctgacccggctgaaggctgctgtgggggagctgcctgagaagagcaagctgcaggagatctaccaggagctgacctggctgaaggctgctgtgggggagctgcctgagaagagcaagatgcaggagatctaccaggagctgacccggctgaaggctgctgtgggggagctgcctgagaagagcaagcagcaggagatctaccaggagctgacccggctgaaggctgctgtgggggagctgcctgagaagagcaagcagcaggagatctaccaggagctgacccggctgaaggctgctgtgggggagctgcctgagaagagcaagcagcaggagatctaccaggagctgacccagctgaaggctgctgtggagcggctgtgccacccctgcccctgggagtggaccttcttccagggcaactgctacttcatgagcaacagccagaggaactggcatgacagcatcacagcctgcaaggaggtgggcgcccagctggtggtgatcaagtctgctgaggagcagaacttcctgcagctgcagagcagccgcagcaaccgcttcacctggatgggcctgagtgacctgaaccaggagggcacctggcagtgggtggatggcagccccctgctgcccagcttcaagcagtactggaacagaggagagcccaacaacgtgggggaggaggactgtgccgagttctctggaaatggctggaatgatgacaagtgcaacctggccaagttctggatctgcaagaagtctgctgccagctgcagcagagatgaggagcagttcctgagccctgccccagccacccccaaccccccaccagcctag

SEQ ID NO: 151295 - DNA, 888 bp, synthetic construct
  misc_feature 1..888: note = Description of Artificial Sequence: Synthetic coding sequence
  source 1..888: mol_type = other DNA
atggagaagatgagccggcccctgcccctgaaccccaccttcatccccccaccctatggagtgctgcggagcctgctggagaaccccctgaagctgcccctgcaccatgaagatgccttcagcaaggacaaggacaaggagaagaagctggatgatgagagcaacagccccaccgtgccccagagcgccttcctgggccccaccctgtgggacaagaccctgccctatgatggagacaccttccagctggagtacatggacctggaggagttcctgtctgaaaatggcatcccccccagccccagccagcacgaccacagcccccaccccccaggcctgcagcctgccagcagcgctgcccccagcgtgatggacctgagcagccgggccagcgcccccctgcaccctggcatccccagccccaactgcatgcagagccccatccggcccggccagctgctgcctgccaacagaaacacccccagccccatcgaccctgacaccatccaggtgcctgtgggctatgagccagaccctgctgacctggccctgagcagcatccctggccaggagatgtttgaccccaggaagaggaagttcagcgaggaggagctgaagccccagcccatgatcaagaaggccaggaaggtgttcatcccagatgacctgaaggatgacaagtactgggcccggcggaggaagaacaacatggccgccaagaggagcagagatgcccggcggctgaaggagaaccagatcgccatccgggccagcttcctggagaaggaaaattctgccctgcggcaggaggtggccgacctgaggaaggagctgggcaagtgcaagaacatcctggccaagtatgaggcccggcacggccccctgtag

SEQ ID NO: 151296 - DNA, 780 bp, synthetic construct
  misc_feature 1..780: note = Description of Artificial Sequence: Synthetic coding sequence
  source 1..780: mol_type = other DNA
atggctgctgctgcccagctgagcctgacccagctgagcagcggcaaccctgtgtatgagaagtactaccggcaggtggacaccggcaacacaggccgggtgctggccagtgatgctgctgccttcctgaagaagagcggcctgcctgacctgatcctgggcaagatctgggacctggccgacacagatggcaagggcatcctgaacaagcaggagttctttgtggccctgcggctggtggcctgtgcccagaatggcctggaggtgtccctgagcagcctgaacctggccgtgcccccaccccgcttccatgacaccagcagccccctgctgatcagcggcaccagcgctgctgagctgccctgggccgtgaagccagaggacaaggccaagtatgatgccatctttgacagcctgagccctgtgaatggcttcctgagcggggacaaggtgaagcctgtgctgctgaacagcaagctgcctgtggacatcctgggccgggtgtgggagctgagtgacatcgaccatgatggcatgctggacagagatgaatttgctgtgacagagagccacagcgtgacccaggccggcgtgcagtggagggacctgagcagcctgcagccccggcccccaggcttcaagctgttcttccacctgagcctgctgcgctcctgggactacagacatgcccctcctcctccagccaacttctacatcttcagccgggacagcgtgagcccctgcctgcctgactggagccgggccccagacaacagatag

SEQ ID NO: 151297 - DNA, 2289 bp, synthetic construct
  misc_feature 1..2289: note = Description of Artificial Sequence: Synthetic coding sequence
  source 1..2289: mol_type = other DNA
atggctgctgctgcccagctgagcctgacccagctgagcagcggcaaccctgtgtatgagaagtactaccggcaggtggacaccggcaacacaggccgggtgctggccagtgatgctgctgccttcctgaagaagagcggcctgcctgacctgatcctgggcaagatctgggacctggccgacacagatggcaagggcatcctgaacaagcaggagttctttgtggccctgcggctggtggcctgtgcccagaatggcctggaggtgtccctgagcagcctgaacctggccgtgcccccaccccgcttccatgacaccagcagccccctgctgatcagcggcaccagcgctgctgagctgccctgggccgtgaagccagaggacaaggccaagtatgatgccatctttgacagcctgagccctgtgaatggcttcctgagcggggacaaggtgaagcctgtgctgctgaacagcaagctgcctgtggacatcctgggccgggtgtgggagctgagtgacatcgaccatgatggcatgctggacagagatgaatttgctgtggccatgttcctggtgtactgtgccctggagaaggagcctgtgcccatgagcctgcccccagccctggtgccccccagcaagaggaagacctgggtggtgtccccagctgagaaggccaagtatgatgagatcttcctgaagacagacaaggacatggatggctttgtgtctggcctggaggtgcgggagatcttcctgaagacaggcctgcccagcaccctgctggcccacatctggagcctgtgtgacaccaaggactgtgggaagctgagcaaggaccagtttgccctggccttccacctgatcagccagaagctgatcaagggcattgatcctcctcatgtgctgaccccagagatgatccccccaagtgaccgggccagcctgcagaagaacatcatcggcagcagccctgtggccgacttcagcgccatcaaggagctggacaccctgaacaatgagatcgtggacctgcagcgggagaagaacaacgtggagcaggacctgaaggagaaggaggacaccatcaagcagaggaccagcgaggtgcaggacctgcaggatgaggtgcagcgggagaacaccaacctgcagaagctgcaggcccagaagcagcaggtgcaggagctgctggatgagctggatgagcagaaggcccagctggaggagcagctgaaggaggtgaggaagaagtgtgccgaggaggcccagctggcccggagcagccctgagctgctgcccagcggcgtgacagatgaaaatgaggtgaccacagctgtgacagagaaggtgtgcagcgagctggacaacaacagacacagcaaggaggaggaccccttcaacgtggacagcagcagcctgactggacctgtggccgacaccaacctggacttcttccagagcgacccctttgtgggcagtgaccccttcaaggatgacccctttgggaagattgacccctttggaggagaccccttcaagggcagtgacccctttgccagtgactgcttcttccggcagagcacagacccctttgccaccagcagcacagaccccttctctgctgccaacaacagcagcatcacctctgtggagaccctgaagcacaatgacccctttgcccctgggggcaccgtggtggccgccagtgacagcgccacagacccctttgcctctgtgtttggaaatgaaagctttggaggcggctttgctgacttcagcaccctgagcaaggtgaacaatgaagaccccttccgcagcgccaccagcagctctgtgtccaatgtggtgatcaccaagaatgtgtttgaggagacctctgtgaagtcagaagatgagcccccagccctgccccccaagattggcacccccacccggccctgccccctgcccccaggcaagaggagcatcaacaagctggacagcccagaccccttcaagctgaatgaccccttccagcccttccctggaaatgacagccccaaggagaaggaccctgagatcttctgtgaccccttcaccagcgccaccaccaccaccaacaaggaggccgaccccagcaactttgccaacttcagcgcctaccccagcgaggaggacatgattgagtgggccaagcgggagagcgagcgggaggaggagcagaggctggcccggctgaaccagcaggagcaggaggacctggagctggccatcgccctgagcaagtctgagatcagcgaggcctag

SEQ ID NO: 151298 - DNA, 2691 bp, synthetic construct
  misc_feature 1..2691: note = Description of Artificial Sequence: Synthetic coding sequence
  source 1..2691: mol_type = other DNA
atggctgctgctgcccagctgagcctgacccagctgagcagcggcaaccctgtgtatgagaagtactaccggcaggtggacaccggcaacacaggccgggtgctggccagtgatgctgctgccttcctgaagaagagcggcctgcctgacctgatcctgggcaagatctgggacctggccgacacagatggcaagggcatcctgaacaagcaggagttctttgtggccctgcggctggtggcctgtgcccagaatggcctggaggtgtccctgagcagcctgaacctggccgtgcccccaccccgcttccatgacaccagcagccccctgctgatcagcggcaccagcgctgctgagctgccctgggccgtgaagccagaggacaaggccaagtatgatgccatctttgacagcctgagccctgtgaatggcttcctgagcggggacaaggtgaagcctgtgctgctgaacagcaagctgcctgtggacatcctgggccgggtgtgggagctgagtgacatcgaccatgatggcatgctggacagagatgaatttgctgtggccatgttcctggtgtactgtgccctggagaaggagcctgtgcccatgagcctgcccccagccctggtgccccccagcaagaggaagacctgggtggtgtccccagctgagaaggccaagtatgatgagatcttcctgaagacagacaaggacatggatggctttgtgtctggcctggaggtgcgggagatcttcctgaagacaggcctgcccagcaccctgctggcccacatctggagcctgtgtgacaccaaggactgtgggaagctgagcaaggaccagtttgccctggccttccacctgatcagccagaagctgatcaagggcattgatcctcctcatgtgctgaccccagagatgatccccccaagtgaccgggccagcctgcagaagaacatcatcggcagcagccctgtggccgacttcagcgccatcaaggagctggacaccctgaacaatgagatcgtggacctgcagcgggagaagaacaacgtggagcaggacctgaaggagaaggaggacaccatcaagcagaggaccagcgaggtgcaggacctgcaggatgaggtgcagcgggagaacaccaacctgcagaagctgcaggcccagaagcagcaggtgcaggagctgctggatgagctggatgagcagaaggcccagctggaggagcagctgaaggaggtgaggaagaagtgtgccgaggaggcccagctgatcagcagcctgaaggccgagctgaccagccaggagagccagatcagcacctatgaggaggagctggccaaggcccgggaggagctgagccggctgcagcaggagacagctgagctggaggagagcgtggagagcggcaaggcccagctggagcccctgcagcagcacctgcaggacagccagcaggagatcagctccatgcagatgaagctgatggagatgaaggacctggagaaccacaacagccagctgaactggtgcagcagcccccacagcatcctggtgaatggagccacagactactgcagcctgagcaccagcagcagcgagacagccaacctgaatgagcacgtggagggccagagcaacctggagagcgagcccatccaccaggagagccctgcccggagcagccctgagctgctgcccagcggcgtgacagatgaaaatgaggtgaccacagctgtgacagagaaggtgtgcagcgagctggacaacaacagacacagcaaggaggaggaccccttcaacgtggacagcagcagcctgactggacctgtggccgacaccaacctggacttcttccagagcgacccctttgtgggcagtgaccccttcaaggatgacccctttgggaagattgacccctttggaggagaccccttcaagggcagtgacccctttgccagtgactgcttcttccggcagagcacagacccctttgccaccagcagcacagaccccttctctgctgccaacaacagcagcatcacctctgtggagaccctgaagcacaatgacccctttgcccctgggggcaccgtggtggccgccagtgacagcgccacagacccctttgcctctgtgtttggaaatgaaagctttggaggcggctttgctgacttcagcaccctgagcaaggtgaacaatgaagaccccttccgcagcgccaccagcagctctgtgtccaatgtggtgatcaccaagaatgtgtttgaggagacctctgtgaagtcagaagatgagcccccagccctgccccccaagattggcacccccacccggccctgccccctgcccccaggcaagaggagcatcaacaagctggacagcccagaccccttcaagctgaatgaccccttccagcccttccctggaaatgacagccccaaggagaaggaccctgagatcttctgtgaccccttcaccagcgccaccaccaccaccaacaaggaggccgaccccagcaactttgccaacttcagcgcctaccccagcgaggaggacatgattgagtgggccaagcgggagagcgagcgggaggaggagcagaggctggcccggctgaaccagcaggagcaggaggacctggagctggccatcgccctgagcaagtctgagatcagcgaggcctag

SEQ ID NO: 151299 - DNA, 1722 bp, synthetic construct
  misc_feature 1..1722: note = Description of Artificial Sequence: Synthetic coding sequence
  source 1..1722: mol_type = other DNA
atgatcctgatggtgcgggactgcctgaagagccagcaccgggacccccactgtgaccccagcgacaagcgggagaagaacaacgtggagcaggacctgaaggagaaggaggacaccatcaagcagaggaccagcgaggtgcaggacctgcaggatgaggtgcagcgggagaacaccaacctgcagaagctgcaggcccagaagcagcaggtgcaggagctgctggatgagctggatgagcagaaggcccagctggaggagcagctgaaggaggtgaggaagaagtgtgccgaggaggcccagctgatcagcagcctgaaggccgagctgaccagccaggagagccagatcagcacctatgaggaggagctggccaaggcccgggaggagctgagccggctgcagcaggagacagctgagctggaggagagcgtggagagcggcaaggcccagctggagcccctgcagcagcacctgcaggacagccagcaggagatcagctccatgcagatgaagctgatggagatgaaggacctggagaaccacaacagccagctgaactggtgcagcagcccccacagcatcctggtgaatggagccacagactactgcagcctgagcaccagcagcagcgagacagccaacctgaatgaacatgtggagggccagagcaacctggagagcgagcccatccaccaggagagccctgcccggagcagccctgagctgctgcccagcggcgtgacagatgaaaatgaggtgaccacagctgtgacagagaaggtgtgcagcgagctggacaacaacagacacagcaaggaggaggaccccttcaacgtggacagcagcagcctgaccggccctgtggccgacaccaacctggacttcttccagagcgacccctttgtgggcagtgaccccttcaaggatgacccctttgggaagattgacccctttggaggagaccccttcaagggcagtgacccctttgccagtgactgcttcttccggcagagcacagacccctttgccaccagcagcacagaccccttctctgctgccaacaacagcagcatcacctctgtggagaccctgaagcacaatgacccctttgcccctgggggcaccgtggtggccgccagtgacagcgccacagacccctttgcctctgtgtttggaaatgaaagctttggaggcggctttgctgacttcagcaccctgagcaaggtgaacaatgaagaccccttccgcagcgccaccagcagctctgtgtccaatgtggtgatcaccaagaatgtgtttgaggagacctctgtgaagtcagaagatgagcccccagccctgccccccaagattggcacccccacccggccctgccccctgcccccaggcaagaggagcatcaacaagctggacagcccagaccccttcaagctgaatgaccccttccagcccttccctggaaatgacagccccaaggagaaggaccctgagatcttctgtgaccccttcaccagcgccaccaccaccaccaacaaggaggccgaccccagcaactttgccaacttcagcgcctaccccagcgaggaggacatgattgagtgggccaagcgggagagcgagcgggaggaggagcagaggctggcccggctgaaccagcaggagcaggaggacctggagctggccatcgccctgagcaagtctgagatcagcgaggcctag

SEQ ID NO: 151300 - DNA, 2469 bp, synthetic construct
  misc_feature 1..2469: note = Description of Artificial Sequence: Synthetic coding sequence
  source 1..2469: mol_type = other DNA
atgaatggccacatcagcaaccaccccagcagctttggcatgtaccccagccagatgaatggctacggcagcagccccaccttcagccagacagaccgggagcacggcagcaagaccagcgccaaggccctgtatgagcagaggaagaactatgcccgggacagcgtgtcctctgtgtctgacatcagccagtacagagtggagcacctgaccacctttgtgctggacaggaaggatgccatgatcaccgtggatgatggcatcaggaagctgaagctgctggatgccaagggcaaggtgtggacccaggacatgatcctgcaggtggatgacagagctgtgtccctgattgacctggagagcaagaatgagctggagaacttccccctgaacaccatccagcactgccaggccgtgatgcacagctgcagctatgattctgtgctggccctggtgtgcaaggagcccacccagaacaagccagacctgcacctgttccagtgtgatgaggtgaaggccaacctgatcagcgaggacatcgagagcgccatcagtgacagcaagggcggcaagcagaagaggaggccagatgccctgaggatgatcagcaatgctgaccccagcatccccccaccaccccgggccccagccccagcccctcctggcaccgtgacccaggtggatgtgcgcagccgggtggccgcctggagcgcctgggccgctgaccagggcgactttgagaagccccggcagtaccacgagcaggaggagaccccagagatgatggccgccagaattgacagagatgtgcagatcctgaaccacatcctggatgacatcgagttcttcatcaccaagctgcagaaggctgctgaggccttcagcgagctgagcaagaggaagaagaacaagaagggcaagaggaaaggacctggagagggcgtgctgaccctgcgggccaagcccccacctccagatgagttcctggactgcttccagaagttcaagcacggcttcaacctgctggccaagctgaagagccacatccagaaccccagcgctgctgacctggtgcacttcctgttcacccccctgaacatggtggtgcaggccaccggcggccctgagctggccagctctgtgctgagccccctgctgaacaaggacaccatcgacttcctgaactacacagtgaatggagatgagcggcagctgtggatgagcctgggcggcacctggatgaaggcccgggcagagtggcccaaggagcagttcatccccccctacgtgccccgcttcagaaatggctgggagccccccatgctgaacttcatgggcgccaccatggagcaggacctgtaccagctggccgagagcgtggccaacgtggccgagcaccagaggaagcaggagatcaagaggctgagcacagagcacagctctgtgtctgagtaccacccagcagatggctacgccttcagcagcaacatctacacccggggcagccacctggaccagggcgaggccgctgtggccttcaagcccaccagcaacagacacatcgacagaaattatgagcccctgaagacccagcccaagaagtatgccaagagcaaatatgactttgtggccaggaacaacagcgagctgtctgtgctgaaggatgacatcctggagatcctggatgacaggaagcagtggtggaaggtgagaaatgccagcggggacagcggctttgtgcccaacaacatcctggacatcgtgcggcccccagagagcggcctgggccgggctgaccccccctacacccacaccatccagaagcagaggatggagtatggccccaggcctgctgacaccccaccagcccccagccccccacccaccccagcccctgtgcctgtgcccctgccccccagcaccccagcccctgtgcctgtgtccaaggtgcctgccaacatcacccggcagaacagcagcagcagtgacagcggcggcagcatcgtgcgggacagccagaggcacaagcagctgcctgtggacaggaggaagagccagatggaggaggtgcaggatgagctgatccaccggctgaccatcggccgctctgctgcccagaagaagttccacgtgccccggcagaatgtgcctgtgatcaacatcacctatgacagcaccccagaagatgtgaagacctggctgcagagcaagggcttcaaccctgtgacagtgaacagcctgggcgtgctgaatggagcccagctgttcagcctgaacaaggatgagctgaggacagtgtgcccagagggcgcccgggtgtacagccagatcaccgtgcagaaggccgccctggaggacagcagcggcagcagcgagctgcaggagatcatgagaagacggcaggagaagatctctgctgctgccagtgacagcggcgtggagagctttgatgagggcagcagccactag

SEQ ID NO: 151301 - DNA, 366 bp, synthetic construct
  misc_feature 1..366: note = Description of Artificial Sequence: Synthetic coding sequence
  source 1..366: mol_type = other DNA
atgaatggccacatcagcaaccaccccagcagctttggcatgtaccccagccagatgaatggctacggcagcagccccaccttcagccagacagaccgggagcacggcagcaagaccagcgccaaggccctgtatgagcagaggaagaactatgcccgggacagcgtgtcctctgtgtctgacatcagccagtacagagtggagcacctgaccacctttgtgctggacaggaaggatgccatgatcaccgtggatgatggcatcaggaagctgaagctgctggatgccaagggcaaggtgtggacccaggacatgatcctgcaggtggatgacagagctgtgtccctgattgacctggagagctag

SEQ ID NO: 151302 - DNA, 207 bp, synthetic construct
  misc_feature 1..207: note = Description of Artificial Sequence: Synthetic coding sequence
  source 1..207: mol_type = other DNA
atgaatggccacatcagcaaccaccccagcagctttggcatgtaccccagccagatgaatggctacggcagcagccccaccttcagccagacagaccgggagcacggcagcaagaccagcgccaaggccctgtatgagcagaggaagaactatgcccgggacagcgtgtcctctgtgtctgacatcagccagtacagagtggagtag

SEQ ID NO: 151303 - DNA, 1689 bp, synthetic construct
  misc_feature 1..1689: note = Description of Artificial Sequence: Synthetic coding sequence
  source 1..1689: mol_type = other DNA
atgatggccgccagaattgacagagatgtgcagatcctgaaccacatcctggatgacatcgagttcttcatcaccaagctgcagaaggctgctgaggccttcagcgagctgagcaagaggaagaagaacaagaagggcaagaggaaaggacctggagagggcgtgctgaccctgcgggccaagcccccacctccagatgagttcctggactgcttccagaagttcaagcacggcttcaacctgctggccaagctgaagagccacatccagaaccccagcgctgctgacctggtgcacttcctgttcacccccctgaacatggtggtgcaggccaccggcggccctgagctggccagctctgtgctgagccccctgctgaacaaggacaccatcgacttcctgaactacacagtgaatggagatgagcggcagctgtggatgagcctgggcggcacctggatgaaggcccgggcagagtggcccaaggagcagttcatccccccctacgtgccccgcttcagaaatggctgggagccccccatgctgaacttcatgggcgccaccatggagcaggacctgtaccagctggccgagagcgtggccaacgtggccgagcaccagaggaagcaggagatcaagaggctgagcacagagcacagctctgtgtctgagtaccacccagcagatggctacgccttcagcagcaacatctacacccggggcagccacctggaccagggcgaggccgctgtggccttcaagcccaccagcaacagacacatcgacagaaattatgagcccctgaagacccagcccaagaagtatgccaagagcaaatatgactttgtggccaggaacaacagcgagctgtctgtgctgaaggatgacatcctggagatcctggatgacaggaagcagtggtggaaggtgagaaatgccagcggggacagcggctttgtgcccaacaacatcctggacatcgtgcggcccccagagagcggcctgggccgggctgaccccccctacacccacaccatccagaagcagaggatggagtatggccccaggcctgctgacaccccaccagcccccagccccccacccaccccagcccctgtgcctgtgcccctgccccccagcaccccagcccctgtgcctgtgtccaaggtgcctgccaacatcacccggcagaacagcagcagcagtgacagcggcggcagcatcgtgcgggacagccagaggcacaagcagctgcctgtggacaggaggaagagccagatggaggaggtgcaggatgagctgatccaccggctgaccatcggccgctctgctgcccagaagaagttccacgtgccccggcagaatgtgcctgtgatcaacatcacctatgacagcaccccagaagatgtgaagacctggctgcagagcaagggcttcaaccctgtgacagtgaacagcctgggcgtgctgaatggagcccagctgttcagcctgaacaaggatgagctgaggacagtgtgcccagagggcgcccgggtgtacagccagatcaccgtgcagaaggccgccctggaggacagcagcggcagcagcgagctgcaggagatcatgagaagacggcaggagaagatctctgctgctgccagtgacagcggcgtggagagctttgatgagggcagcagccactag

SEQ ID NO: 151304 - DNA, 1689 bp, synthetic construct; identical to SEQ ID NO: 151303
  misc_feature 1..1689: note = Description of Artificial Sequence: Synthetic coding sequence
  source 1..1689: mol_type = other DNA

SEQ ID NO: 151305 - DNA, 2076 bp, synthetic construct
  misc_feature 1..2076: note = Description of Artificial Sequence: Synthetic coding sequence
  source 1..2076: mol_type = other DNA
atgaatggccacatcagcaaccaccccagcagctttggcatgtaccccagccagatgaatggctacggcagcagccccaccttcagccagacagaccgggagcacggcagcaagaccagcgccaaggccctgtatgagcagaggaagaactatgcccgggacagcgtgtcctctgtgtctgacatcagccagtacagagtggagcacctgaccacctttgtgctggacaggaaggatgccatgatcaccgtggatgatggcatcaggaagctgaagctgctggatgccaagggcaaggtgtggacccaggacatgatcctgcaggtggatgacagagctgtgtccctgattgacctggagagcaagaatgagctggagaacttccccctgaacaccatccagcactgccaggccgtgatgcacagctgcagctatgattctgtgctggccctggtgtgcaaggagcccacccagaacaagccagacctgcacctgttccagtgtgatgaggtgaaggccaacctgatcagcgaggacatcgagagcgccatcagtgacagcaagggcggcaagcagaagaggaggccagatgccctgaggatgatcagcaatgctgaccccagcatccccccaccaccccgggccccagccccagcccctcctggcaccgtgacccaggtggatgtgcgcagccgggtggccgcctggagcgcctgggccgctgaccagggcgactttgagaagccccggcagtaccacgagcaggaggagaccccagagatgatggccgccagaattgacagagatgtgcagatcctgaaccacatcctggatgacatcgagttcttcatcaccaagctgcagaaggctgctgaggccttcagcgagctgagcaagaggaagaagaacaagaagggcaagaggaaaggacctggagagggcgtgctgaccctgcgggccaagcccccacctccagatgagttcctggactgcttccagaagttcaagcacggcttcaacctgctggccaagctgaagagccacatccagaaccccagcgctgctgacctggtgcacttcctgttcacccccctgaacatggtggtgcaggccaccggcggccctgagctggccagctctgtgctgagccccctgctgaacaaggacaccatcgacttcctgaactacacagtgaatggagatgagcggcagctgtggatgagcctgggcggcacctggatgaaggcccgggcagagtggcccaaggagcagttcatccccccctacgtgccccgcttcagaaatggctgggagccccccatgctgaacttcatgggcgccaccatggagcaggacctgtaccagctggccgagagcgtggccaacgtggccgagcaccagaggaagcaggagatcaagaggctgagcacagagcacagctctgtgtctgagtaccacccagcagatggctacgccttcagcagcaacatctacacccggggcagccacctggaccagggcgaggccgctgtggccttcaagcccaccagcaacagacacatcgacagaaattatgagcccctgaagacccagcccaagaagtatgccaagagcaaatatgactttgtggccaggaacaacagcgagctgtctgtgctgaaggatgacatcctggagatcctggatgacaggaagcagtggtggaaggtgagaaatgccagcggggacagcggctttgtgcccaacaacatcctggacatcgtgcggcccccagagagcggcctgggccgggctgaccccccctacacccacaccatccagaagcagaggatggagtatggccccaggcctgctgacaccccaccagcccccagccccccacccaccccagcccctgtgcctgtgcccctgccccccagcaccccagcccctgtgcctgtgtccaaggtgcctgccaacatcacccggcagaacagcagcagcagtgacagcggcggcagcatcgtgcgggacagccagaggcacaagaccagcggcggccccaaggagatcagtgatggcggcagcgccaggtag

SEQ ID NO: 151306 - DNA, 207 bp, synthetic construct; identical to SEQ ID NO: 151302
  misc_feature 1..207: note = Description of Artificial Sequence: Synthetic coding sequence
  source 1..207: mol_type = other DNA

SEQ ID NO: 151307 - DNA, 2469 bp, synthetic construct; identical to SEQ ID NO: 151300
  misc_feature 1..2469: note = Description of Artificial Sequence: Synthetic coding sequence
  source 1..2469: mol_type = other DNA

SEQ ID NO: 151308 - DNA, 2469 bp, synthetic construct; identical to SEQ ID NO: 151300
  misc_feature 1..2469: note = Description of Artificial Sequence: Synthetic coding sequence
  source 1..2469: mol_type = other DNA

SEQ ID NO: 151309 - DNA, 204 bp, synthetic construct
  misc_feature 1..204: note = Description of Artificial Sequence: Synthetic coding sequence
  source 1..204: mol_type = other DNA
atgaatggccacatcagcaaccaccccagcagctttggcatgtaccccagccagatgaatggctacggcagcagccccaccttcagccagacagaccgggagcacggcagcaagaccagcgccaaggccctgtatgagcagaggaagaactatgcccgggacagcgtgtcctctgtgtctgacatcagccagtacagagtgtag

SEQ ID NO: 151310 - DNA, 387 bp, synthetic construct
  misc_feature 1..387: note = Description of Artificial Sequence: Synthetic coding sequence
  source 1..387: mol_type = other DNA
atgaatggccacatcagcaaccaccccagcagctttggcatgtaccccagccagatgaatggctacggcagcagccccaccttcagccagacagaccgggagcacggcagcaagaccagcgccaaggccctgtatgagcagaggaagaactatgcccgggacagcgtgtcctctgtgtctgacatcagccagtacagagtggagcacctgaccacctttgtgctggacaggaaggatgccatgatcaccgtggatgatggcatcaggaagctgaagctgctggatgccaagggcaaggtgtggacccaggacatgatcctgcaggtggatgacagagctgtgtccctgattgacctggagagcaagaatgagctggagaacttctag

SEQ ID NO: 151311 - DNA, 996 bp, synthetic construct
  misc_feature 1..996: note = Description of Artificial Sequence: Synthetic coding sequence
  source 1..996: mol_type = other DNA
atgaggttccgctttggagtggtggtgcccccagctgtggccggggcccggcctgagctgctggtggtgggcagcaggcctgagctgggccgctgggagcccagaggagctgtgcggctgcggcctgctggaacagctgctggagatggagccctggccctgcaggagcccggcctgtggctgggggaggtggagctggccgctgaggaggccgcccaggatggagctgagatcggggccacccccaagctgcccagcaccatcttcccctggtttgtgctgcggcagggcctcatcctgggcaatggcccccaccacgaccgctgctgcacctacaatgaaaacaacctggtggatggagtgtactgcctgcccatcggccactggattgaggccaccggccacaccaatgagatgaagcacaccacagacttctacttcaacattgctggccaccaggccatgcactacagccgcatcctgcccaacatctggctgggcagctgcccccggcaggtggagcacgtgaccatcaagctgaagcatgagctgggcatcacagctgtgatgaacttccagacagagtgggacatcgtgcagaacagcagcggctgcaaccgctacccagagcccatgaccccagacaccatgatcaagctgtaccgggaggagggcctggcctacatctggatgcccaccccagacatgagcacagagggccgggtgcagatgctgccccaggccgtgtgcctgctgcacgccctgctggagaagggccacatcgtgtatgtgcactgcaatgctggggtgggccgcagcacagctgctgtgtgtggctggctgcagtatgtgatgggctggaacctgaggaaggtgcagtacttcctgatggccaagaggcctgctgtgtacattgatgaggaggccctggcccgggcccaggaggacttcttccagaagtttgggaaggtgcgcagctctgtgtgcagcctgtag

SEQ ID NO: 151312 - DNA, 996 bp, synthetic construct
  misc_feature 1..996: note = Description of Artificial Sequence: Synthetic coding sequence
  source 1..996: mol_type = other DNA
atgaggttccgctttggagtggtggtgcccccagctgtggccggggcccggcctgagctgctggtggtgggcagcaggcctgagctgggccgctgggagcccagaggagctgtgcggctgcggcctgctggaacagctgctggagatggagccctggccctgcaggagcccggcctgtggctgggggaggtggagctggccgctgaggaggccgcccaggatggagctgagcccggccgggtggacaccttctggtacaagttcctgaagcgggagcctggaggagagctgtcctgggagggcaatggcccccaccacgaccgctgctgcacctacaatgaaaacaacctggtggatggagtgtactgcctgcccatcggccactggattgaggccaccggccacaccaatgagatgaagcacaccacagacttctacttcaacattgctggccaccaggccatgcactacagccgcatcctgcccaacatctggctgggcagctgcccccggcaggtggagcacgtgaccatcaagctgaagcatgagctgggcatcacagctgtgatgaacttccagacagagtgggacatcgtgcagaacagcagcggctgcaaccgctacccagagcccatgaccccagacaccatgatcaagctgtaccgggaggagggcctggcctacatctggatgcccaccccagacatgagcacagagggccgggtgcagatgctgccccaggccgtgtgcctgctgcacgccctgctggagaagggccacatcgtgtatgtgcactgcaatgctggggtgggccgcagcacagctgctgtgtgtggctggctgcagtatgtgatgggctggaacctgaggaaggtgcagtacttcctgatggccaagaggcctgctgtgtacattgatgaggaggccctggcccgggcccaggaggacttcttccagaagtttgggaaggtgcgcagctctgtgtgcagcctgtag

SEQ ID NO: 151313 - DNA, 954 bp, synthetic construct
  misc_feature 1..954: note = Description of Artificial Sequence: Synthetic coding sequence
  source 1..954: mol_type = other DNA
atgaggttccgctttggagtggtggtgcccccagctgtggccggggcccggcctgagctgctggtggtgggcagcaggcctgagctgggccgctgggagcccagaggagctgtgcggctgcggcctgctggaacagctgctggagatggagccctggccctgcaggagcccggcctgtggctgggggaggtggagctggccgctgaggaggccgcccaggatggagctgagcccggccgggtggacaccttctggtacaagttcctgaagcgggagcctggaggagagctgtcctgggagggcaatggcccccaccacgaccgctgctgcacctacaatgaaaacaacctggtggatggagtgtactgcctgcccatcggccactggattgaggccaccggccacaccaatgagatgaagcacaccacagacttctacttcaacattgctggccaccaggccatgcactacagccgcatcctgcccaacatctggctgggcagctgcccccggcaggtggagcacgtgaccatcaagctgaagcatgagctgggcatcacagctgtgatgaacttccagacagagtgggacatcgtgcagaacagcagcggctgcaaccgctacccagagcccatgaccccagacaccatgatcaagctgtaccgggaggagggcctggcctacatctggatgcccaccccagacatgagcacagagggccgggtgcagatgctgccccaggccgtgtgcctgctgcacgccctgctggagaagggccacatcgtgtatgtgcactgcaatgctggggtgggccgcagcacagctgctgtgtgtggctggctgcagtatgtgatgggctggaacctgaggaaggtgcagtacttcctgatggccaagaggcctgctgtgtacattgatgaggaggccgccagccaggacaccttccccctgtag

SEQ ID NO: 151314 - DNA, 714 bp, synthetic construct
  misc_feature 1..714: note = Description of Artificial Sequence: Synthetic coding sequence
  source 1..714: mol_type = other DNA
tgagacaccttctggtacaagttcctgaagcgggagcctggaggagagctgtcctgggagggcaatggcccccaccacgaccgctgctgcacctacaatgaaaacaacctggtggatggagtgtactgcctgcccatcggccactggattgaggccaccggccacaccaatgagatgaagcacaccacagacttctacttcaacattgctggccaccaggccatgcactacagccgcatcctgcccaacatctggctgggcagctgcccccggcaggtggagcacgtgaccatcaagctgaagcatgagctgggcatcacagctgtgatgaacttccagacagagtgggacatcgtgcagaacagcagcggctgcaaccgctacccagagcccatgaccccagacaccatgatcaagctgtaccgggaggagggcctggcctacatctggatgcccaccccagacatgagcacagagggccgggtgcagatgctgccccaggccgtgtgcctgctgcacgccctgctggagaagggccacatcgtgtatgtgcactgcaatgctggggtgggccgcagcacagctgctgtgtgtggctggctgcagtatgtgatgggctggaacctgaggaaggtgcagtacttcctgatggccaagaggcctgctgtgtacattgatgaggaggccgccagccaggacaccttccccctgtag

SEQ ID NO: 151315 - DNA, 513 bp, synthetic construct
  misc_feature 1..513: note = Description of Artificial Sequence: Synthetic coding sequence
  source 1..513: mol_type = other DNA
tgaaatggcccccaccacgaccgctgctgcacctacaatgaaaacaacctggtggatggagtgtactgcctgcccatcggccactggattgaggccaccggccacaccaatgagatgaagcacaccacagacttctacttcaacattgctggccaccaggccatgcactacagccgcatcctgcccaacatctggctgggcagctgcccccggcaggtggagcacgtgaccatcaagctgaagcatgagctgggcatcacagctgtgatgaacttccagacagagtgggacatcgtgcagaacagcagcggctgcaaccgctacccagagcccatgaccccagacaccatgatcaagctgtaccgggaggagggcctggcctacatctggatgcccaccccagacatgagcacagaagatgagaagaggacagctgacatgtgctgcagcggcatgtgggaggagacagctgactttggcctgggcatcctggactacctgaagcagaagtag

SEQ ID NO: 151316 - DNA, 813 bp, synthetic construct
  misc_feature 1..813: note = Description of Artificial Sequence: Synthetic coding sequence
  source 1..813: mol_type = other DNA
atgaggttccgctttggagtggtggtgcccccagctgtggccggggcccggcctgagctgctggtggtgggcagcaggcctgagctgggccgctgggagcccagaggagctgtgcggctgcggcctgctggaacagctgctggagatggagccctggccctgcaggagcccggcctgtggctgggggaggtggagctggccgctgaggaggccgcccaggatggagctgagcccggccgggtggacaccttctggtacaagttcctgaagcgggagcctggaggagagctgtcctgggagggcaatggcccccaccacgaccgctgctgcacctacaatgaaaacaacctggtggatggagtgtactgcctgcccatcggccactggattgaggccaccggccacaccaatgagatgaagcacaccacagacttctacttcaacattgctggccaccaggccatgcactacagccgcatcctgcccaacatctggctgggcagctgcccccggcaggtggagcacgtgaccatcaagctgaagcatgagctgggcatcacagctgtgatgaacttccagacagagtgggacatcgtgcagaacagcagcggctgcaaccgctacccagagcccatgaccccagacaccatgatcaagctgtaccgggaggagggcctggcctacatctggatgcccaccccagacatgagcacagaagatgagaagaggacagctgacatgtgctgcagcggcatgtgggaggagacagctgactttggcctgggcatcctggactacctgaagcagaagtag

SEQ ID NO: 151317 - DNA, 945 bp, synthetic construct
  misc_feature 1..945: note = Description of Artificial Sequence: Synthetic coding sequence
  source 1..945: mol_type = other DNA
atggccccaccccaggtgctggccttcggcctgctgctggccgccgccacagccacctttgctgctgcccaggaggagtgtgtgtgtgagaactacaagctggccgtgaactgctttgtgaacaacaaccggcagtgccagtgcacctctgtgggcgcccagaacacagtcatctgcagcaagctggccgccaagtgcctggtgatgaaggccgagatgaatggcagcaagctgggccggcgggccaagccagagggcgccctgcagaacaatgatggcctgtatgaccctgactgtgatgagagcggcctcttcaaggccaagcagtgcaatggcacctccatgtgctggtgtgtgaacacagctggggtgagaagaacagacaaggacacagagatcacctgcagcgagcgggtgaggacctactggatcatcatcgagctgaagcacaaggcccgggagaagccctatgacagcaagagcctgaggacagccctgcagaaggagatcaccacccgctaccagctggaccccaagttcatcaccagcatcctgtatgaaaataatgtcatcaccatcgacctggtgcagaacagcagccagaagacccagaatgatgtggacattgctgatgtggcctactactttgagaaggatgtgaagggggagagcctcttccacagcaagaagatggacctgactgtgaatggagagcagctggacctggaccccggccagaccctcatctactacgtggatgagaaggcccctgagttctccatgcagggcctgaaggccggcgtgattgctgtgattgtggtggtggtgattgctgtggtggccggcatcgtggtgctggtgatcagcaggaagaagaggatggccaagtatgagaaggccgagatcaaggagatgggagagatgcaccgggagctgaatgcctag

SEQ ID NO: 151318 - DNA, 474 bp, synthetic construct
  misc_feature 1..474: note = Description of Artificial Sequence: Synthetic coding sequence
  source 1..474: mol_type = other DNA
atgctggtgctgctggccggcatctttgtggtgcacatcgccaccgtcatcatgctgtttgtgtccaccatcgccaacgtgtggctggtgagcaacacagtggatgcctctgtgggcctgtggaagaactgcaccaacatcagctgcagcgacagcctgtcctatgcctctgaagatgccctgaagacagtgcaggccttcatgatcctgagcatcatcttctgtgtgattgccctgctggtgtttgtgttccagctgttcaccatggagaagggcaaccgcttcttcctgagcggggccaccaccctggtgtgctggctgtgcatcctggtgggcgtgtccatctacaccagccactacgccaacagagatggcacccagtaccaccacggctacagctacatcctgggctggatctgcttctgcttctccttcatcattggagtgctgtacctggtgctgaggaagaagtag

SEQ ID NO: 151319 - DNA, 426 bp, synthetic construct
  misc_feature 1..426: note = Description of Artificial Sequence: Synthetic coding sequence
  source 1..426: mol_type = other DNA
atgctggtgctgctggccggcatctttgtggtgcacatcgccaccgtcatcatgctgtttgtgtccaccatcgccaacgtgtggctggtgagcaacacagtggatgcctctgtgggcctgtggaagaactgcaccaacatcagctgcagcgacagcctgtcctatgcctctgaagatgccctgaagacagtgcaggccttcatgatcctgagcatcatcttctgtgtgattgccctgctggtgtttgtgttccagctgttcaccatggagaagggcaaccgcttcttcctgagcggggccaccaccctggtgtgcttcatcatgagaattgtgatggagaggagcatcaccacagccatccccacctcctgggccggcagcgccagcgccagcgccagcagcagcgccttcagcatctggagctag

SEQ ID NO: 151320 - DNA, 12 bp, synthetic construct
  misc_feature 1..12: note = Description of Artificial Sequence: Synthetic coding sequence
  source 1..12: mol_type = other DNA
atgctggtgtag

SEQ ID NO: 151321 - DNA, 504 bp, synthetic construct
  misc_feature 1..504: note = Description of Artificial Sequence: Synthetic coding sequence
  source 1..504: mol_type = other DNA
atgctggtgctgctggccttcatcatcgccttccacatcaccagcgctgccctgctcttcatcgccaccgtggacaatgcctggtgggtgggagatgagttctttgctgatgtgtggaggatctgcaccaacaacaccaactgcaccgtcatcaatgacagcttccaggagtacagcaccctgcaggccgtgcaggccaccatgatcctgagcaccatcctgtgctgcatcgccttcttcatctttgtgctgcagctgttccggctgaagcagggcgagagatttgtgctgaccagcatcatccagctgatgagctgcctgtgtgtgatgattgctgccagcatctacacagacagaagagaggacatccatgacaagaatgccaagttctaccctgtgacccgggagggcagctatggctacagctacatcctggcctgggtggcctttgcctgcaccttcatcagcggcatgatgtacctgatcctgaggaagaggaagtag

SEQ ID NO: 151322 - DNA, 504 bp, synthetic construct; identical to SEQ ID NO: 151321
  misc_feature 1..504: note = Description of Artificial Sequence: Synthetic coding sequence
  source 1..504: mol_type = other DNA

SEQ ID NO: 151323 - DNA, 492 bp, synthetic construct
  misc_feature 1..492: note = Description of Artificial Sequence: Synthetic coding sequence
  source 1..492: mol_type = other DNA
atgagcctgctgctgctggtggtgtctgccctgcacatcctgatcctgatcctgctgtttgtggccaccctggacaagtcctggtggaccctgcccgggaaggagagcctgaacctgtggtatgactgcacctggaacaatgacaccaagacctgggcctgcagcaatgtgtctgaaaatggctggctgaaggctgtgcaggtgctgatggtgctgagcctcatcctgtgctgcctgtccttcatcctcttcatgttccagctgtacaccatgaggcggggcggcctcttctacgccaccggcctgtgccagctgtgcacctctgtggccgtgttcaccggggccctgatctatgccatccacgccgaggagatcctggagaagcacccccggggcggcagctttggctactgctttgccctggcctgggtggccttccccctggccctggtgtctggcatcatctacatccacctgaggaagcgggagtag

SEQ ID NO: 151324 - DNA, 2034 bp, synthetic construct
  misc_feature 1..2034: note = Description of Artificial Sequence: Synthetic coding sequence
  source 1..2034: mol_type = other DNA
atgacagccagcccagactacctggtggtgctgtttggcatcacagctggggccactggagccaagctgggcagtgatgagaaggagctgatcctgctcttctggaaggtggtggacctggccaacaagaaggtgggccagctgcacgaggtgctggtgcggccagaccagctggagctgacagaggactgcaaggaggagaccaagattgatgtggagagcctgagcagcgccagccagctggaccaggccctgcggcagttcaaccagagcgtgtccaatgagctgaacatcggcgtgggcaccagcttctgcctgtgcacagatggccagctgcacgtgcggcagatcctgcaccctgaggccagcaagaagaatgtgctgctgcctgagtgcttctacagcttctttgacctgaggaaggagttcaagaagtgctgccccggcagcccagacatcgacaagctggatgtggccaccatgacagagtacctgaactttgagaagagcagctctgtgagccgctacggggccagccaggtggaggacatgggcaacatcatcctggccatgatcagcgagccctacaaccaccgcttcagtgaccctgagcgggtgaactacaagtttgagagcggcacctgcagcaagatggagctgattgatgacaacacagtggtgcgggcccggggcctgccctggcagagcagtgaccaggacatcgcccgcttcttcaagggcctgaacatcgccaagggcggggccgccctgtgcctgaatgcccagggcagaagaaatggagaggccctggtgcgctttgtgtctgaggagcaccgggacctggccctgcagaggcacaagcaccacatgggcacccgctacatcgaggtgtacaaggccactggagaggacttcctgaagattgctgggggcaccagcaatgaggtggcccagttcctgagcaaagaaaaccaggtgattgtgaggatgaggggcctgcccttcaccgccacagctgaggaggtggtggccttcttcggccagcactgccccatcactggaggcaaggagggcatcctgtttgtgacctacccagatggccggcccactggagatgcctttgtgctgtttgcctgtgaggagtatgcccagaatgccctgaggaagcacaaggacctgctgggcaagcgctacatcgagctgttccgcagcacagctgctgaggtgcagcaggtgctgaaccgcttcagcagcgcccccctcatccccctgcccaccccacccatcatccctgtgctgccccagcagtttgtgccccccaccaacgtgcgggactgcatccggctgcggggcctgccctatgctgccaccatcgaggacatcctggacttcctgggggagtttgccacagacatccgcacccatggagtgcacatggtgctgaaccaccagggccggcccagcggagatgccttcatccagatgaagtctgctgaccgggccttcatggccgcccagaagtgccacaagaagaacatgaaggacagatatgtggaggtgttccagtgcagcgctgaggagatgaactttgtgctgatgggcggcaccctgaacagaaatggcctgagccccccaccctgcctgagcccccccagctacaccttccctgccccagctgctgtgatccccacagaggccgccatctaccagcccagcgtcatcctgaacccccgggccctgcagcccagcacagcctactacccagctggcacccagctgttcatgaactacacagcctactaccccagccccccaggcagccccaacagcctgggctacttccccacagctgccaacctgtctggagtgcccccccagcccggcaccgtggtgaggatgcagggcctggcctacaacacaggagtgaaggagatcctgaacttcttccagggctaccagtatgccacagaagatggcctcatccacaccaatgaccaggcccggaccctgcccaaggagtgggtgtgcatctag

SEQ ID NO: 151325 - DNA, 1980 bp, synthetic construct
  misc_feature 1..1980: note = Description of Artificial Sequence: Synthetic coding sequence
  source 1..1980: mol_type = other DNA
atgacagccagcccagactacctggtggtgctgtttggcatcacagctggggccactggagccaagctgggcagtgatgagaaggagctgatcctgctcttctggaaggtggtggacctggccaacaagaaggtgggccagctgcacgaggtgctggtgcggccagaccagctggagctgacagaggactgcaaggaggagaccaagattgatgtggagagcctgagcagcgccagccagctggaccaggccctgcggcagttcaaccagagcgtgtccaatgagctgaacatcggcgtgggcaccagcttctgcctgtgcacagatggccagctgcacgtgcggcagatcctgcaccctgaggccagcaagaagaatgtgctgctgcctgagtgcttctacagcttctttgacctgaggaaggagttcaagaagtgctgccccggcagcccagacatcgacaagctggatgtggccaccatgacagagtacctgaactttgagaagagcagctctgtgagccgctacggggccagccaggtggaggacatgggcaacatcatcctggccatgatcagcgagccctacaaccaccgcttcagtgaccctgagcgggtgaactacaagtttgagagcggcacctgcagcaagatggagctgattgatgacaacacagtggtgcgggcccggggcctgccctggcagagcagtgaccaggacatcgcccgcttcttcaagggcctgaacatcgccaagggcggggccgccctgtgcctgaatgcccagggcagaagaaatggagaggccctggtgcgctttgtgtctgaggagcaccgggacctggccctgcagaggcacaagcaccacatgggcacccgctacatcgaggtgtacaaggccactggagaggacttcctgaagattgctgggggcaccagcaatgaggtggcccagttcctgagcaaagaaaaccaggtgattgtgaggatgaggggcctgcccttcaccgccacagctgaggaggtggtggccttcttcggccagcactgccccatcactggaggcaaggagggcatcctgtttgtgacctacccagatggccggcccactggagatgcctttgtgctgtttgcctgtgaggagtatgcccagaatgccctgaggaagcacaaggacctgctgggcaagcgctacatcgagctgttccgcagcacagctgctgaggtgcagcaggtgctgaaccgcttcagcagcgcccccctcatccccctgcccaccccacccatcatccctgtgctgccccagcagtttgtgccccccaccaacgtgcgggactgcatccggctgcggggcctgccctatgctgccaccatcgaggacatcctggacttcctgggggagtttgccacagacatccgcacccatggagtgcacatggtgctgaaccaccagggccggcccagcggagatgccttcatccagatgaagtctgctgaccgggccttcatggccgcccagaagtgccacaagaagaacatgaaggacagatatgtggaggtgttccagtgcagcgctgaggagatgaactttgtgctgatgggcggcaccctgaacagaaatggcctgagccccccaccctgcctgagcccccccagctacaccttccctgccccagctgctgtgatccccacagaggccgccatctaccagcccagcgtcatcctgaacccccgggccctgcagcccagcacagcctactacccagctggcacccagctgttcatgaactacacagcctactaccccagccccccaggcagccccaacagcctgggctacttccccacagctgccaacctgtctggagtgcccccccagcccggcaccgtggtgaggatgcagggcctggcctacaacacaggagtgaaggagatcctgaacttcttccagggctaccagtgcctgaaggatgtgtggtag

SEQ ID NO: 151326 - DNA, 2046 bp, synthetic construct
  misc_feature 1..2046: note = Description of Artificial Sequence: Synthetic coding sequence
  source 1..2046: mol_type = other DNA
atgacagccagcccagactacctggtggtgctgtttggcatcacagctggggccactggagccaagctgggcagtgatgagaaggagctgatcctgctcttctggaaggtggtggacctggccaacaagaaggtgggccagctgcacgaggtgctggtgcggccagaccagctggagctgacagaggactgcaaggaggagaccaagattgatgtggagagcctgagcagcgccagccagctggaccaggccctgcggcagttcaaccagagcgtgtccaatgagctgaacatcggcgtgggcaccagcttctgcctgtgcacagatggccagctgcacgtgcggcagatcctgcaccctgaggccagcaagaagaatgtgctgctgcctgagtgcttctacagcttctttgacctgaggaaggagttcaagaagtgctgccccggcagcccagacatcgacaagctggatgtggccaccatgacagagtacctgaactttgagaagagcagctctgtgagccgctacggggccagccaggtggaggacatgggcaacatcatcctggccatgatcagcgagccctacaaccaccgcttcagtgaccctgagcgggtgaactacaagtttgagagcggcacctgcagcaagatggagctgattgatgacaacacagtggtgcgggcccggggcctgccctggcagagcagtgaccaggacatcgcccgcttcttcaagggcctgaacatcgccaagggcggggccgccctgtgcctgaatgcccagggcagaagaaatggagaggccctggtgcgctttgtgtctgaggagcaccgggacctggccctgcagaggcacaagcaccacatgggcacccgctacatcgaggtgtacaaggccactggagaggacttcctgaagattgctgggggcaccagcaatgaggtggcccagttcctgagcaaagaaaaccaggtgattgtgaggatgaggggcctgcccttcaccgccacagctgaggaggtggtggccttcttcggccagcactgccccatcactggaggcaaggagggcatcctgtttgtgacctacccagatggccggcccactggagatgcctttgtgctgtttgcctgtgaggagtatgcccagaatgccctgaggaagcacaaggacctgctgggcaagcgctacatcgagctgttccgcagcacagctgctgaggtgcagcaggtgctgaaccgcttcagcagcgcccccctcatccccctgcccaccccacccatcatccctgtgctgccccagcagtttgtgccccccaccaacgtgcgggactgcatccggctgcggggcctgccctatgctgccaccatcgaggacatcctggacttcctgggggagtttgccacagacatccgcacccatggagtgcacatggtgctgaaccaccagggccggcccagcggagatgccttcatccagatgaagtctgctgaccgggccttcatggccgcccagaagtgccacaagaagaacatgaaggacagatatgtggaggtgttccagtgcagcgctgaggagatgaactttgtgctgatgggcggcaccctgaacagaaatggcctgagccccccaccctgcaagctgccctgcctgagcccccccagctacaccttccctgccccagctgctgtgatccccacagaggccgccatctaccagcccagcgtcatcctgaacccccgggccctgcagcccagcacagcctactacccagctggcacccagctgttcatgaactacacagcctactaccccagccccccaggcagccccaacagcctgggctacttccccacagctgccaacctgtctggagtgcccccccagcccggcaccgtggtgaggatgcagggcctggcctacaacacaggagtgaaggagatcctgaacttcttccagggctaccagtatgccacagaagatggcctcatccacaccaatgaccaggcccggaccctgcccaaggagtgggtgtgcatctag

SEQ ID NO: 151327 - DNA, 1827 bp, synthetic construct
  misc_feature 1..1827: note = Description of Artificial Sequence: Synthetic coding sequence
  source 1..1827: mol_type = other DNA
atgacagccagcccagactacctggtggtgctgtttggcatcacagctggggccactggagccaagctgggcagtgatgagaaggagctgatcctgctcttctggaaggtggtggacctggccaacaagaaggtgggccagctgcacgaggtgctggtgcggccagaccagctggagctgacagaggactgcaaggaggagaccaagattgatgtggagagcctgagcagcgccagccagctggaccaggccctgcggcagttcaaccagagcgtgtccaatgagctgaacatcggcgtgggcaccagcttctgcctgtgcacagatggccagctgcacgtgcggcagatcctgcaccctgaggccagcaagaagaatgtgctgctgcctgagtgcttctacagcttctttgacctgaggaaggagttcaagaagtgctgccccggcagcccagacatcgacaagctggatgtggccaccatgacagagtacctgaactttgagaagagcagctctgtgagccgctacggggccagccaggtggaggacatgggcaacatcatcctggccatgatcagcgagccctacaaccaccgcttcagtgaccctgagcgggtgaactacaagtttgagagcggcacctgcagcaagatggagctgattgatgacaacacagtggtgcgggcccggggcctgccctggcagagcagtgaccaggacatcgcccgcttcttcaagggcctgaacatcgccaagggcggggccgccctgtgcctgaatgcccagggcagaagaaatggagaggccctggtgcgctttgtgtctgaggagcaccgggacctggccctgcagaggcacaagcaccacatgggcacccgctacatcgaggtgtacaaggccactggagaggacttcctgaagattgctgggggcaccagcaatgaggtggcccagttcctgagcaaagaaaaccaggtgattgtgaggatgaggggcctgcccttcaccgccacagctgaggaggtggtggccttcttcggccagcactgccccatcactggaggcaaggagggcatcctgtttgtgacctacccagatggccggcccactggagatgcctttgtgctgtttgcctgtgaggagtatgcccagaatgccctgaggaagcacaaggacctgctgggcaagcgctacatcgagctgttccgcagcacagctgctgaggtgcagcaggtgctgaaccgcttcagcagcgcccccctcatccccctgcccaccccacccatcatccctgtgctgccccagcagtttgtgccccccaccaacgtgcgggactgcatccggctgcggggcctgccctatgctgccaccatcgaggacatcctggacttcctgggggagtttgccacagacatccgcacccatggagtgcacatggtgctgaaccaccagggccggcccagcggagatgccttcatccagatgaagtctgctgaccgggccttcatggccgcccagaagtgccacaagaagaacatgaaggacagatatgtggaggtgttccagtgcagcgctgaggagatgaactttgtgctgatgggcggcaccctgaacagaaatggcctgagccccccaccctgcaagctgccctgcctgagcccccccagctacaccttccctgccccagctgctgtgatccccacagaggccgccatctaccagcccagcgtcatcctgaacccccgggccctgcagcccagcacagcctactacccagctggcacccagctgttcatgaactacacagcctactaccccagcgtgtag

SEQ ID NO: 151328 - DNA, 2154 bp, synthetic construct
  misc_feature 1..2154: note = Description of Artificial Sequence: Synthetic coding sequence
  source 1..2154: mol_type = other DNA
atgaccccacctcctcctcctcctcctcctcctggccctgaccctgctgctgaccctgctgctgacccctgcccctggccaggcagcctggtggtgctgtttggagccacagctggggccctgggccgggacctgggcagtgatgaaacagacctgatcctgctggtgtggcaggtggtggagcccaggagccggcaggtgggcaccctgcacaagagcctggtgcgggcagaggccgccgccctgagcacccagtgccgggaggccagcggcctgtctgctgacagcctggcccgggcagagcccctggacaaggtgctgcagcagttcagccagctggtgaatggagatgtggccctgctgggcggcggcccctacatgctgtgcacagatggccagcagctgctgcggcaggtgctgcaccctgaggccagcaggaagaacctggtgctgcctgacatgttcttctccttctatgacctgcggcgggagttccacatgcagcaccccagcacctgcccagcccgggacctgactgtggccaccatggcccagggcctgggcctggagacagatgccacagaagatgactttggagtgtgggaggtgaagaccatggtggccgtcatcctgcacctgctgaaggagcccagcagccagctgttcagcaagccagaggtgatcaagcagaagtatgagaccggcccctgcagcaaggcagatgtggtggacagcgagaccgtggtgcgggcccggggcctgccctggcagagcagtgaccaggatgtggcccgcttcttcaagggcctgaatgtggcccggggcggcgtggccctgtgcctgaatgcccagggcagaagaaatggagaggccctgatccgctttgtggacagcgagcagagggacctggccctgcagaggcacaagcaccacatgggcgtgcgctacatcgaggtgtacaaggccactggagaggagtttgtgaagattgctgggggcaccagcctggaggtggcccgcttcctgagccgggaggaccaggtgatcctgcggctgcggggcctgcccttctctgctggccccacagatgtgctgggcttcctgggcccagaatgtcctgtgactggaggaacagagggcctgctgtttgtgcgccacccagatggccggcccactggagatgcctttgccctgtttgcctgtgaggagctggcccaggccgccctgcggcggcacaagggcatgctgggcaagcgctacatcgagctgttccgcagcacagctgctgaggtgcagcaggtgctgaacagatatgccagcggccccctgctgcccaccctgacagcccccctgctgcccatccccttccccctggcccctggcaccggccgggactgtgtgcggctgcggggcctgccctacacagccaccatcgaggacatcctgtccttcctgggggaggccgctgctgacatccggccccatggagtgcacatggtgctgaaccagcagggccggcccagcggagatgccttcatccagatgaccagcgctgagcgggccctggccgccgcccagcgctgccacaagaaggtgatgaaggagagatatgtggaggtggtgccctgcagcacagaggagatgagccgggtgctgatgggcggcaccctgggccgcagcggcatgagccccccaccctgcaagctgccctgcctgagcccccccacctacaccaccttccaggccacccccaccctcatccccacagaaacagctgccctgtaccccagcagcgccctgctgcctgctgcccgggtgcctgctgcccccacccctgtggcctactacccaggccctgccacccagctgtacctgaactacacagcctactaccccagcccccctgtgagccccaccaccgtgggctacctgaccacccccacagctgccctggccagcgcccccacctctgtgctgagccagagcggggccctggtgaggatgcagggcgtgccctacacagctggcatgaaggacctgctgagcgtcttccaggcctaccagctgcctgcagatgactacaccagcctgatgcctgtgggggacccccccaggacagtgctgcaggcccccaaggagtgggtgtgcctgtag

SEQ ID NO: 151329 - DNA, 924 bp, synthetic construct
  misc_feature 1..924: note = Description of Artificial Sequence: Synthetic coding sequence
  source 1..924: mol_type = other DNA
atgaacaccaggaacagagtggtgaacagcggcctgggcgccagccctgccagccggcccacccgggacccccaggaccccagcggccggcagggcgagctgagccctgtggaggaccagcgggagggcctggaggccgcccccaagggccccagccgggagagcgtggtgcatgctggccagaggaggaccagcgcctacaccctcatcgcccccaacatcaacagaagaaatgagatccagagaattgctgagcaggagctggccaacctggagaagtggaaggagcagaacagagccaagcctgtgcacctggtgccccggcggctgggcggcagccagagcgagacagaggtgcggcagaagcagcagctgcagctgatgcagagcaagtacaagcagaagctgaagcgggaggagagcgtgcgcatcaagaaggaggccgaggaggccgagctgcagaagatgaaggccatccagcgggagaagagcaacaagctggaggagaagaagaggctgcaggagaacctgcggcgggaggccttccgggagcaccagcagtacaagacagctgagttcctgagcaagctgaacacagagagcccagacagaagtgcctgccagagcgctgtgtgtggcccccagagcagcacctgggcccgctcctgggcctacagagacagcctgaaggccgaggagaacaggaagctgcagaagatgaaggatgagcagcaccagaagtctgagctgctggagctgaagaggcagcagcaggagcaggagcgggccaagatccaccagacagagcacagaagagtgaacaatgccttcctggaccggctgcagggcaagagccagcccggcggcctggagcagagcggcggctgctggaacatgaacagcggcaacagctggggcatctag

SEQ ID NO: 151330 - DNA, 1233 bp, synthetic construct
  misc_feature 1..1233: note = Description of Artificial Sequence: Synthetic coding sequence
  source 1..1233: mol_type = other DNA
atgaacaccaggaacagagtggtgaacagcggcctgggcgccagccctgccagccggcccacccgggacccccaggaccccagcggccggcagggcgagctgagccctgtggaggaccagcgggagggcctggaggccgcccccaagggccccagccgggagagcgtggtgcatgctggccagaggaggaccagcgcctacaccctcatcgcccccaacatcaacagaagaaatgagatccagagaattgctgagcaggagctggccaacctggagaagtggaaggagcagaacagagccaagcctgtgcacctggtgccccggcggctgggcggcagccagagcgagacagaggtgcggcagaagcagcagctgcagctgatgcagagcaagtacaagcagaagctgaagcgggaggagagcgtgcgcatcaagaaggaggccgaggaggccgagctgcagaagatgaaggccatccagcgggagaagagcaacaagctggaggagaagaagaggctgcaggagaacctgcggcgggaggccttccgggagcaccagcagtacaagacagctgagttcctgagcaagctgaacacagagagcccagacagaagtgcctgccagagcgctgtgtgtggcccccagagcagcacctggaagctgcccatcctgccccgggaccacagctgggcccgctcctgggcctacagagacagcctgaaggccgaggagaacaggaagctgcagaagatgaaggatgagcagcaccagaagtctgagctgctggagctgaagaggcagcagcaggagcaggagcgggccaagatccaccagacagagcaccggcgggtgaacaatgccttcctggaccggctgcagggcaagagccagcccggcggcctggagcagagcggcggctgctggaacatgaacagcggcaacagctggggcagcctgctggtgttcagccgccacctgcgggtgtatgagaagatcctgacccccatctggcccagcagcacagacctggagaagccccatgagatgctgttcctgaatgtcatcctcttcagcctgaccgtcttcaccctcatcagcacagcccacaccctggacagagctgtgcggagtgactggctgctgctggtgctgatctatgcctgcctggaggagctgatccctgagctgatcttcaacctgtactgccagggcaatgccaccctcttcttctag

SEQ ID NO: 151331 - DNA, 1368 bp, synthetic construct
  misc_feature 1..1368: note = Description of Artificial Sequence: Synthetic coding sequence
  source 1..1368: mol_type = other DNA
atgtggctggagatcctgctgacctctgtgctgggctttgccatctactggttcatcagccgggacaaggaggagaccctgcccctggaggatggctggtggggccctggcaccaggtctgctgcccgggaggatgacagcatccggcccttcaaggtggagaccagtgatgaggagatccatgacctgcaccagagaattgacaagttccgcttcaccccacccctggaggacagctgcttccactacggcttcaacagcaactacctgaagaaggtgatctcctactggagaaatgaatttgactggaagaagcaggtggagatcctgaaccgctacccccacttcaagaccaagattgagggcctggacatccacttcatccacgtgaagccaccccagctgcctgctggccacacccccaagcccctgctgatggtgcacggctggccaggcagcttctatgagttctacaagatcatccccctgctgacagaccccaagaaccacggcctgagtgatgagcacgtgtttgaggtgatctgccccagcatccctggctacggcttcagcgaggccagcagcaagaagggcttcaacagcgtggccacagcccgcatcttctacaagctgatgctgcggctgggcttccaggagttctacatccagggcggggactggggcagcctcatctgcaccaacatggcccagctggtgcccagccacgtgaagggcctgcacctgaacatggccctggtgctgagcaacttcagcaccctgaccctgctgctgggccagcgcttcggccgcttcctgggcctgacagaaagagatgtggagctgctgtaccctgtgaaggagaaggtgttctacagcctgatgagggagagcggctacatgcacatccagtgcaccaagccagacacagtgggcagcgccctgaatgacagccctgtgggcctggccgcctacatcctggagaagttcagcacctggaccaacacagagttccgctacctggaggatggcggcctggagaggaagttcagcctggatgacctgctgaccaacgtgatgctgtactggaccaccggcaccatcatcagcagccagcgcttctacaaggagaacctgggccagggctggatgacccagaagcatgagaggatgaaggtgtatgtgcccaccggcttcagcgccttcccctttgagctgctgcacaccccagagaagtgggtgcgcttcaagtaccccaagctgatctcctacagctacatggtgcggggcggccactttgctgcctttgaggagcctgagctgctggcccaggacatcaggaagttcctgtctgtgctggagcggcagtag

SEQ ID NO: 151332 - DNA, 1368 bp, synthetic construct; identical to SEQ ID NO: 151331
  misc_feature 1..1368: note = Description of Artificial Sequence: Synthetic coding sequence
  source 1..1368: mol_type = other DNA

SEQ ID NO: 151333 - DNA, 486 bp, synthetic construct
  misc_feature 1..486: note = Description of Artificial Sequence: Synthetic coding sequence
  source 1..486: mol_type = other DNA
atgtggctggagatcctgctgacctctgtgctgggctttgccatctactggttcatcagccgggacaaggaggagaccctgcccctggaggatggctggtggggccctggcaccaggtctgctgcccgggaggatgacagcatccggcccttcaaggtggagaccagtgatgaggagatccatgacctgcaccagagaattgacaagttccgcttcaccccacccctggaggacagctgcttccactacggcttcaacagcaactacctgaagaaggtgatctcctactggagaaatgaatttgactggaagaagcaggtggagatcctgaaccgctacccccacttcaagaccaagattgagggcctggacatccacttcatccacgtgaagccaccccagctgcctgctggccacacccccaagcccctgctgatggtgcacggctggccaggcagcttctatgagttctacaagatcatctag

SEQ ID NO: 151334 - DNA, 411 bp, synthetic construct
  misc_feature 1..411: note = Description of Artificial Sequence: Synthetic coding sequence
  source 1..411: mol_type = other DNA
atgtggctggagatcctgctgacctctgtgctgggctttgccatctactggttcatcagccgggacaaggaggagaccctgcccctggaggatggctggtggggccctggcaccaggtctgctgcccgggaggatgacagcatccggcccttcaaggtggagaccagtgatgaggagatccatgacctgcaccagagaattgacaagttccgcttcaccccacccctggaggacagctgcttccactacggcttcaacagcaactacctgaagaaggtgatctcctactggagaaatgaatttgactggaagaagcaggtggagatcctgaaccgctacccccacttcaagaccaagattgagggcctggacatccacttcatccacgtgaagccaccccagctgccctag

SEQ ID NO: 151335 - DNA, 1509 bp, synthetic construct
  misc_feature 1..1509: note = Description of Artificial Sequence: Synthetic coding sequence
  source 1..1509: mol_type = other DNA
atgaagggggagatcaccctgagccagtggatccccctgatggaggagaactgcaggaagtgcagcgagacagccaaggtgtgcctgcccaagaacttcagcatcaaggagatctttgacaaggccatcagcgccaggaagatcaaccggcccatgctgcaggccgccctgatgctgaggaagaagggcttcaccacagccatcctgaccaacacctggctggatgacagagctgagagagatggcctggcccagctgatgtgtgagctgaagatgcactttgacttcctgattgagagctgccaggtgggcatggtgaagccagagccccagatctacaagttcctgctggacaccctgaaggccagccccagcgaggtggtgttcctggatgacattggagccaacctgaagccagcccgggacctgggcatggtgaccatcctggtgcaggacacagacacagccctgaaggagctggagaaggtgacaggcatccagctgctgaacaccccagcccccctgcccaccagctgcaaccccagcgacatgagccacggctacgtgacagtgaagccccgggtgcggctgcactttgtggagctgggcagcggccctgctgtgtgcctgtgccacggcttccctgagagctggtacagctggagataccagatcccagccctggcccaggccggctacagagtgctggccatggacatgaagggctatggagagagcagcgcccctcctgagattgaggagtactgcatggaggtgctgtgcaaggagatggtgaccttcctggacaagctgggcctgagccaggccgtgttcatcggccatgactggggcggcatgctggtgtggtacatggccctcttctacccagagcgggtgcgggctgtggccagcctgaacacccccttcatcccagccaaccccaacatgagccccctggagagcatcaaggccaaccctgtgtttgactaccagctgtacttccaggagcccggggtggccgaggccgagctggagcagaacctgagcaggaccttcaagagcctcttccgggccagtgatgagagcgtgctgtccatgcacaaggtgtgtgaggccggcggcctgtttgtgaacagccctgaggagcccagcctgagcaggatggtgacagaggaggagatccagttctacgtgcagcagttcaagaagagcggcttccggggccccctgaactggtacagaaacatggagaggaactggaagtgggcctgcaagagcctgggcaggaagatcctgatcccagccctgatggtgacagctgagaaggactttgtgctggtgccccagatgagccagcacatggaggactggatcccccacctgaagaggggccacatcgaggactgtggccactggacccagatggacaagcccacagaggtgaaccagatcctgatcaagtggctggacagtgatgccaggaacccccctgtggtgtccaagatgtag

SEQ ID NO: 151336 - DNA, 1470 bp, synthetic construct
  misc_feature 1..1470: note = Description of Artificial Sequence: Synthetic coding sequence
  source 1..1470: mol_type = other DNA
atggaggagaactgcaggaaatgttctgaaacagccaaggtgtgcctgcccaagaacttcagcatcaaggagatctttgacaaggccatcagcgccaggaagatcaaccggcccatgctgcaggccgccctgatgctgaggaagaagggcttcaccacagccatcctgaccaacacctggctggatgacagagctgagagagatggcctggcccagctgatgtgtgagctgaagatgcactttgacttcctgattgagagctgccaggtgggcatggtgaagccagagccccagatctacaagttcctgctggacaccctgaaggccagccccagcgaggtggtgttcctggatgacatcggggccaacctgaagccagcccgggacctgggcatggtgaccatcctggtgcaggacacagacacagccctgaaggagctggagaaggtgacaggcatccagctgctgaacaccccagcccccctgcccaccagctgcaaccccagcgacatgagccacggctacgtgacagtgaagccccgggtgcggctgcactttgtggagctgggcagcggccctgctgtgtgcctgtgccacggcttccctgagagctggtacagctggagataccagatcccagccctggcccaggccggctacagagtgctggccatggacatgaagggctacggggagagcagcgcccctcctgagattgaggagtactgcatggaggtgctgtgcaaggagatggtgaccttcctggacaagctgggcctgagccaggccgtgttcatcggccatgactggggcggcatgctggtgtggtacatggccctcttctacccagagcgggtgcgggctgtggccagcctgaacacccccttcatcccagccaaccccaacatgagccccctggagagcatcaaggccaaccctgtgtttgactaccagctgtacttccaggagcccggggtggccgaggccgagctggagcagaacctgagcaggaccttcaagagcctcttccgggccagtgatgaatctgtgctgtccatgcacaaggtgtgtgaggccggcggcctgtttgtgaacagccctgaggagcccagcctgagcaggatggtgacagaggaggagatccagttctacgtgcagcagttcaagaagagcggcttccggggccccctgaactggtacagaaacatggagaggaactggaagtgggcctgcaagagcctgggcaggaagatcctgatcccagccctgatggtgacagctgagaaggactttgtgctggtgccccagatgagccagcacatggaggactggatcccccacctgaagaggggccacatcgaggactgtggccactggacccagatggacaagcccacagaggtgaaccagatcctgatcaagtggctggacagtgatgccagaaatcctcctgtggtgtccaagatgtag

SEQ ID NO: 151337 - DNA, 1509 bp, synthetic construct
  misc_feature 1..1509: note = Description of Artificial Sequence: Synthetic coding sequence
  source 1..1509: mol_type = other DNA
atgaccctgcgggctgctgtgtttgacctggatggagtgctggccctgcctgctgtgtttggagtgctgggccgcacagaggaggccctggccctgccccggggcctgctgaatgatgccttccagaagggcggccctgagggcgccaccacccggctgatgaagggggagatcaccctgagccagtggatccccctgatggaggagaactgcaggaaatgttctgaaacagccaaggtgtgcctgcccaagaacttcagcatcaaggagatctttgacaaggccatcagcgccaggaagatcaaccggcccatgctgcaggccgccctgatgctgaggaagaaggccttctgcagcggcttcaccacagccatcctgaccaacacctggctggatgacagagctgagagagatggcctggcccagctgatgtgtgagctgaagatgcactttgacttcctgattgagagctgccaggtgggcatggtgaagccagagccccagatctacaagttcctgctggacaccctgaaggccagccccagcgaggtggtgttcctggatgacatcggggccaacctgaagccagcccgggacctgggcatggtgaccatcctggtgcaggacacagacacagccctgaaggagctggagaaggtgacaggcatccagctgctgaacaccccagcccccctgcccaccagctgcaaccccagcgacatgagccacggctacgtgacagtgaagccccgggtgcggctgcactttgtggagctgggcagcggccctgctgtgtgcctgtgccacggcttccctgagagctggtacagctggagataccagatcccagccctggcccaggccggctacagagtgctggccatggacatgaagggctacggggagagcagcgcccctcctgagattgaggagtactgcatggaggtgctgtgcaaggagagcatcaaggccaaccctgtgtttgactaccagctgtacttccaggagcccggggtggccgaggccgagctggagcagaacctgagcaggaccttcaagagcctcttccgggccagtgatgagagcgtgctgtccatgcacaaggtgtgtgaggccggcggcctgtttgtgaacagccctgaggagcccagcctgagcaggatggtgacagaggaggagatccagttctacgtgcagcagttcaagaagagcggcttccggggccccctgaactggtacagaaacatggagaggaactggaagtgggcctgcaagagcctgggcaggaagatcctgatcccagccctgatggtgacagctgagaaggactttgtgctggtgccccagatgagccagcacatggaggactggatcccccacctgaagaggggccacatcgaggactgtggccactggacccagatggacaagcccacagaggtgaaccagatcctgatcaagtggctggacagtgatgccaggaacccccctgtggtgtccaagatgtag

SEQ ID NO: 151338 - DNA, 1668 bp, synthetic construct
  misc_feature 1..1668: note = Description of Artificial Sequence: Synthetic coding sequence
  source 1..1668: mol_type = other DNA
atgaccctgcgggctgctgtgtttgacctggatggagtgctggccctgcctgctgtgtttggagtgctgggccgcacagaggaggccctggccctgccccggggcctgctgaatgatgccttccagaagggcggccctgagggcgccaccacccggctgatgaagggggagatcaccctgagccagtggatccccctgatggaggagaactgcaggaaatgttctgaaacagccaaggtgtgcctgcccaagaacttcagcatcaaggagatctttgacaaggccatcagcgccaggaagatcaaccggcccatgctgcaggccgccctgatgctgaggaagaagggcttcaccacagccatcctgaccaacacctggctggatgacagagctgagagagatggcctggcccagctgatgtgtgagctgaagatgcactttgacttcctgattgagagctgccaggtgggcatggtgaagccagagccccagatctacaagttcctgctggacaccctgaaggccagccccagcgaggtggtgttcctggatgacatcggggccaacctgaagccagcccgggacctgggcatggtgaccatcctggtgcaggacacagacacagccctgaaggagctggagaaggtgacaggcatccagctgctgaacaccccagcccccctgcccaccagctgcaaccccagcgacatgagccacggctacgtgacagtgaagccccgggtgcggctgcactttgtggagctgggcagcggccctgctgtgtgcctgtgccacggcttccctgagagctggtacagctggagataccagatcccagccctggcccaggccggctacagagtgctggccatggacatgaagggctacggggagagcagcgcccctcctgagattgaggagtactgcatggaggtgctgtgcaaggagatggtgaccttcctggacaagctgggcctgagccaggccgtgttcatcggccatgactggggcggcatgctggtgtggtacatggccctcttctacccagagcgggtgcgggctgtggccagcctgaacacccccttcatcccagccaaccccaacatgagccccctggagagcatcaaggccaaccctgtgtttgactaccagctgtacttccaggagcccggggtggccgaggccgagctggagcagaacctgagcaggaccttcaagagcctcttccgggccagtgatgaatctgtgctgtccatgcacaaggtgtgtgaggccggcggcctgtttgtgaacagccctgaggagcccagcctgagcaggatggtgacagaggaggagatccagttctacgtgcagcagttcaagaagagcggcttccggggccccctgaactggtacagaaacatggagaggaactggaagtgggcctgcaagagcctgggcaggaagatcctgatcccagccctgatggtgacagctgagaaggactttgtgctggtgccccagatgagccagcacatggaggactggatcccccacctgaagaggggccacatcgaggactgtggccactggacccagatggacaagcccacagaggtgaaccagatcctgatcaagtggctggacagtgatgccagaaatcctcctgtggtgtccaagatgtag

SEQ ID NO: 151339 - DNA, 1653 bp, synthetic construct
  misc_feature 1..1653: note = Description of Artificial Sequence: Synthetic coding sequence
  source 1..1653: mol_type = other DNA
atgagcaccagcagcctgcggcggcagatgaagaacatcgtgcacaactacagcgaggccgagatcaaggtgcgggaggccaccagcaatgacccctggggccccagcagcagcctgatgtctgaaattgctgacctgacctacaacgtggtggccttcagcgagatcatgtccatgatctggaagaggctgaatgaccacggcaagaactggaggcatgtgtacaaggccatgaccctgatggagtacctgatcaagacaggcagcgagcgggtgtcccagcagtgcaaggagaacatgtatgctgtgcagaccctgaaggacttccagtatgtggacagagatggcaaggaccagggcgtgaatgtgcgggagaaggccaagcagctggtggccctgctgagagatgaagatcggctgcgggaggagcgggcccacgccctgaagaccaaggagaagctggcccagacagccacagccagcagcgctgctgtgggcagcggccccccacctgaggccgagcaggcctggccccagagcagtggagaggaggagctgcagctgcagctggccctggccatgagcaaggaggaggccgaccaggaggagcgcatcagaagaggagatgacctgcggctgcagatggccatcgaggagagcaagcgggagaccggcggcaaggaggagagcagcctgatggacctggctgatgtgttcaccgccccagccccagcccccaccacagacccctggggcggccctgcccccatggctgctgctgtgcccacagctgcccccaccagtgacccctggggcggcccccctgtgcccccagctgctgacccctggggcggccctgcccccaccccagccagcggggacccctggaggcctgctgccccagctggccccagcgtggacccctggggcggcaccccagccccagctgctggggagggccccaccccagacccctggggcagcagtgatggcggcgtgcctgtgtctggccccagcgccagtgacccctggaccccagccccagccttcagtgacccctggggcggcagccctgccaagcccagcaccaacggcaccacagctgggggctttgacacagagccagatgagttcagtgactttgaccggctgaggacagccctgcccaccagcggcagcagcgctggggagctggagctgctggccggggaggtgcctgcccggagccctggggcctttgacatgtctggagtgcggggcagcctggccgaggccgtgggcagccccccacctgctgccacccccacccccaccccacccaccaggaagaccccagagagcttcctgggccccaatgctgccctggtggacctggacagcctggtgtccaggcctggccccaccccacctggggccaaggccagcaaccccttcctgcccggcggcggccctgccaccggccccagcgtgaccaaccccttccagcctgcccccccagccaccctgaccctgaaccagctgcggctgagccctgtgccccctgtgcctggggccccacccacctacatcagccccctgggcggcggccctggcctgccccccatgatgcctcctggccccccagcccccaacaccaaccccttcctgctgtag

SEQ ID NO: 151340 - DNA, 1731 bp, synthetic construct
  misc_feature 1..1731: note = Description of Artificial Sequence: Synthetic coding sequence
  source 1..1731: mol_type = other DNA
atgagcaccagcagcctgcggcggcagatgaagaacatcgtgcacaactacagcgaggccgagatcaaggtgcgggaggccaccagcaatgacccctggggccccagcagcagcctgatgtctgaaattgctgacctgacctacaacgtggtggccttcagcgagatcatgtccatgatctggaagaggctgaatgaccacggcaagaactggaggcatgtgtacaaggccatgaccctgatggagtacctgatcaagacaggcagcgagcgggtgtcccagcagtgcaaggagaacatgtatgctgtgcagaccctgaaggacttccagtatgtggacagagatggcaaggaccagggcgtgaatgtgcgggagaaggccaagcagctggtggccctgctgagagatgaagatcggctgcgggaggagcgggcccacgccctgaagaccaaggagaagctggcccagacagccacagccagcagcgctgctgtgggcagcggccccccacctgaggccgagcaggcctggccccagagcagtggagaggaggagctgcagctgcagctggccctggccatgagcaaggaggaggccgaccagccccccagctgtggcccagaagatgatgcccagctgcagctggccctgagcctgagccgggaggagcatgacaaggaggagcgcatcagaagaggagatgacctgcggctgcagatggccatcgaggagagcaagcgggagactggaggcaaggaggagagcagcctgatggacctggctgatgtgttcaccgccccagccccagcccccaccacagacccctggggcggccctgcccccatggctgctgctgtgcccacagctgcccccaccagtgacccctggggcggcccccctgtgcccccagctgctgacccctggggcggccctgcccccaccccagccagcggggacccctggaggcctgctgccccagctggccccagcgtggacccctggggcggcaccccagccccagctgctggggagggccccaccccagacccctggggcagcagtgatggaggagtgcctgtgtctggccccagcgccagtgacccctggaccccagccccagccttcagtgacccctggggcggcagccctgccaagcccagcaccaacggcaccacagctgctgggggctttgacacagagccagatgagttcagtgactttgaccggctgaggacagccctgcccaccagcggcagcagcgctggggagctggagctgctggccggggaggtgcctgcccggagccctggggcctttgacatgtctggagtgcggggcagcctggccgaggccgtgggcagccccccacctgctgccacccccacccccaccccacccaccaggaagaccccagagagcttcctgggccccaatgctgccctggtggacctggacagcctggtgtccaggcctggccccaccccacctggggccaaggccagcaaccccttcctgcccggcggcggccctgccaccggccccagcgtgaccaaccccttccagcctgcccccccagccaccctgaccctgaaccagctgcggctgagccctgtgccccctgtgcctggggccccacccacctacatcagccccctgggcggcggccctggcctgccccccatgatgcctcctggccccccagcccccaacaccaaccccttcctgctgtag

SEQ ID NO: 151341 - DNA, 1989 bp, synthetic construct
  misc_feature 1..1989: note = Description of Artificial Sequence: Synthetic coding sequence
  source 1..1989: mol_type = other DNA
atgggagaccagagctggctgtggaaccaggccgcccctggggtgcgcagccctgtgtttgcctgcagcgtggagaagggaaatgtgcccctggtgctgtctgagcacctggcccacagccgggaccccggcagcggggctgtgcgcttcctgatcagccctgagccctgggccagcgccatcctgggcaccagcggcctgctggccagccctgtgctgcctgctgccctggatgctgtgacctgccagcacctgccccagcccagcagcggcagccggcccatcagccccagaattggagccctgtgccccctgctgctgcagcccggcaccatgagcaccagcagcctgcggcggcagatgaagaacatcgtgcacaactacagcgaggccgagatcaaggtgcgggaggccaccagcaatgacccctggggccccagcagcagcctgatgtctgaaattgctgacctgacctacaacgtggtggccttcagcgagatcatgtccatgatctggaagaggctgaatgaccacggcaagaactggaggcatgtgtacaaggccatgaccctgatggagtacctgatcaagacaggcagcgagcgggtgtcccagcagtgcaaggagaacatgtatgctgtgcagaccctgaaggacttccagtatgtggacagagatggcaaggaccagggcgtgaatgtgcgggagaaggccaagcagctggtggccctgctgagagatgaggaccggctgcgggaggagcgggcccacgccctgaagaccaaggagaagctggcccagacagccacagccagcagcgctgctgtgggcagcggccccccacctgaggccgagcaggcctggccccagagcagcggggaggaggagctgcagctgcagctggccctggccatgagcaaggaggaggccgaccaggaggagcgcatcagaagaggagatgacctgcggctgcagatggccatcgaggagagcaagcgggagactggaggcaaggaggagagcagcctgatggacctggctgatgtgttcaccgccccagccccagcccccaccacagacccctggggcggccctgcccccatggctgctgctgtgcccacagctgcccccaccagtgacccctggggcggcccccctgtgcccccagctgctgacccctggggcggccctgcccccaccccagccagcggggacccctggaggcctgctgccccagctggccccagcgtggacccctggggcggcaccccagccccagctgctggggagggccccaccccagacccctggggcagcagtgatggaggagtgcctgtgtctggccccagcgccagtgacccctggaccccagccccagccttcagtgacccctggggcggcagccctgccaagcccagcaccaacggcaccacagctgctgggggctttgacacagagccagatgagttcagtgactttgaccggctgaggacagccctgcccaccagcggcagcagcgctggggagctggagctgctggccggggaggtgcctgcccggagccctggggcctttgacatgtctggagtgcggggcagcctggccgaggccgtgggcagccccccacctgctgccacccccacccccaccccacccaccaggaagaccccagagagcttcctgggccccaatgctgccctggtggacctggacagcctggtgtccaggcctggccccaccccacctggggccaaggccagcaaccccttcctgcccggcggcggccctgccaccggccccagcgtgaccaaccccttccagcctgcccccccagccaccctgaccctgaaccagctgcggctgagccctgtgccccctgtgcctggggccccacccacctacatcagccccctgggcggcggccctggcctgccccccatgatgcctcctggccccccagcccccaacaccaaccccttcctgctgtag

SEQ ID NO: 151342 - DNA, 1611 bp, synthetic construct
  misc_feature 1..1611: note = Description of Artificial Sequence: Synthetic coding sequence
  source 1..1611: mol_type = other DNA
atgtctgaaattgctgacctgacctacaacgtggtggccttcagcgagatcatgtccatgatctggaagaggctgaatgaccacggcaagaactggaggcatgtgtacaaggccatgaccctgatggagtacctgatcaagacaggcagcgagcgggtgtcccagcagtgcaaggagaacatgtatgctgtgcagaccctgaaggacttccagtatgtggacagagatggcaaggaccagggcgtgaatgtgcgggagaaggccaagcagctggtggccctgctgagagatgaggaccggctgcgggaggagcgggcccacgccctgaagaccaaggagaagctggcccagacagccacagccagcagcgctgctgtgggcagcggccccccacctgaggccgagcaggcctggccccagagcagcggggaggaggagctgcagctgcagctggccctggccatgagcaaggaggaggccgaccagccccccagctgtggcccagaagatgatgcccagctgcagctggccctgagcctgagccgggaggagcatgacaaggaggagcgcatcagaagaggagatgacctgcggctgcagatggccatcgaggagagcaagcgggagaccggcggcaaggaggagagcagcctgatggacctggctgatgtgttcaccgccccagccccagcccccaccacagacccctggggcggccctgcccccatggctgctgctgtgcccacagctgcccccaccagtgacccctggggcggcccccctgtgcccccagctgctgacccctggggcggccctgcccccaccccagccagcggggacccctggaggcctgctgccccagctggccccagcgtggacccctggggcggcaccccagccccagctgctggggagggccccaccccagacccctggggcagcagtgatggcggcgtgcctgtgtctggccccagcgccagtgacccctggaccccagccccagccttcagtgacccctggggcggcagccctgccaagcccagcaccaacggcaccacagctgggggctttgacacagagccagatgagttcagtgactttgaccggctgaggacagccctgcccaccagcggcagcagcgctggggagctggagctgctggccggggaggtgcctgcccggagccctggggcctttgacatgtctggagtgcggggcagcctggccgaggccgtgggcagccccccacctgctgccacccccacccccaccccacccaccaggaagaccccagagagcttcctgggccccaatgctgccctggtggacctggacagcctggtgtccaggcctggccccaccccacctggggccaaggccagcaaccccttcctgcccggcggcggccctgccaccggccccagcgtgaccaaccccttccagcctgcccccccagccaccctgaccctgaaccagctgcggctgagccctgtgccccctgtgcctggggccccacccacctacatcagccccctgggcggcggccctggcctgccccccatgatgcctcctggccccccagcccccaacaccaaccccttcctgctgtag

SEQ ID NO: 151343 - DNA, 1926 bp, synthetic construct
  misc_feature 1..1926: note = Description of Artificial Sequence: Synthetic coding sequence
  source 1..1926: mol_type = other DNA
atgaccaccagcagcatccggcggcagatgaagaacatcgtgaacaactacagcgaggccgagatcaaggtgcgggaggccaccagcaatgacccctggggccccagcagcagcctgatgacagaaattgctgacctgacctacaacgtggtggccttcagcgagatcatgtccatggtgtggaagaggctgaatgaccacggcaagaactggaggcatgtgtacaaggccctgaccctgctggactacctgatcaagacaggcagcgagcgggtggcccagcagtgccgggagaacatctttgccatccagaccctgaaggacttccagtacatcgacagagatggcaaggaccagggcatcaacgtgcgggagaagagcaagcagctggtggccctgctgaaggatgaggagcggctgaaggccgagcgggcccaggccctgaagaccaaggagaggatggcccaggtggccaccggcatgggcagcaaccagatcaccttcggccggggcagcagccagcccaacctgagcaccagccacagcgagcaggagtatggcaaggccggcggcagccctgccagctaccacggcagccctgaggccagcctgtgcccccagcacaggactggagcccccctgggccagagcgaggagctgcagcccctgagccagaggcaccccttcctgccccacctgggcctggccagccggcccaacggggactggagccagccctgcctgacctgtgacagagctgcccgggccaccagcccccgggtgtcctctgagctggagcaggcccggccccagaccagcggggaggaggagctgcagctgcagctggccctggccatgagccgggaggtggccgagcaggaggagcggctgcggagaggagatgacctgcggctgcagatggccctggaggagagcagaagagacacagtgaagatccccaagaagaaggagcacggcagcctgccccagcagaccaccctgctggacctgatggatgccctgcccagcagcggccctgctgcccagaaggccgagccctggggccccagcgccagcaccaaccagaccaacccctggggcggccctgctgccccagccagcaccagtgacccctggcccagctttggcaccaagccagctgccagcattgacccctggggcgtgcccactggagccaccgtgcagagcgtgcccaagaacagcgacccctgggccgccagccagcagcctgccagcagcgctgggaagagggccagtgatgcctggggcgctgtgtccaccaccaagcctgtgtctgtgtctggcagctttgagctgttcagcaacctgaatggcaccatcaaggatgacttcagcgagtttgacaacctgcggaccagcaagaagacagctgagagcgtgaccagcctgcccagccagaacaacggcaccaccagcccagacccctttgagagccagcccctgactgtggccagcagcaagcccagcagcgccaggaagaccccagagagcttcctgggccccaatgctgccctggtgaacctggacagcctggtgaccaggcctgcccccccagcccagagcctgaaccccttcctggcccctggggccccagccaccagcgcccctgtgaaccccttccaggtgaaccagccccagcccctgaccctgaaccagctgcggggcagccctgtgctgggcaccagcaccagctttggacctggccctggggtggagagcatggctgtggcctccatgaccagcgctgccccccagcctgccctgggcgccaccggcagcagcctgacccccctgggccctgccatgatgaacatggtgggctctgtgggcatcccccccagcgctgcccaggccaccggcaccaccaaccccttcctgctgtag

SEQ ID NO: 151344 - DNA, 1755 bp, synthetic construct
  misc_feature 1..1755: note = Description of Artificial Sequence: Synthetic coding sequence
  source 1..1755: mol_type = other DNA
atgaccaccagcagcatccggcggcagatgaagaacatcgtgaacaactacagcgaggccgagatcaaggtgcgggaggccaccagcaatgacccctggggccccagcagcagcctgatgacagaaattgctgacctgacctacaacgtggtggccttcagcgagatcatgtccatggtgtggaagaggctgaatgaccacggcaagaactggaggcatgtgtacaaggccctgaccctgctggactacctgatcaagacaggcagcgagcgggtggcccagcagtgccgggagaacatctttgccatccagaccctgaaggacttccagtacatcgacagagatggcaaggaccagggcatcaacgtgcgggagaagagcaagcagctggtggccctgctgaaggatgaggagcggctgaaggccgagcgggcccaggccctgaagaccaaggagaggatggcccaggtggccaccggcatgggcagcaaccagatcaccttcggccggggcagcagccagcccaacctgagcaccagccacagcgagcaggagtatggcaaggccggcggcagccctgccagctaccacggcagcaccagcccccgggtgagcagcgagctggagcaggcccggccccagaccagcggggaggaggagctgcagctgcagctggccctggccatgagccgggaggtggccgagcaggaggagcggctgcggagaggagatgacctgcggctgcagatggccctggaggagagccggcgggacacagtgaagatccccaagaagaaggagcacggcagcctgccccagcagaccaccctgctggacctgatggatgccctgcccagcagcggccctgctgcccagaaggccgagccctggggccccagcgccagcaccaaccagaccaacccctggggcggccctgctgccccagccagcaccagtgacccctggcccagctttggcaccaagccagctgccagcattgacccctggggcgtgcccaccggggccaccgtgcagagcgtgcccaagaacagcgacccctgggccgccagccagcagcctgccagcagcgctgggaagagggccagtgatgcctggggcgctgtgtccaccaccaagcctgtgtctgtgtctggcagctttgagctgttcagcaacctgaatggcaccatcaaggatgacttcagcgagtttgacaacctgcggaccagcaagaagacagctgagagcgtgaccagcctgcccagccagaacaacggcaccaccagcccagacccctttgagagccagcccctgactgtggccagcagcaagcccagcagcgccaggaagaccccagagagcttcctgggccccaatgctgccctggtgaacctggacagcctggtgaccaggcctgcccccccagcccagagcctgaaccccttcctggcccctggggccccagccaccagcgcccctgtgaaccccttccaggtgaaccagccccagcccctgaccctgaaccagctgcggggcagccctgtgctgggcaccagcaccagctttggacctggccctggggtggagagcatggctgtggcctccatgaccagcgctgccccccagcctgccctgggcgccaccggcagcagcctgacccccctgggccctgccatgatgaacatggtgggctctgtgggcatccccccatctgctgcccaggccaccggcaccaccaaccccttcctgctgtag

SEQ ID NO: 151345 - DNA, 1071 bp, synthetic construct
  misc_feature 1..1071: note = Description of Artificial Sequence: Synthetic coding sequence
  source 1..1071: mol_type = other DNA
atgagccgggaggtggccgagcaggaggagcggctgcggagaggagatgacctgcggctgcagatggccctggaggagagccggcgggacacagtgaagatccccaagaagaaggagcacggcagcctgccccagcagaccaccctgctggacctgatggatgccctgcccagcagcggccctgctgcccagaaggccgagccctggggccccagcgccagcaccaaccagaccaacccctggggcggccctgctgccccagccagcaccagtgacccctggcccagctttggcaccaagccagctgccagcattgacccctggggcgtgcccaccggggccaccgtgcagagcgtgcccaagaacagcgacccctgggccgccagccagcagcctgccagcagcgctgggaagagggccagtgatgcctggggcgctgtgtccaccaccaagcctgtgtctgtgtctggcagctttgagctgttcagcaacctgaatggcaccatcaaggatgacttcagcgagtttgacaacctgcggaccagcaagaagacagctgagagcgtgaccagcctgcccagccagaacaacggcaccaccagcccagacccctttgagagccagcccctgactgtggccagcagcaagcccagcagcgccaggaagaccccagagagcttcctgggccccaatgctgccctggtgaacctggacagcctggtgaccaggcctgcccccccagcccagagcctgaaccccttcctggcccctggggccccagccaccagcgcccctgtgaaccccttccaggtgaaccagccccagcccctgaccctgaaccagctgcggggcagccctgtgctgggcaccagcaccagctttggacctggccctggggtggagagcatggctgtggcctccatgaccagcgctgccccccagcctgccctgggcgccaccggcagcagcctgacccccctgggccctgccatgatgaacatggtgggctctgtgggcatccccccatctgctgcccaggccaccggcaccaccaaccccttcctgctgtag

SEQ ID NO: 151346 - DNA, 1755 bp, synthetic construct; identical to SEQ ID NO: 151344
  misc_feature 1..1755: note = Description of Artificial Sequence: Synthetic coding sequence
  source 1..1755: mol_type = other DNA

SEQ ID NO: 151347 - DNA, 1455 bp, synthetic construct
  misc_feature 1..1455: note = Description of Artificial Sequence: Synthetic coding sequence
  source 1..1455: mol_type = other DNA
atgaccaccagcagcatccggcggcagatgaagaacatcgtgaacaactacagcgaggccgagatcaaggtgcgggaggccaccagcaatgacccctggggccccagcagcagcctgatgacagaaattgctgacctgacctacaacgtggtggccttcagcgagatcatgtccatggtgtggaagaggctgaatgaccacggcaagaactggaggcatgtgtacaaggccctgaccctgctggactacctgatcaagacaggcagcgagcgggtggcccagcagtgccgggagaacatctttgccatccagaccctgaaggacttccagtacatcgacagagatggcaaggaccagggcatcaacgtgcgggagaagagcaagcagctggtggccctgctgaaggatgaggagcggctgaaggccgagcgggcccaggccctgaagaccaaggagaggatggcccaggtggccaccggcatgggcagcaaccagatcaccttcggccggggcagcagccagcccaacctgagcaccagccacagcgagcaggagtatggcaaggccggcggcagccctgccagctaccacggcagccctgaggccagcctgtgcccccagcacaggactggagcccccctgggccagagcgaggagctgcagcccctgagccagaggcaccccttcctgccccacctgggcctggccagccggcccaacggggactggagccagccctgcctgacctgtgacagagctgcccgggccaccagcccccgggtgtcctctgagctggagcaggcccggccccagaccagcggggaggaggagctgcagctgcagctggccctggccatgagccgggaggtggccgagcaggaggagcggctgcggagaggagatgacctgcggctgcagatggccctggaggagagcagaagagacacagtgaagatccccaagaagaaggagcacggcagcctgccccagcagaccaccctgctggacctgatggatgccctgcccagcagcggccctgctgcccagaaggccgagccctggggccccagcgccagcaccaaccagaccaacccctggggcggccctgctgccccagccagcaccagtgacccctggcccagctttggcaccaagccagctgccagcattgacccctggggcgtgcccactggagccaccgtgcagagcgtgcccaagaacagcgacccctgggccgccagccagcagcctgccagcagcgctgggaagagggccagtgatgcctggggcgctgtgtccaccaccaagcctgtgtctgtgtctggcagctttgagctgttcagcaacctgaatggcaccatcaaggatgacttcagcgagtttgacaacctgcggaccagcaagaagacaggcatgcagggcctgaccggcctgctcttcaccatggagatctag

SEQ ID NO: 151348 - DNA, 1500 bp, synthetic construct
  misc_feature 1..1500: note = Description of Artificial Sequence: Synthetic coding sequence
  source 1..1500: mol_type = other DNA
atgaccaccagcagcatccggcggcagatgaagaacatcgtgaacaactacagcgaggccgagatcaaggtgcgggaggccaccagcaatgacccctggggccccagcagcagcctgatgacagaaattgctgacctgacctacaacgtggtggccttcagcgagatcatgtccatggtgtggaagaggctgaatgaccacggcaagaactggaggcatgtgtacaaggccctgaccctgctggactacctgatcaagacaggcagcgagcgggtggcccagcagtgccgggagaacatctttgccatccagaccctgaaggacttccagtacatcgacagagatggcaaggaccagggcatcaacgtgcgggagaagagcaagcagctggtggccctgctgaaggatgaggagcggctgaaggccgagcgggcccaggccctgaagaccaaggagaggatggcccaggtggccaccggcatgggcagcaaccagatcaccttcggccggggcagcagccagcccaacctgagcaccagccacagcgagcaggagtatggcaaggccggcggcagccctgccagctaccacggcagcaccagcccccgggtgagcagcgagctggagcaggcccggccccagaccagcggggaggaggagctgcagctgcagctggccctggccatgagccgggaggtggccgagcaggaggagcggctgcggagaggagatgacctgcggctgcagatggccctggaggagagccggcgggacacagtgaagatccccaagaagaaggagcacggcagcctgccccagcagaccaccctgctggacctgatggatgccctgcccagcagcggccctgctgcccagaaggccgagccctggggccccagcgccagcaccaaccagaccaacccctggggcggccctgctgccccagccagcaccagtgacccctggcccagctttggcaccaagccagctgccagcattgacccctggggcgtgcccaccggggccaccgtgcagagcgtgcccaagaacagcgacccctgggccgccagccagcagcctgccagcagcgctgggaagagggccagtgatgcctggggcgctgtgtccaccaccaagcctgtgtctgtgtctggcagctttgagctgttcagcaacctgaatggcaccatcaaggatgacttcagcgagtttgacaacctgcggaccagcaagaagacagctgagagcgtgaccagcctgcccagccagaacaacggcaccaccagcccagacccctttgagagccagcccctgactgtggccagcagcaagcccagcagcgccaggaagaccccagagagcttcctgggccccaatgctgccctggtgaacctggacagcctggtgaccaggcctgcccccccagcccagagcctgaaccccttcctggcccctggcatgcagggcctgaccggcctgctcttcaccatggagatctag

SEQ ID NO: 151349 - DNA, 1899 bp, synthetic construct
  misc_feature 1..1899: note = Description of Artificial Sequence: Synthetic coding sequence
  source 1..1899: mol_type = other DNA
atgaccaccagcgccctgcggcggcaggtgaagaacatcgtgcacaactacagcgaggccgagatcaaggtgcgggaggccaccagcaatgacccctggggcccccccagcagcctgatgtctgaaattgctgacctgaccttcaacacagtggccttcacagaggtgatgggcatgctgtggaggcggctgaatgattctgggaagaactggaggcatgtgtacaaggccctgaccctgctggactacctgctgaagacaggcagcgagcgggtggcccaccagtgccgggagaacctgtacaccatccagaccctgaaggacttccagtacatcgacagagatggcaaggaccagggcgtgaatgtgcgggagaaggtgaagcaggtgatggccctgctgaaggatgaggagcggctgcggcaggagaggacccacgccctgaagaccaaggagaggatggccctggagggcattggaattggcagcggccagctgggcttcagccgccgctacggggaggactacagccgcagccggggcagccccagcagctacaacagcagcagcagcagcccccgctacaccagtgacctggagcaggcccggccccagaccagcggggaggaggagctgcagctgcagctggccctggccatgagccgggaggaggccgagaagcctgtgcccccagccagccacagagatgaggacctgcagctgcagctggccctgcggctgagccggcaggagcacgagaaggaggtgcgctcctggcagggagatggcagccccatggccaacggggccggggctgtggtgcaccaccagagggaccgggagcctgagcgggaggagaggaaggaggaggagaagctgaagaccagccagagcagcatcctggacctggccgacatctttgtgcctgccctggccccacccagcacccactgcagcgctgacccctgggacatccctggcttccggcccaacacagaggccagcggcagctcctggggccccagcgctgacccctggagccccatccccagcggcaccgtgctgagccgcagccagccctgggacctgacccccatgctgagcagcagcgagccctggggccgcacccctgtgctgcctgctggcccccccaccacagacccctgggccctgaacagcccccaccacaagctgcccagcactggagctgacccctggggcgccagcctggagaccagtgacacccctgggggcgccagcacctttgacccctttgccaagcccccagagagcacagagaccaaggagggcctggagcaggccctgcccagcggcaagcccagcagccctgtggagctggacctgtttggagaccccagccccagcagcaagcagaatggcaccaaggagccagatgccctggacctgggcatcctgggggaggccctgacccagcccagcaaggaggcccgggcctgcaggaccccagagagcttcctgggccccagcgccagcagcctggtgaacctggacagcctggtgaaggccccccaggtggccaagaccaggaaccccttcctgaccggcctgagcgcccccagccccaccaacccctttggagctggggagcccggccggcccaccctgaaccagatgaggacaggcagccctgccctgggcctggccggcggccctgtgggcgcccccctgggctccatgacctacagcgccagcctgcccctgcccctgagctctgtgcctgctggcctgaccctgcctgcctctgtgtctgtgttcccccaggccggggcctttgccccccagcccctgctgcccacccccagcagcgctggccccaggcctcctccaccccagacaggcaccaaccccttcctgtag

SEQ ID NO: 151350 - DNA, 957 bp, synthetic construct
  misc_feature 1..957: note = Description of Artificial Sequence: Synthetic coding sequence
  source 1..957: mol_type = other DNA
atgaccaccagcgccctgcggcggcaggtgaagaacatcgtgcacaactacagcgaggccgagatcaaggtgcgggaggccaccagcaatgacccctggggcccccccagcagcctgatgtctgaaattgctgacctgaccttcaacacagtggccttcacagaggtgatgggcatgctgtggaggcggctgaatgattctgggaagaactggaggcatgtgtacaaggccctgaccctgctggactacctgctgaagacaggcagcgagcgggtggcccaccagtgccgggagaacctgtacaccatccagaccctgaaggacttccagtacatcgacagagatggcaaggaccagggcgtgaatgtgcgggagaaggtgaagcaggtgatggccctgctgaaggatgaggagcggctgcggcaggagaggacccacgccctgaagaccaaggagaggatggccctggagggcattggaattggcagcggccagctgggcttcagccgccgctacggggaggactacagccgcagccggggcagccccagcagctacaacagcagcagcagcagcccccgctacaccagtgacctggagcaggcccggccccagaccagcggggaggaggagctgcagctgcagctggccctggccatgagccgggaggaggccgagaagcctgtgcccccagccagccacagagatgaggacctgcagctgcagctggccctgcggctgagccggcaggagcacgagaaggaggtgcgctcctggcagggagatggcagccccatggccaacggggccggggctgtggtgcaccaccagagggaccgggagcctgagcgggaggagaggaaggaggaggagaagctgaagaccagccaggccccacccaccagcgagccccggctgcccctgcccagcacagtgctgcaccctggcctgggctag

SEQ ID NO: 151351 - DNA, 1725 bp, synthetic construct
  misc_feature 1..1725: note = Description of Artificial Sequence: Synthetic coding sequence
  source 1..1725: mol_type = other DNA
atggccctggagaccctgccccggctgtgcaggcctgctgctgcccaggtgggcggcagcccccagaggctgctgggcctgggcctgggcccccgggagcccgccctggagccccacgtggagcccaaggatgctgctgccctgctgacccggcagcccatcctgcaggactgtgacctggccaccgtggccctgagccccccacctcctgctggggcccgggccacccacctgcaggtgagcagccatgatgacctgcggaccccagcccctggagaggagcaccgggcccagctgctgcggggcaggaaccaggtggccttcacagaggtgatgggcatgctgtggaggcggctgaatgacagcggcaagaactggaggcatgtgtacaaggccctgaccctgctggactacctgctgaagacaggcagcgagcgggtggcccaccagtgcagagaaaatctctacaccatccagaccctgaaggacttccagtacatcgacagagatggcaaggaccagggcgtgaatgtgcgggagaaggtgaagcaggtgatggccctgctgaaggatgaggagcggctgcggcaggagaggacccacgccctgaagaccaaggagaggatggccctggagggcatcggcatcggcagcggccagctgggcttcagcagaagatatggagaggactacagccgcagccggggcagccccagcagctacaacagcagcagcagcagcccccgctacaccagtgacctggagcaggcccggccccagaccagcggggaggaggagctgcagctgcagctggccctggccatgagccgggaggaggccgagaaggaggtgcgctcctggcagggagatggcagccccatggccaacggggccggggctgtggtgcaccaccagagggaccgggagcctgagcgggaggagaggaaggaggaggagaagctgaagaccagccagagcagcatcctggacctggccgacatctttgtgcctgccctggccccacccagcacccactgcagcgctgacccctgggacatccctggcttccggcccaacacagaggccagcggcagctcctggggccccagcgctgacccctggagccccatccccagcggcaccgtgctgagccgcagccagccctgggacctgacccccatgctgagcagcagcgagccctggggccgcacccctgtgctgcctgctggcccccccaccacagacccctgggccctgaacagcccccaccacaagctgcccagcactggagctgacccctggggcgccagcctggagaccagtgacacccctgggggcgccagcacctttgacccctttgccaagcccccagagagcacagagaccaaggagggcctggagcaggccctgcccagcggcaagcccagcagccctgtggagctggacctgtttggagaccccagccccagcagcaagcagaatggcaccaaggagccagatgccctggacctgggcatcctgggggaggccctgacccagcccagcaaggaggcccgggcctgcaggaccccagagagcttcctgggccccagcgccagcagcctggtgaacctggacagcctggtgaaggccccccaggtggccaagaccaggaaccccttcctgaccggcctgagcgccccaccccggctgcggacccggggctgggccggccgccgctgctag

SEQ ID NO: 151352 - DNA, 507 bp, synthetic construct
  misc_feature 1..507: note = Description of Artificial Sequence: Synthetic coding sequence
  source 1..507: mol_type = other DNA
atgaccaccagcgccctgcggcggcaggtgaagaacatcgtgcacaactacagcgaggccgagatcaaggtgcgggaggccaccagcaatgacccctggggcccccccagcagcctgatgtctgaaattgctgacctgaccttcaacacagtggccttcacagaggtgatgggcatgctgtggaggcggctgaatgattctgggaagaactggaggcatgtgtacaaggccctgaccctgctggactacctgctgaagacaggcagcgagcgggtggcccaccagtgccgggagaacctgtacaccatccagaccctgaaggacttccagtacatcgacagagatggcaaggaccagggcgtgaatgtgcgggagaaggtgaagcaggtgatggccctgctgaaggatgaggagcggctgcggcaggagaggacccacgccctgaagaccaaggagaggatggccctggagggcattggaattggcagcggccagctgggcttctag

SEQ ID NO: 151353 - DNA, 36 bp, synthetic construct
  misc_feature 1..36: note = Description of Artificial Sequence: Synthetic coding sequence
  source 1..36: mol_type = other DNA
atgaccaccagcgccctgcggcggcaggtgaagtag

SEQ ID NO: 151354 - DNA, 411 bp, synthetic construct
  misc_feature 1..411: note = Description of Artificial Sequence: Synthetic coding sequence
  source 1..411: mol_type = other DNA
atgaccaccagcgccctgcggcggcaggtgaagaacatcgtgcacaactacagcgaggccgagatcaaggtgcgggaggccaccagcaatgacccctggggcccccccagcagcctgatgtctgaaattgctgacctgaccttcaacacagtggccttcacagaggtgatgggcatgctgtggaggcggctgaatgattctgggaagaactggaggcatgtgtacaaggccctgaccctgctggactacctgctgaagacaggcagcgagcgggtggcccaccagtgccgggagaacctgtacaccatccagaccctgaaggacttccagtacatcgacagagatggcaaggaccagggcgtgaatgtgcgggagaaggtgaagcaggtgatggccctgctgaaggactag

SEQ ID NO: 151355 - DNA, 156 bp, synthetic construct
  misc_feature 1..156: note = Description of Artificial Sequence: Synthetic coding sequence
  source 1..156: mol_type = other DNA
atgaccaccagcgccctgcggcggcaggtgaagaacatcgtgcacaactacagcgaggccgagatcaaggtgcgggaggccaccagcaatgacccctggggcccccccagcagcctgatgtctgaaattgctgacctgaccttcaacacagtgtag

SEQ ID NO: 151356 - DNA, 327 bp, synthetic construct
  misc_feature 1..327: note = Description of Artificial Sequence: Synthetic coding sequence
  source 1..327: mol_type = other DNA
atgaccaccagcgccctgcggcggcaggtgaagaacatcgtgcacaactacagcgaggccgagatcaaggtgcgggaggccaccagcaatgacccctggggcccccccagcagcctgatgtctgaaattgctgacctgaccttcaacacagtggccttcacagaggtgatgggcatgctgtggaggcggctgaatgattctgggaagaactggaggcatgtgtacaaggccctgaccctgctggactacctgctgaagacaggcagcgagcgggtggcccaccagtgccgggagaacctgtacaccatccagaccctgaaggactag

SEQ ID NO: 151357 - DNA, 1983 bp, synthetic construct
  misc_feature 1..1983: note = Description of Artificial Sequence: Synthetic coding sequence
  source 1..1983: mol_type = other DNA
atggccctggagaccctgccccggctgtgcaggcctgctgctgcccaggtgggcggcagcccccagaggctgctgggcctgggcctgggcccccgggagcccgccctggagccccacgtggagcccaaggatgctgctgccctgctgacccggcagcccatcctgcaggactgtgacctggccaccgtggccctgagccccccacctcctgctggggcccgggccacccacctgcaggtgagcagccatgatgacctgcggaccccagcccctggagaggagcaccgggcccagctgctgcggggcaggaaccaggtggccttcacagaggtgatgggcatgctgtggaggcggctgaatgacagcggcaagaactggaggcatgtgtacaaggccctgaccctgctggactacctgctgaagacaggcagcgagcgggtggcccaccagtgcagagaaaatctctacaccatccagaccctgaaggacttccagtacatcgacagagatggcaaggaccagggcgtgaatgtgcgggagaaggtgaagcaggtgatggccctgctgaaggatgaggagcggctgcggcaggagaggacccacgccctgaagaccaaggagaggatggccctggagggcatcggcatcggcagcggccagctgggcttcagcagaagatatggagaggactacagccgcagccggggcagccccagcagctacaacagcagcagcagcagcccccgctacaccagtgacctggagcaggcccggccccagaccagcggggaggaggagctgcagctgcagctggccctggccatgagccgggaggaggccgagaaggaggtgcgctcctggcagggagatggcagccccatggccaacggggccggggctgtggtgcaccaccagagggaccgggagcctgagcgggaggagaggaaggaggaggagaagctgaagaccagccagagcagcatcctggacctggccgacatctttgtgcctgccctggccccacccagcacccactgcagcgctgacccctgggacatccctggcttccggcccaacacagaggccagcggcagctcctggggccccagcgctgacccctggagccccatccccagcggcaccgtgctgagccgcagccagccctgggacctgacccccatgctgagcagcagcgagccctggggccgcacccctgtgctgcctgctggcccccccaccacagacccctgggccctgaacagcccccaccacaagctgcccagcactggagctgacccctggggcgccagcctggagaccagtgacacccctgggggcgccagcacctttgacccctttgccaagcccccagagagcacagagaccaaggagggcctggagcaggccctgcccagcggcaagcccagcagccctgtggagctggacctgtttggagaccccagccccagcagcaagcagaatggcaccaaggagccagatgccctggacctgggcatcctgggggaggccctgacccagcccagcaaggaggcccgggcctgcaggaccccagagagcttcctgggccccagcgccagcagcctggtgaacctggacagcctggtgaaggccccccaggtggccaagaccaggaaccccttcctgaccggcctgagcgcccccagccccaccaacccctttggagctggggagcccggccggcccaccctgaaccagatgaggacaggcagccctgccctgggcctggccggcggccctgtgggcgcccccctgggctccatgacctacagcgccagcctgcccctgcccctgagctctgtgcctgctggcctgaccctgcctgcctctgtgtctgtgttcccccaggccggggcctttgccccccagcccctgctgcccacccccagcagcgctggccccaggcctcctccaccccagacaggcaccaaccccttcctgtag

SEQ ID NO: 151358 - DNA, 753 bp, synthetic construct
  misc_feature 1..753: note = Description of Artificial Sequence: Synthetic coding sequence
  source 1..753: mol_type = other DNA
atgggcatgctgtggaggcggctgaatgattctgggaagaactggaggcatgtgtacaaggccctgaccctgctggactacctgctgaagacaggcagcgagcgggtggcccaccagtgccgggagaacctgtacaccatccagaccctgaaggacttccagtacatcgacagagatggcaaggaccagggcgtgaatgtgcgggagaaggtgaagcaggtgatggccctgctgaaggatgaggagcggctgcggcaggagaggacccacgccctgaagaccaaggagaggatggccctggagggcattggaattggcagcggccagctgggcttcagccgccgctacggggaggactacagccgcagccggggcagccccagcagctacaacagcagcagcagcagcccccgctacaccagtgacctggagcaggcccggccccagaccagcggggaggaggagctgcagctgcagctggccctggccatgagccgggaggaggccgagaaggaggtgcgctcctggcagggagatggcagccccatggccaatggagctggagctgtggtgcaccaccagagggaccgggagcctgagcgggaggagaggaaggaggaggagaagctgaagaccagccaggtgctgggccgcacccagaggcctgtggaccccccaggcggcctgctgcagaccccaggcctgcggagcccccaggagcccagctgcccagaggccagccctggcatctag

SEQ ID NO: 151359 - DNA, 429 bp, synthetic construct
  misc_feature 1..429: note = Description of Artificial Sequence: Synthetic coding sequence
  source 1..429: mol_type = other DNA
atgagcctgctgcctgtgccctacacagaagctgccagcctgagcacaggcagcacagtgaccatcaagggccggcccctggcctgcttcctgaatgagccctacctgcaggtggacttccacacagagatgaaggaggagagtgacatcgtgttccacttccaggtgtgcttcggccggcgggtggtgatgaacagccgggagtatggagcctggaagcagcaggtggagagcaagaacatgcccttccaggacggccaggagtttgagctgagcatctctgtgctgcctgacaagtaccaggtgatggtgaatggccagagcagctacacctttgaccaccgcatcaagccagaggccgtgaagatggtgcaggtgtggagggacatcagcctgaccaagttcaacgtgtcctacctgaagaggtag

SEQ ID NO: 151360 - DNA, 828 bp, synthetic construct
  misc_feature 1..828: note = Description of Artificial Sequence: Synthetic coding sequence
  source 1..828: mol_type = other DNA
atgaacatgacccaggcccgggtgctggtggccgctgtggtgggcctggtggccgtgctgctgtatgccagcatccacaagattgaggagggccacctggccgtgtactacagaggaggagccctgctgaccagccccagcggccctggctaccacatcatgctgcccttcatcaccaccttccgctctgtgcagaccaccctgcagacagatgaggtgaagaatgtgccctgtggcaccagcggaggagtgatgatctacatcgacagaattgaggtggtgaacatgctggccccctatgctgtgtttgatattgtgaggaactacacagctgactatgacaagaccctcatcttcaacaagatccaccacgagctgaaccagttctgcagcgcccacaccctgcaggaggtgtacatcgagctgtttgaccagattgatgagaacctgaagcaggccctgcagaaggacctgaacctgatggcccctggcctgaccatccaggccgtgcgggtgaccaagcccaagatccctgaggccatcagaagaaactttgagctgatggaggccgagaagaccaagctgctgattgctgcccagaagcagaaggtggtggagaaggaggccgagacagagaggaagaaggccgtcatcgaggccgagaagatcgcccaggtggccaagatccgcttccagcagaaggtgatggagaaggagacagagaagaggatcagcgagattgaagatgctgccttcctggcccgggagaaggccaaggcagatgctgagtactatgctgcccacaagtatgccaccagcaacaagtag

SEQ ID NO: 151361 - DNA, 699 bp, synthetic construct
  misc_feature 1..699: note = Description of Artificial Sequence: Synthetic coding sequence
  source 1..699: mol_type = other DNA
atgatctacatcgacagaattgaggtggtgaacatgctggccccctatgctgtgtttgatattgtgaggaactacacagctgactatgacaagaccctcatcttcaacaagatccaccacgagctgaaccagttctgcagcgcccacaccctgcaggaggtgtacatcgagctgtttgaccagattgatgagaacctgaagcaggccctgcagaaggacctgaacctgatggcccctggcctgaccatccaggccgtgcgggtgaccaagcccaagatccctgaggccatcagaagaaactttgagctgatggaggccgagaagaccaagctgctgattgctgcccagaagcagaaggtggtggagaaggaggccgagacagagaggaagaaggccgtcatcgaggccgagaagatcgcccaggtggccaagatccgcttccagcagaaggtgatggagaaggagacagagaagaggatcagcgagattgaagatgctgccttcctggcccgggagaaggccaaggcagatgctgagtactatgctgcccacaagtatgccaccagcaacaagcacaagctgaccccagagtacctggagctgaagaagtaccaggccatcgccagcaacagcaagatctacttcggcagcaacatccccaacatgttcagcatcagccgctgtggcccccggggctag

SEQ ID NO: 151362 - DNA, 1047 bp, synthetic construct
  misc_feature 1..1047: note = Description of Artificial Sequence: Synthetic coding sequence
  source 1..1047: mol_type = other DNA
atgaacatgacccaggcccgggtgctggtggccgctgtggtgggcctggtggccgtgctgctgtatgccagcatccacaagattgaggagggccacctggccgtgtactacagaggaggagccctgctgaccagccccagcggccctggctaccacatcatgctgcccttcatcaccaccttccgctctgtgcagaccaccctgcagacagatgaggtgaagaatgtgccctgtggcaccagcggaggagtgatgatctacatcgacagaattgaggtggtgaacatgctggccccctatgctgtgtttgatattgtgaggaactacacagctgactatgacaagaccctcatcttcaacaagatccaccacgagctgaaccagttctgcagcgcccacaccctgcaggaggtgtacatcgagctgtttgaccagattgatgagaacctgaagcaggccctgcagaaggacctgaacctgatggcccctggcctgaccatccaggccgtgcgggtgaccaagcccaagatccctgaggccatcagaagaaactttgagctgatggaggccgagaagaccaagctgctgattgctgcccagaagcagaaggtggtggagaaggaggccgagacagagaggaagaaggccgtcatcgaggccgagaagatcgcccaggtggccaagatccgcttccagcagaaggtgatggagaaggagacagagaagaggatcagcgagattgaagatgctgccttcctggcccgggagaaggccaaggcagatgctgagtactatgctgcccacaagtatgccaccagcaacaagcacaagctgaccccagagtacctggagctgaagaagtaccaggccatcgccagcaacagcaagatctacttcggcagcaacatccccaacatgtttgtggacagcagctgtgccctgaagtacagcgacatcagaacaggccgggagagcagcctgcccagcaaggaggccctggagcccagcggggagaatgtcatccagaacaaggagagcactggatag

SEQ ID NO: 151363 - DNA, 1047 bp, synthetic construct; identical to SEQ ID NO: 151362
  misc_feature 1..1047: note = Description of Artificial Sequence: Synthetic coding sequence
  source 1..1047: mol_type = other DNA

SEQ ID NO: 151364 - DNA, 1020 bp, synthetic construct
  misc_feature 1..1020: note = Description of Artificial Sequence: Synthetic coding sequence
  source 1..1020: mol_type = other DNA
atggcccagctgggcgctgtggtggccgtggccagcagcttcttctgtgccagcctcttctctgctgtgcacaagattgaggagggccacatcggcgtgtactacagaggaggagccctgctgaccagcaccagcggccctggcttccacctgatgctgcccttcatcaccagctacaagtctgtgcagaccaccctgcagacagatgaggtgaagaatgtgccctgtggcaccagcggaggagtgatgatctactttgacagaattgaggtggtgaacttcctggtgcccaatgctgtgtatgacatcgtgaagaactacacagctgactatgacaaggccctgatcttcaacaagatccaccacgagctgaaccagttctgcagcgtgcacaccctgcaggaggtgtacatcgagctgtttgaccagattgatgagaacctgaagctggccctgcagcaggacctgacctccatggcccctggcctggtgatccaggccgtgcgggtgaccaagcccaacatccctgaggccatcagaagaaattatgagctgatggagagcgagaagaccaagctgctgattgctgcccagaagcagaaggtggtggagaaggaggccgagacagagaggaagaaggccctgattgaggccgagaaggtggcccaggtggccgagatcacctacggccagaaggtgatggagaaggagacagagaagaagatcagcgagattgaagatgctgccttcctggcccgggagaaggccaaggcagatgctgagtgctacacagccatgaagattgctgaggccaacaagctgaagctgaccccagagtacctgcagctgatgaagtacaaggccatcgccagcaacagcaagatctactttgggaaggacatccccaacatgttcatggacagcgctggctctgtgtccaagcagtttgagggcctggccgacaagctgagctttggcctggaggatgagcccctggagacagccaccaaggagaactag

SEQ ID NO: 151365 - DNA, 459 bp, synthetic construct
  misc_feature 1..459: note = Description of Artificial Sequence: Synthetic coding sequence
  source 1..459: mol_type = other DNA
atggcccagctgggcgctgtggtggccgtggccagcagcttcttctgtgccagcctcttctctgctgtgcacaagattgaggagggccacatcggcgtgtactacagaggaggagccctgctgaccagcaccagcggccctggcttccacctgatgctgcccttcatcaccagctacaagtctgtgcagaccaccctgcagacagatgaggtgaagaatgtgccctgtggcaccagcggaggagtgatgatctactttgacagaattgaggtggtgaacttcctggtgcccaatgctgtgtatgacatcgtgaagaactacacagctgactatgacaaggccctgatcttcaacaagatccaccacgagctgaaccagttctgcagcgtgcacaccctgcaggaggtgtacatcgagctgtttggcctggagaatgacttcagccaggagagcagctag

SEQ ID NO: 151366 - DNA, 1020 bp, synthetic construct; identical to SEQ ID NO: 151364
  misc_feature 1..1020: note = Description of Artificial Sequence: Synthetic coding sequence
  source 1..1020: mol_type = other DNA

SEQ ID NO: 151367 - DNA, 621 bp, synthetic construct
  misc_feature 1..621: note = Description of Artificial Sequence: Synthetic coding sequence
  source 1..621: mol_type = other DNA
atggcccagctgggcgctgtggtggccgtggccagcagcttcttctgtgccagcctcttctctgctgtgcacaagattgaggagggccacatcggcgtgtactacagaggaggagccctgctgaccagcaccagcggccctggcttccacctgatgctgcccttcatcaccagctacaagtctgtgcagaccaccctgcagacagatgaggtgaagaatgtgccctgtggcaccagcggaggagtgatgatctactttgacagaattgaggtggtgaacttcctggtgcccaatgctgtgtatgacatcgtgaagaactacacagctgactatgacaaggccctgatcttcaacaagatccaccacgagctgaaccagttctgcagcgtgcacaccctgcaggaggtgtacatcgagctgtttgggaagaaggtgtccccagagcacgctgtgctgaagcagggctcctggaacccagccagcctgcactgcctgaagccaggctgcctgcagggcgtgatggtgacctacggccaggagatgctgaagaacctggtgctgcgctcctggagccagaggagctcctggaggatgctgattgccatgcagcaggacccctag

SEQ ID NO: 151368 - DNA, 459 bp, synthetic construct; identical to SEQ ID NO: 151365
  misc_feature 1..459: note = Description of Artificial Sequence: Synthetic coding sequence
  source 1..459: mol_type = other DNA

SEQ ID NO: 151369 - DNA, 4239 bp, synthetic construct
  misc_feature 1..4239: note = Description of Artificial Sequence: Synthetic coding sequence
  source 1..4239: mol_type = other DNA
atgaccaccaagaggagcctgtttgtgcggctggtgccctgccgctgcctgcggggggaggaggagaccgtgaccaccctggactacagccactgcagcctggagcaggtgcccaaggagatcttcacctttgagaagaccctggaggagctgtacctggatgccaaccagatcgaggagctgcccaagcagctgttcaactgccagagcctgcacaagctgagcctgcctgacaatgacctgaccaccctgcctgccagcatcgccaacctgatcaacctgcgggagctggatgtgtccaagaatggcatccaggagttccctgagaacatcaagaactgcaaggtgctgaccatcgtggaggcctctgtgaaccccatcagcaagctgcctgatggcttcagccagctgctgaacctgacccagctgtacctgaatgatgccttcctggagttcctgcctgccaactttggccgcctgaccaagctgcagatcctggagctgcgggagaaccagctgaagatgctgcccaagaccatgaaccggctgacccagctggagcggctggacctgggcagcaatgagttcacagaggtgcctgaggtgctggagcagctgagcggcctgaaggagttctggatggatgccaaccggctgaccttcatccctggcttcatcggcagcctgaagcagctgacctacctggatgtgtccaagaacaacatcgagatggtggaggagggcatcagcacctgtgagaacctgcaggacctgctgctgagcagcaacagcctgcagcagctgcctgagaccatcggcagcctgaagaacatcaccaccctgaagattgatgagaaccagctgatgtacctgcctgacagcattggaggcctcatctctgtggaggagctggactgcagcttcaatgaggtggaggccctgcccagcagcatcggccagctgaccaacctgcggacctttgctgctgaccacaactacctgcagcagctgcccccagaaattggctcctggaagaacatcaccgtgctcttcctgcacagcaacaagctggagaccctgcctgaggagatgggagacatgcagaagctgaaggtgatcaacctgagtgacaaccggctgaagaacctgcccttctccttcaccaagctgcagcagctgacagccatgtggctgagtgacaaccagagcaagcccctcatccccctgcagaaggagacagattctgagacccagaagatggtgctgaccaactacatgttcccccagcagcccaggacagaagatgtgatgttcatcagtgacaatgaaagcttcaaccccagcctgtgggaggagcagaggaagcagagggcccaggtggcctttgaatgtgatgaggacaaggatgagcgggaggccccaccccgggagggcaacctgaagcgctaccccaccccctacccagatgagctgaagaacatggtgaagacagtgcagaccatcgtgcaccggctgaaggatgaggagaccaatgaagacagcggccgggacctgaagccccatgaggaccagcaggacatcaacaaggatgtgggcgtgaagaccagcgagagcaccaccaccgtgaagagcaaggtggatgagcgggagaagtacatgattggcaacagcgtgcagaagatcagcgagcctgaggccgagatcagccctggcagcctgcctgtgacagccaacatgaaggccagcgagaacctgaagcacatcgtgaaccatgatgatgtgtttgaggagagcgaggagctgagcagtgatgaggagatgaagatggccgagatgaggcctcccctgattgagaccagcatcaaccagcccaaggtggtggccctgagcaacaacaagaaggatgacaccaaggagacagacagcctgagtgatgaggtgacccacaacagcaaccagaacaacagcaactgcagcagccccagcaggatgtctgattctgtgtccctgaacacagacagcagccaggacaccagcctgtgcagccctgtgaagcagacccacatcgacatcaacagcaagatccggcaggaggatgagaacttcaacagcctgctgcagaatggagacatcctgaacagcagcacagaggagaagttcaaggcccatgacaagaaggacttcaacctgcctgaatatgacctgaatgtggaggagcggctggtgctgattgagaagtctgtggacagcacagccacagcagatgacacccacaagctggaccacatcaacatgaacctgaacaagctgatcaccaatgacaccttccagcctgagatcatggagaggagcaagacccaggacatcgtgctgggcaccagcttcctgagcatcaacagcaaggaggagacagagcacctggagaatggaaacaagtaccccaacctggagagcgtgaacaaggtgaatggccacagcgaggagaccagccagagccccaacagaacagagccccatgacagcgactgcagcgtggacctgggcatcagcaagagcacagaggacctgagcccccagaagagcggccctgtgggctctgtggtgaagagccacagcatcaccaacatggagatcggcggcctgaagatctatgacatcctgagtgacaatggcccccagcagcccagcaccaccgtgaagatcaccagcgctgtggatggcaagaacatcgtgcgcagcaagagcgccaccctgctgtatgaccagcccctgcaggtgttcaccggcagcagcagcagcagtgacctgatcagcggcaccaaggccatcttcaagtttgacagcaaccacaaccctgaggagcccaacatcatccggggccccaccagcggcccccagagcgccccccagatctacggccccccccagtacaacatccagtacagcagcagcgctgctgtgaaggacaccctgtggcacagcaagcagaacccccagattgaccacgccagcttccccccccagctgctgcccaggtctgagagcacagagaaccagagctatgccaagcacagcgccaacatgaacttcagcaaccacaacaacgtgcgggccaacacagcctaccacctgcaccagaggctgggccctgcccggcatggagagatgtgggccatcagccccaatgacaggctcatcccagctgtgaccaggagcaccatccagaggcagagctctgtgagcagcacagcctctgtgaacctgggggaccccggcagcacccggcgggcccagatccctgagggggactacctgagctaccgggagttccacagcgctggccgcaccccacccatgatgcctggcagccagaggcccctgagcgcccggacctacagcattgatggccccaatgccagccggccccagagcgcccggcccagcatcaatgagatccctgagaggaccatgtctgtgtctgacttcaactacagcaggaccagccccagcaagaggcccaatgcccgggtgggcagcgagcacagcctgctggaccccccaggcaagagcaaggtgccccgggactggagggagcaggtgctgcggcacatcgaggccaagaagctggagaagaagcacccccagaccagcagcagcggggacccctgccaggacggcatcttcatcagcggccagcagaactacagcagcgccaccctgagccacaaggatgtgcccccagacagcctgatgaagatgcccctgagcaatggccagatgggccagcccctgcggccccaggccaactacagccagatccaccaccccccccaggcctctgtggcccggcaccccagccgggagcagctgattgactacctgatgctgaaggtggcccaccagcccccctacacccagccccactgcagcccccggcagggccacgagctggccaagcaggagatccgggtgcgggtggagaaggaccctgagctgggcttcagcatctctggaggagtgggcggccggggcaaccccttccggccagatgatgatggcatctttgtgaccagggtgcagcctgagggccctgccagcaagctgctgcagcccggggacaagatcatccaggccaacggctacagcttcatcaacatcgagcacggccaggccgtgtccctgctgaagaccttccagaacacagtggagctgatcatcgtgcgggaggtgagcagctag

SEQ ID NO: 151370 - DNA, 3909 bp, synthetic construct
  misc_feature 1..3909: note = Description of Artificial Sequence: Synthetic coding sequence
  source 1..3909: mol_type = other DNA
atgaccaccaagaggagcctgtttgtgcggctggtgccctgccgctgcctgcggggggaggaggagaccgtgaccaccctggactacagccactgcagcctggagcaggtgcccaaggagatcttcacctttgagaagaccctggaggagctgtacctggatgccaaccagatcgaggagctgcccaagcagctgttcaactgccagagcctgcacaagctgagcctgcctgacaatgacctgaccaccctgcctgccagcatcgccaacctgatcaacctgcgggagctggatgtgtccaagaatggcatccaggagttccctgagaacatcaagaactgcaaggtgctgaccatcgtggaggcctctgtgaaccccatcagcaagctgcctgatggcttcagccagctgctgaacctgacccagctgtacctgaatgatgccttcctggagttcctgcctgccaactttggccgcctgaccaagctgcagatcctggagctgcgggagaaccagctgaagatgctgcccaagaccatgaaccggctgacccagctggagcggctggacctgggcagcaatgagttcacagaggtgcctgaggtgctggagcagctgagcggcctgaaggagttctggatggatgccaaccggctgaccttcatccctggcttcatcggcagcctgaagcagctgacctacctggatgtgtccaagaacaacatcgagatggtggaggagggcatcagcacctgtgagaacctgcaggacctgctgctgagcagcaacagcctgcagcagctgcctgagaccatcggcagcctgaagaacatcaccaccctgaagattgatgagaaccagctgatgtacctgcctgacagcattggaggcctcatctctgtggaggagctggactgcagcttcaatgaggtggaggccctgcccagcagcatcggccagctgaccaacctgcggacctttgctgctgaccacaactacctgcagcagctgcccccagaaattggctcctggaagaacatcaccgtgctcttcctgcacagcaacaagctggagaccctgcctgaggagatgggagacatgcagaagctgaaggtgatcaacctgagtgacaaccggctgaagaacctgcccttctccttcaccaagctgcagcagctgacagccatgtggctgagtgacaaccagagcaagcccctcatccccctgcagaaggagacagattctgagacccagaagatggtgctgaccaactacatgttcccccagcagcccaggacagaagatgtgatgttcatcagtgacaatgaaagcttcaaccccagcctgtgggaggagcagaggaagcagagggcccaggtggcctttgaatgtgatgaggacaaggatgagcgggaggccccaccccgggagggcaacctgaagcgctaccccaccccctacccagatgagctgaagaacatggtgaagacagtgcagaccatcgtgcaccggctgaaggatgaggagaccaatgaagacagcggccgggacctgaagccccatgaggaccagcaggacatcaacaaggatgtgggcgtgaagaccagcgagagcaccaccaccgtgaagagcaaggtggatgagcgggagaagtacatgattggcaacagcgtgcagaagatcagcgagcctgaggccgagatcagccctggcagcctgcctgtgacagccaacatgaaggccagcgagaacctgaagcacatcgtgaaccatgatgatgtgtttgaggagagcgaggagctgagcagtgatgaggagatgaagatggccgagatgaggcctcccctgattgagaccagcatcaaccagcccaaggtggtggccctgagcaacaacaagaaggatgacaccaaggagacagacagcctgagtgatgaggtgacccacaacagcaaccagaacaacagcaactgcagcagccccagcaggatgtctgattctgtgtccctgaacacagacagcagccaggacaccagcctgtgcagccctgtgaagcagacccacatcgacatcaacagcaagatccggcaggaggatgagaacttcaacagcctgctgcagaatggagacatcctgaacagcagcacagaggagaagttcaaggcccatgacaagaaggacttcaacctgcctgaatatgacctgaatgtggaggagcggctggtgctgattgagaagtctgtggacagcacagccacagcagatgacacccacaagctggaccacatcaacatgaacctgaacaagctgatcaccaatgacaccttccagcctgagatcatggagaggagcaagacccaggacatcgtgctgggcaccagcttcctgagcatcaacagcaaggaggagacagagcacctggagaatggaaacaagtaccccaacctggagagcgtgaacaaggtgaatggccacagcgaggagaccagccagagccccaacagaacagagccccatgacagcgactgcagcgtggacctgggcatcagcaagagcacagaggacctgagcccccagaagagcggccctgtgggctctgtggtgaagagccacagcatcaccaacatggagatcggcggcctgaagatctatgacatcctgagtgacaatggcccccagcagcccagcaccaccgtgaagatcaccagcgctgtggatggcaagaacatcgtgcgcagcaagagcgccaccctgctgtatgaccagcccctgcaggtgttcaccggcagcagcagcagcagtgacctgatcagcggcaccaaggccatcttcaagtttgacagcaaccacaaccctgaggagcccaacatcatccggggccccaccagcggcccccagagcgccccccagatctacggccccccccagtacaacatccagtacagcagcagcgctgctgtgaaggacaccctgtggcacagcaagcagaacccccagattgaccacgccagcttccccccccagctgctgcccaggtctgagagcacagagaaccagagctatgccaagcacagcgccaacatgaacttcagcaaccacaacaacgtgcgggccaacacagcctaccacctgcaccagaggctgggccctgcccggcatggagagatgtgggccatcagccccaatgacaggctcatcccagctgtgaccaggagcaccatccagaggcagagctctgtgagcagcacagcctctgtgaacctgggggaccccggcagcacccggcgggcccagatccctgagggggactacctgagctaccgggagttccacagcgctggccgcaccccacccatgatgcctggcagccagaggcccctgagcgcccggacctacagcattgatggccccaatgccagccggccccagagcgcccggcccagcatcaatgagatccctgagaggaccatgtctgtgtctgacttcaactacagcaggaccagccccagcaagaggcccaatgcccgggtgggcagcgagcacagcctgctggaccccccaggcaagagcaaggtgccccgggactggagggagcaggtgctgcggcacatcgaggccaagaagctggagaagatccgggtgcgggtggagaaggaccctgagctgggcttcagcatctctggaggagtgggcggccggggcaaccccttccggccagatgatgatggcatctttgtgaccagggtgcagcctgagggccctgccagcaagctgctgcagcccggggacaagatcatccaggccaacggctacagcttcatcaacatcgagcacggccaggccgtgtccctgctgaagaccttccagaacacagtggagctgatcatcgtgcgggaggtgagcagctag

SEQ ID NO: 151371 - DNA, 4023 bp, synthetic construct
  misc_feature 1..4023: note = Description of Artificial Sequence: Synthetic coding sequence
  source 1..4023: mol_type = other DNA
atgaccaccaagaggagcctgtttgtgcggctggtgccctgccgctgcctgcggggggaggaggagaccgtgaccaccctggactacagccactgcagcctggagcaggtgcccaaggagatcttcacctttgagaagaccctggaggagctgtacctggatgccaaccagatcgaggagctgcccaagcagctgttcaactgccagagcctgcacaagctgagcctgcctgacaatgacctgaccaccctgcctgccagcatcgccaacctgatcaacctgcgggagctggatgtgtccaagaatggcatccaggagttccctgagaacatcaagaactgcaaggtgctgaccatcgtggaggcctctgtgaaccccatcagcaagctgcctgatggcttcagccagctgctgaacctgacccagctgtacctgaatgatgccttcctggagttcctgcctgccaactttggccgcctgaccaagctgcagatcctggagctgcgggagaaccagctgaagatgctgcccaagaccatgaaccggctgacccagctggagcggctggacctgggcagcaatgagttcacagaggtgcctgaggtgctggagcagctgagcggcctgaaggagttctggatggatgccaaccggctgaccttcatccctggcttcatcggcagcctgaagcagctgacctacctggatgtgtccaagaacaacatcgagatggtggaggagggcatcagcacctgtgagaacctgcaggacctgctgctgagcagcaacagcctgcagcagctgcctgagaccatcggcagcctgaagaacatcaccaccctgaagattgatgagaaccagctgatgtacctgcctgacagcattggaggcctcatctctgtggaggagctggactgcagcttcaatgaggtggaggccctgcccagcagcatcggccagctgaccaacctgcggacctttgctgctgaccacaactacctgcagcagctgcccccagaaattggctcctggaagaacatcaccgtgctcttcctgcacagcaacaagctggagaccctgcctgaggagatgggagacatgcagaagctgaaggtgatcaacctgagtgacaaccggctgaagaacctgcccttctccttcaccaagctgcagcagctgacagccatgtggctgagtgacaaccagagcaagcccctcatccccctgcagaaggagacagattctgagacccagaagatggtgctgaccaactacatgttcccccagcagcccaggacagaagatgtgatgttcatcagtgacaatgaaagcttcaaccccagcctgtgggaggagcagaggaagcagagggcccaggtggcctttgaatgtgatgaggacaaggatgagcgggaggccccaccccgggagggcaacctgaagcgctaccccaccccctacccagatgagctgaagaacatggtgaagacagtgcagaccatcgtgcaccggctgaaggatgaggagaccaatgaagacagcggccgggacctgaagccccatgaggaccagcaggacatcaacaaggatgtgggcgtgaagaccagcgagagcaccaccaccgtgaagagcaaggtggatgagcgggagaagtacatgattggcaacagcgtgcagaagatcagcgagcctgaggccgagatcagccctggcagcctgcctgtgacagccaacatgaaggccagcgagaacctgaagcacatcgtgaaccatgatgatgtgtttgaggagagcgaggagctgagcagtgatgaggagatgaagatggccgagatgaggcctcccctgattgagaccagcatcaaccagcccaaggtggtggccctgagcaacaacaagaaggatgacaccaaggagacagacagcctgagtgatgaggtgacccacaacagcaaccagaacaacagcaactgcagcagccccagcaggatgtctgattctgtgtccctgaacacagacagcagccaggacaccagcctgtgcagccctgtgaagcagacccacatcgacatcaacagcaagatccggcaggaggatgagaacttcaacagcctgctgcagaatggagacatcctgaacagcagcacagaggagaagttcaaggcccatgacaagaaggacttcaacctgcctgaatatgacctgaatgtggaggagcggctggtgctgattgagaagtctgtggacagcacagccacagcagatgacacccacaagctggaccacatcaacatgaacctgaacaagctgatcaccaatgacaccttccagcctgagatcatggagaggagcaagacccaggacatcgtgctgggcaccagcttcctgagcatcaacagcaaggaggagacagagcacctggagaatggaaacaagtaccccaacctggagagcgtgaacaaggtgaatggccacagcgaggagaccagccagagccccaacagaacagagccccatgacagcgactgcagcgtggacctgggcatcagcaagagcacagaggacctgagcccccagaagagcggccctgtgggctctgtggtgaagagccacagcatcaccaacatggagatcggcggcctgaagatctatgacatcctgagtgacaatggcccccagcagcccagcaccaccgtgaagatcaccagcgctgtggatggcaagaacatcgtgcgcagcaagagcgccaccctgctgtatgaccagcccctgcaggtgttcaccggcagcagcagcagcagtgacctgatcagcggcaccaaggccatcttcaagtttgacagcaaccacaaccctgaggagcccaacatcatccggggccccaccagcggcccccagagcgccccccagatctacggccccccccagtacaacatccagtacagcagcagcgctgctgtgaaggacaccctgtggcacagcaagcagaacccccagattgaccacgccagcttccccccccagctgctgcccaggtctgagagcacagagaaccagagctatgccaagcacagcgccaacatgaacttcagcaaccacaacaacgtgcgggccaacacagcctaccacctgcaccagaggctgggccctgcccggcatggagagatgtgggccatcagccccaatgacaggctcatcccagctgtgaccaggagcaccatccagaggcagagctctgtgagcagcacagcctctgtgaacctgggggaccccggcagcacccggcgggcccagatccctgagggggactacctgagctaccgggagttccacagcgctggccgcaccccacccatgatgcctggcagccagaggcccctgagcgcccggacctacagcattgatggccccaatgccagccggccccagagcgcccggcccagcatcaatgagatccctgagaggaccatgtctgtgtctgacttcaactacagcaggaccagccccagcaagaggcccaatgcccgggtgggcagcgagcacagcctgctggaccccccaggcaagagcaaggtgccccgggactggagggagcaggtgctgcggcacatcgaggccaagaagctggagaagatgcccctgagcaatggccagatgggccagcccctgcggccccaggccaactacagccagatccaccaccccccccaggcctctgtggcccggcaccccagccgggagcagctgattgactacctgatgctgaaggtggcccaccagcccccctacacccagccccactgcagcccccggcagggccacgagctggccaagcaggagggcatctttgtgaccagggtgcagcctgagggccctgccagcaagctgctgcagcccggggacaagatcatccaggccaacggctacagcttcatcaacatcgagcacggccaggccgtgtccctgctgaagaccttccagaacacagtggagctgatcatcgtgcgggaggtgagcagctag

SEQ ID NO: 151372 - DNA, 4041 bp, synthetic construct
  misc_feature 1..4041: note = Description of Artificial Sequence: Synthetic coding sequence
  source 1..4041: mol_type = other DNA
atgaccaccaagaggagcctgtttgtgcggctggtgccctgccgctgcctgcggggggaggaggagaccgtgaccaccctggactacagccactgcagcctggagcaggtgcccaaggagatcttcacctttgagaagaccctggaggagctgtacctggatgccaaccagatcgaggagctgcccaagcagctgttcaactgccagagcctgcacaagctgagcctgcctgacaatgacctgaccaccctgcctgccagcatcgccaacctgatcaacctgcgggagctggatgtgtccaagaatggcatccaggagttccctgagaacatcaagaactgcaaggtgctgaccatcgtggaggcctctgtgaaccccatcagcaagctgcctgatggcttcagccagctgctgaacctgacccagctgtacctgaatgatgccttcctggagttcctgcctgccaactttggccgcctgaccaagctgcagatcctggagctgcgggagaaccagctgaagatgctgcccaagaccatgaaccggctgacccagctggagcggctggacctgggcagcaatgagttcacagaggtgcctgaggtgctggagcagctgagcggcctgaaggagttctggatggatgccaaccggctgaccttcatccctggcttcatcggcagcctgaagcagctgacctacctggatgtgtccaagaacaacatcgagatggtggaggagggcatcagcacctgtgagaacctgcaggacctgctgctgagcagcaacagcctgcagcagctgcctgagaccatcggcagcctgaagaacatcaccaccctgaagattgatgagaaccagctgatgtacctgcctgacagcattggaggcctcatctctgtggaggagctggactgcagcttcaatgaggtggaggccctgcccagcagcatcggccagctgaccaacctgcggacctttgctgctgaccacaactacctgcagcagctgcccccagaaattggctcctggaagaacatcaccgtgctcttcctgcacagcaacaagctggagaccctgcctgaggagatgggagacatgcagaagctgaaggtgatcaacctgagtgacaaccggctgaagaacctgcccttctccttcaccaagctgcagcagctgacagccatgtggctgagtgacaaccagagcaagcccctcatccccctgcagaaggagacagattctgagacccagaagatggtgctgaccaactacatgttcccccagcagcccaggacagaagatgtgatgttcatcagtgacaatgaaagcttcaaccccagcctgtgggaggagcagaggaagcagagggcccaggtggcctttgaatgtgatgaggacaaggatgagcgggaggccccaccccgggagggcaacctgaagcgctaccccaccccctacccagatgagctgaagaacatggtgaagacagtgcagaccatcgtgcaccggctgaaggatgaggagaccaatgaagacagcggccgggacctgaagccccatgaggaccagcaggacatcaacaaggatgtgggcgtgaagaccagcgagagcaccaccaccgtgaagagcaaggtggatgagcgggagaagtacatgattggcaacagcgtgcagaagatcagcgagcctgaggccgagatcagccctggcagcctgcctgtgacagccaacatgaaggccagcgagaacctgaagcacatcgtgaaccatgatgatgtgtttgaggagagcgaggagctgagcagtgatgaggagatgaagatggccgagatgaggcctcccctgattgagaccagcatcaaccagcccaaggtggtggccctgagcaacaacaagaaggatgacaccaaggagacagacagcctgagtgatgaggtgacccacaacagcaaccagaacaacagcaactgcagcagccccagcaggatgtctgattctgtgtccctgaacacagacagcagccaggacaccagcctgtgcagccctgtgaagcagacccacatcgacatcaacagcaagatccggcaggaggatgagaacttcaacagcctgctgcagaatggagacatcctgaacagcagcacagaggagaagttcaaggcccatgacaagaaggacttcaacctgcctgaatatgacctgaatgtggaggagcggctggtgctgattgagaagtctgtggacagcacagccacagcagatgacacccacaagctggaccacatcaacatgaacctgaacaagctgatcaccaatgacaccttccagcctgagatcatggagaggagcaagacccaggacatcgtgctgggcaccagcttcctgagcatcaacagcaaggaggagacagagcacctggagaatggaaacaagtaccccaacctggagagcgtgaacaaggtgaatggccacagcgaggagaccagccagagccccaacagaacagagccccatgacagcgactgcagcgtggacctgggcatcagcaagagcacagaggacctgagcccccagaagagcggccctgtgggctctgtggtgaagagccacagcatcaccaacatggagatcggcggcctgaagatctatgacatcctgagtgacaatggcccccagcagcccagcaccaccgtgaagatcaccagcgctgtggatggcaagaacatcgtgcgcagcaagagcgccaccctgctgtatgaccagcccctgcaggtgttcaccggcagcagcagcagcagtgacctgatcagcggcaccaaggccatcttcaagtttgacagcaaccacaaccctgaggagcccaacatcatccggggccccaccagcggcccccagagcgccccccagatctacggccccccccagtacaacatccagtacagcagcagcgctgctgtgaaggacaccctgtggcacagcaagcagaacccccagattgaccacgccagcttccccccccagctgctgcccaggtctgagagcacagagaaccagagctatgccaagcacagcgccaacatgaacttcagcaaccacaacaacgtgcgggccaacacagcctaccacctgcaccagaggctgggccctgcccggcatggagagatgtgggccatcagccccaatgacaggctcatcccagctgtgaccaggagcaccatccagaggcagagctctgtgagcagcacagcctctgtgaacctgggggaccccggcagcacccggcgggcccagatccctgagggggactacctgagctaccgggagttccacagcgctggccgcaccccacccatgatgcctggcagccagaggcccctgagcgcccggacctacagcattgatggccccaatgccagccggccccagagcgcccggcccagcatcaatgagatccctgagaggaccatgtctgtgtctgacttcaactacagcaggaccagccccagcaagaggcccaatgcccgggtgggcagcgagcacagcctgctggaccccccaggcaagagcaaggtgccccgggactggagggagcaggtgctgcggcacatcgaggccaagaagctggagaagatgcccctgagcaatggccagatgggccagcccctgcggccccaggccaactacagccagatccaccaccccccccaggcctctgtggcccggcaccccagccgggagcagctgattgactacctgatgctgaaggtggcccaccagcccccctacacccagccccactgcagcccccggcagggccacgagctggccaagcaggagatccgggtgcgggtggagaaggaccctgagctgggcttcagcatcagcggcggcgtgggcggccggggcaaccccttccggccagatgatgatgccaacggctacagcttcatcaacatcgagcacggccaggccgtgtccctgctgaagaccttccagaacacagtggagctgatcatcgtgcgggaggtgagcagctag

SEQ ID NO: 151373 - DNA, 4083 bp, synthetic construct
  misc_feature 1..4083: note = Description of Artificial Sequence: Synthetic coding sequence
  source 1..4083: mol_type = other DNA
atgaccaccaagaggagcctgtttgtgcggctggtgccctgccgctgcctgcggggggaggaggagaccgtgaccaccctggactacagccactgcagcctggagcaggtgcccaaggagatcttcacctttgagaagaccctggaggagctgtacctggatgccaaccagatcgaggagctgcccaagcagctgttcaactgccagagcctgcacaagctgagcctgcctgacaatgacctgaccaccctgcctgccagcatcgccaacctgatcaacctgcgggagctggatgtgtccaagaatggcatccaggagttccctgagaacatcaagaactgcaaggtgctgaccatcgtggaggcctctgtgaaccccatcagcaagctgcctgatggcttcagccagctgctgaacctgacccagctgtacctgaatgatgccttcctggagttcctgcctgccaactttggccgcctgaccaagctgcagatcctggagctgcgggagaaccagctgaagatgctgcccaagaccatgaaccggctgacccagctggagcggctggacctgggcagcaatgagttcacagaggtgcctgaggtgctggagcagctgagcggcctgaaggagttctggatggatgccaaccggctgaccttcatccctggcttcatcggcagcctgaagcagctgacctacctggatgtgtccaagaacaacatcgagatggtggaggagggcatcagcacctgtgagaacctgcaggacctgctgctgagcagcaacagcctgcagcagctgcctgagaccatcggcagcctgaagaacatcaccaccctgaagattgatgagaaccagctgatgtacctgcctgacagcattggaggcctcatctctgtggaggagctggactgcagcttcaatgaggtggaggccctgcccagcagcatcggccagctgaccaacctgcggacctttgctgctgaccacaactacctgcagcagctgcccccagaaattggctcctggaagaacatcaccgtgctcttcctgcacagcaacaagctggagaccctgcctgaggagatgggagacatgcagaagctgaaggtgatcaacctgagtgacaaccggctgaagaacctgcccttctccttcaccaagctgcagcagctgacagccatgtggctgagtgacaaccagagcaagcccctcatccccctgcagaaggagacagattctgagacccagaagatggtgctgaccaactacatgttcccccagcagcccaggacagaagatgtgatgttcatcagtgacaatgaaagcttcaaccccagcctgtgggaggagcagaggaagcagagggcccaggtggcctttgaatgtgatgaggacaaggatgagcgggaggccccaccccgggagggcaacctgaagcgctaccccaccccctacccagatgagctgaagaacatggtgaagacagtgcagaccatcgtgcaccggctgaaggatgaggagaccaatgaagacagcggccgggacctgaagccccatgaggaccagcaggacatcaacaaggatgtgggcgtgaagaccagcgagagcaccaccaccgtgaagagcaaggtggatgagcgggagaagtacatgattggcaacagcgtgcagaagatcagcgagcctgaggccgagatcagccctggcagcctgcctgtgacagccaacatgaaggccagcgagaacctgaagcacatcgtgaaccatgatgatgtgtttgaggagagcgaggagctgagcagtgatgaggagatgaagatggccgagatgaggcctcccctgattgagaccagcatcaaccagcccaaggtggtggccctgagcaacaacaagaaggatgacaccaaggagacagacagcctgagtgatgaggtgacccacaacagcaaccagaacaacagcaactgcagcagccccagcaggatgtctgattctgtgtccctgaacacagacagcagccaggacaccagcctgtgcagccctgtgaagcagacccacatcgacatcaacagcaagatccggcaggaggatgagaacttcaacagcctgctgcagaatggagacatcctgaacagcagcacagaggagaagttcaaggcccatgacaagaaggacttcaacctgcctgaatatgacctgaatgtggaggagcggctggtgctgattgagaagtctgtggacagcacagccacagcagatgacacccacaagctggaccacatcaacatgaacctgaacaagctgatcaccaatgacaccttccagcctgagatcatggagaggagcaagacccaggacatcgtgctgggcaccagcttcctgagcatcaacagcaaggaggagacagagcacctggagaatggaaacaagtaccccaacctggagagcgtgaacaaggtgaatggccacagcgaggagaccagccagagccccaacagaacagagccccatgacagcgactgcagcgtggacctgggcatcagcaagagcacagaggacctgagcccccagaagagcggccctgtgggctctgtggtgaagagccacagcatcaccaacatggagatcggcggcctgaagatctatgacatcctgagtgacaatggcccccagcagcccagcaccaccgtgaagatcaccagcgctgtggatggcaagaacatcgtgcgcagcaagagcgccaccctgctgtatgaccagcccctgcaggtgttcaccggcagcagcagcagcagtgacctgatcagcggcaccaaggccatcttcaagtttgacagcaaccacaaccctgaggagcccaacatcatccggggccccaccagcggcccccagagcgccccccagatctacggccccccccagtacaacatccagtacagcagcagcgctgctgtgaaggacaccctgtggcacagcaagcagaacccccagattgaccacgccagcttccccccccagctgctgcccaggtctgagagcacagagaaccagagctatgccaagcacagcgccaacatgaacttcagcaaccacaacaacgtgcgggccaacacagcctaccacctgcaccagaggctgggccctgcccggcatggagagatgtgggccatcagccccaatgacaggctcatcccagctgtgaccaggagcaccatccagaggcagagctctgtgagcagcacagcctctgtgaacctgggggaccccggcagcacccggcgggcccagatccctgagggggactacctgagctaccgggagttccacagcgctggccgcaccccacccatgatgcctggcagccagaggcccctgagcgcccggacctacagcattgatggccccaatgccagccggccccagagcgcccggcccagcatcaatgagatccctgagaggaccatgtctgtgtctgacttcaactacagcaggaccagccccagcaagaggcccaatgcccgggtgggcagcgagcacagcctgctggaccccccaggcaagagcaaggtgccccgggactggagggagcaggtgctgcggcacatcgaggccaagaagctggagaagatgcccctgagcaatggccagatgggccagcccctgcggccccaggcctctgtggcccggcaccccagccgggagcagctgattgactacctgatgctgaaggtggcccaccagcccccctacacccagccccactgcagcccccggcagggccacgagctggccaagcaggagatccgggtgcgggtggagaaggaccctgagctgggcttcagcatctctggaggagtgggcggccggggcaaccccttccggccagatgatgatggcatctttgtgaccagggtgcagcctgagggccctgccagcaagctgctgcagcccggggacaagatcatccaggccaacggctacagcttcatcaacatcgagcacggccaggccgtgtccctgctgaagaccttccagaacacagtggagctgatcatcgtgcgggaggtgagcagctag

SEQ ID NO: 151374 - DNA, 4116 bp, synthetic construct
  misc_feature 1..4116: note = Description of Artificial Sequence: Synthetic coding sequence
  source 1..4116: mol_type = other DNA
atgaccaccaagaggagcctgtttgtgcggctggtgccctgccgctgcctgcggggggaggaggagaccgtgaccaccctggactacagccactgcagcctggagcaggtgcccaaggagatcttcacctttgagaagaccctggaggagctgtacctggatgccaaccagatcgaggagctgcccaagcagctgttcaactgccagagcctgcacaagctgagcctgcctgacaatgacctgaccaccctgcctgccagcatcgccaacctgatcaacctgcgggagctggatgtgtccaagaatggcatccaggagttccctgagaacatcaagaactgcaaggtgctgaccatcgtggaggcctctgtgaaccccatcagcaagctgcctgatggcttcagccagctgctgaacctgacccagctgtacctgaatgatgccttcctggagttcctgcctgccaactttggccgcctgaccaagctgcagatcctggagctgcgggagaaccagctgaagatgctgcccaagaccatgaaccggctgacccagctggagcggctggacctgggcagcaatgagttcacagaggtgcctgaggtgctggagcagctgagcggcctgaaggagttctggatggatgccaaccggctgaccttcatccctggcttcatcggcagcctgaagcagctgacctacctggatgtgtccaagaacaacatcgagatggtggaggagggcatcagcacctgtgagaacctgcaggacctgctgctgagcagcaacagcctgcagcagctgcctgagaccatcggcagcctgaagaacatcaccaccctgaagattgatgagaaccagctgatgtacctgcctgacagcattggaggcctcatctctgtggaggagctggactgcagcttcaatgaggtggaggccctgcccagcagcatcggccagctgaccaacctgcggacctttgctgctgaccacaactacctgcagcagctgcccccagaaattggctcctggaagaacatcaccgtgctcttcctgcacagcaacaagctggagaccctgcctgaggagatgggagacatgcagaagctgaaggtgatcaacctgagtgacaaccggctgaagaacctgcccttctccttcaccaagctgcagcagctgacagccatgtggctgagtgacaaccagagcaagcccctcatccccctgcagaaggagacagattctgagacccagaagatggtgctgaccaactacatgttcccccagcagcccaggacagaagatgtgatgttcatcagtgacaatgaaagcttcaaccccagcctgtgggaggagcagaggaagcagagggcccaggtggcctttgaatgtgatgaggacaaggatgagcgggaggccccaccccgggagggcaacctgaagcgctaccccaccccctacccagatgagctgaagaacatggtgaagacagtgcagaccatcgtgcaccggctgaaggatgaggagaccaatgaagacagcggccgggacctgaagccccatgaggaccagcaggacatcaacaaggatgtgggcgtgaagaccagcgagagcaccaccaccgtgaagagcaaggtggatgagcgggagaagtacatgattggcaacagcgtgcagaagatcagcgagcctgaggccgagatcagccctggcagcctgcctgtgacagccaacatgaaggccagcgagaacctgaagcacatcgtgaaccatgatgatgtgtttgaggagagcgaggagctgagcagtgatgaggagatgaagatggccgagatgaggcctcccctgattgagaccagcatcaaccagcccaaggtggtggccctgagcaacaacaagaaggatgacaccaaggagacagacagcctgagtgatgaggtgacccacaacagcaaccagaacaacagcaactgcagcagccccagcaggatgtctgattctgtgtccctgaacacagacagcagccaggacaccagcctgtgcagccctgtgaagcagacccacatcgacatcaacagcaagatccggcaggaggatgagaacttcaacagcctgctgcagaatggagacatcctgaacagcagcacagaggagaagttcaaggcccatgacaagaaggacttcaacctgcctgaatatgacctgaatgtggaggagcggctggtgctgattgagaagtctgtggacagcacagccacagcagatgacacccacaagctggaccacatcaacatgaacctgaacaagctgatcaccaatgacaccttccagcctgagatcatggagaggagcaagacccaggacatcgtgctgggcaccagcttcctgagcatcaacagcaaggaggagacagagcacctggagaatggaaacaagtaccccaacctggagagcgtgaacaaggtgaatggccacagcgaggagaccagccagagccccaacagaacagagccccatgacagcgactgcagcgtggacctgggcatcagcaagagcacagaggacctgagcccccagaagagcggccctgtgggctctgtggtgaagagccacagcatcaccaacatggagatcggcggcctgaagatctatgacatcctgagtgacaatggcccccagcagcccagcaccaccgtgaagatcaccagcgctgtggatggcaagaacatcgtgcgcagcaagagcgccaccctgctgtatgaccagcccctgcaggtgttcaccggcagcagcagcagcagtgacctgatcagcggcaccaaggccatcttcaagtttgacagcaaccacaaccctgaggagcccaacatcatccggggccccaccagcggcccccagagcgccccccagatctacggccccccccagtacaacatccagtacagcagcagcgctgctgtgaaggacaccctgtggcacagcaagcagaacccccagattgaccacgccagcttccccccccagctgctgcccaggtctgagagcacagagaaccagagctatgccaagcacagcgccaacatgaacttcagcaaccacaacaacgtgcgggccaacacagcctaccacctgcaccagaggctgggccctgcccggcatggagagatgtgggccatcagccccaatgacaggctcatcccagctgtgaccaggagcaccatccagaggcagagctctgtgagcagcacagcctctgtgaacctgggggaccccggcagcacccggcgggcccagatccctgagggggactacctgagctaccgggagttccacagcgctggccgcaccccacccatgatgcctggcagccagaggcccctgagcgcccggacctacagcattgatggccccaatgccagccggccccagagcgcccggcccagcatcaatgagatccctgagaggaccatgtctgtgtctgacttcaactacagcaggaccagccccagcaagaggcccaatgcccgggtgggcagcgagcacagcctgctggaccccccaggcaagagcaaggtgccccgggactggagggagcaggtgctgcggcacatcgaggccaagaagctggagaagatgcccctgagcaatggccagatgggccagcccctgcggccccaggccaactacagccagatccaccaccccccccaggcctctgtggcccggcaccccagccgggagcagctgattgactacctgatgctgaaggtggcccaccagcccccctacacccagccccactgcagcccccggcagggccacgagctggccaagcaggagatccgggtgcgggtggagaaggaccctgagctgggcttcagcatcagcggcggcgtgggcggccggggcaaccccttccggccagatgatgatggcatctttgtgaccagggtgcagcctgagggccctgccagcaagctgctgcagcccggggacaagatcatccaggccaacggctacagcttcatcaacattgaacatggccaggccgtgtccctgctgaagaccttccagaacacagtggagctgatcatcgtgcgggaggtgagcagctag

SEQ ID NO: 151375 - DNA, 3909 bp, synthetic construct; identical to SEQ ID NO: 151370
  misc_feature 1..3909: note = Description of Artificial Sequence: Synthetic coding sequence
  source 1..3909: mol_type = other DNA

SEQ ID NO: 151376 - DNA, 4260 bp, synthetic construct
  misc_feature 1..4260: note = Description of Artificial Sequence: Synthetic coding sequence
  source 1..4260: mol_type = other DNA
atgaccaccaagaggagcctgtttgtgcggctggtgccctgccgctgcctgcggggggaggaggagaccgtgaccaccctggactacagccactgcagcctggagcaggtgcccaaggagatcttcacctttgagaagaccctggaggagctgtacctggatgccaaccagatcgaggagctgcccaagcagctgttcaactgccagagcctgcacaagctgagcctgcctgacaatgacctgaccaccctgcctgccagcatcgccaacctgatcaacctgcgggagctggatgtgtccaagaatggcatccaggagttccctgagaacatcaagaactgcaaggtgctgaccatcgtggaggcctctgtgaaccccatcagcaagctgcctgatggcttcagccagctgctgaacctgacccagctgtacctgaatgatgccttcctggagttcctgcctgccaactttggccgcctgaccaagctgcagatcctggagctgcgggagaaccagctgaagatgctgcccaagaccatgaaccggctgacccagctggagcggctggacctgggcagcaatgagttcacagaggtgcctgaggtgctggagcagctgagcggcctgaaggagttctggatggatgccaaccggctgaccttcatccctggcttcatcggcagcctgaagcagctgacctacctggatgtgtccaagaacaacatcgagatggtggaggagggcatcagcacctgtgagaacctgcaggacctgctgctgagcagcaacagcctgcagcagctgcctgagaccatcggcagcctgaagaacatcaccaccctgaagattgatgagaaccagctgatgtacctgcctgacagcattggaggcctcatctctgtggaggagctggactgcagcttcaatgaggtggaggccctgcccagcagcatcggccagctgaccaacctgcggacctttgctgctgaccacaactacctgcagcagctgcccccagaaattggctcctggaagaacatcaccgtgctcttcctgcacagcaacaagctggagaccctgcctgaggagatgggagacatgcagaagctgaaggtgatcaacctgagtgacaaccggctgaagaacctgcccttctccttcaccaagctgcagcagctgacagccatgtggctgagtgacaaccagagcaagcccctcatccccctgcagaaggagacagattctgagacccagaagatggtgctgaccaactacatgttcccccagcagcccaggacagaagatgtgatgttcatcagtgacaatgaaagcttcaaccccagcctgtgggaggagcagaggaagcagagggcccaggtggcctttgaatgtgatgaggacaaggatgagcgggaggccccaccccgggagggcaacctgaagcgctaccccaccccctacccagatgagctgaagaacatggtgaagacagtgcagaccatcgtgcaccggctgaaggatgaggagaccaatgaagacagcggccgggacctgaagccccatgaggaccagcaggacatcaacaaggatgtgggcgtgaagaccagcgagagcaccaccaccgtgaagagcaaggtggatgagcgggagaagtacatgattggcaacagcgtgcagaagatcagcgagcctgaggccgagatcagccctggcagcctgcctgtgacagccaacatgaaggccagcgagaacctgaagcacatcgtgaaccatgatgatgtgtttgaggagagcgaggagctgagcagtgatgaggagatgaagatggccgagatgaggcctcccctgattgagaccagcatcaaccagcccaaggtggtggccctgagcaacaacaagaaggatgacaccaaggagacagacagcctgagtgatgaggtgacccacaacagcaaccagaacaacagcaactgcagcagccccagcaggatgtctgattctgtgtccctgaacacagacagcagccaggacaccagcctgtgcagccctgtgaagcagacccacatcgacatcaacagcaagatccggcaggaggatgagaacttcaacagcctgctgcagaatggagacatcctgaacagcagcacagaggagaagttcaaggcccatgacaagaaggacttcaacctgcctgaatatgacctgaatgtggaggagcggctggtgctgattgagaagtctgtggacagcacagccacagcagatgacacccacaagctggaccacatcaacatgaacctgaacaagctgatcaccaatgacaccttccagcctgagatcatggagaggagcaagacccaggacatcgtgctgggcaccagcttcctgagcatcaacagcaaggaggagacagagcacctggagaatggaaacaagtaccccaacctggagagcgtgaacaaggtgaatggccacagcgaggagaccagccagagccccaacagaacagagccccatgacagcgactgcagcgtggacctgggcatcagcaagagcacagaggacctgagcccccagaagagcggccctgtgggctctgtggtgaagagccacagcatcaccaacatggagatcggcggcctgaagatctatgacatcctgagtgacaatggcccccagcagcccagcaccaccgtgaagatcaccagcgctgtggatggcaagaacatcgtgcgcagcaagagcgccaccctgctgtatgaccagcccctgcaggtgttcaccggcagcagcagcagcagtgacctgatcagcggcaccaaggccatcttcaagtttgacagcaaccacaaccctgaggagcccaacatcatccggggccccaccagcggcccccagagcgccccccagatctacggccccccccagtacaacatccagtacagcagcagcgctgctgtgaaggacaccctgtggcacagcaagcagaacccccagattgaccacgccagcttccccccccagctgctgcccaggtctgagagcacagagaaccagagctatgccaagcacagcgccaacatgaacttcagcaaccacaacaacgtgcgggccaacacagcctaccacctgcaccagaggctgggccctgcccggcatggagagatgtgggccatcagccccaatgacaggctcatcccagctgtgaccaggagcaccatccagaggcagagctctgtgagcagcacagcctctgtgaacctgggggaccccggcagcacccggcgggcccagatccctgagggggactacctgagctaccgggagttccacagcgctggccgcaccccacccatgatgcctggcagccagaggcccctgagcgcccggacctacagcattgatggccccaatgccagccggccccagagcgcccggcccagcatcaatgagatccctgagaggaccatgtctgtgtctgacttcaactacagcaggaccagccccagcaagaggcccaatgcccgggtgggcagcgagcacagcctgctggaccccccaggcaagagcaaggtgccccgggactggagggagcaggtgctgcggcacatcgaggccaagaagctggagaagtccatgctgagccgctccttcaacagcaacttcaccaccgtgtcctccttccactgcggcagcagccgggacctgcacggcagccagggcagcctggccctgtctgtggccgaccggcggggcagcggcggccacatcttcaggatgcccctgagcaatggccagatgggccagcccctgcggccccaggccaactacagccagatccaccaccccccccaggcctctgtggcccggcaccccagccgggagcagctgattgactacctgatgctgaaggtggcccaccagcccccctacacccagccccactgcagcccccggcagggccacgagctggccaagcaggagatccgggtgcgggtggagaaggaccctgagctgggcttcagcatcagcggcggcgtgggcggccggggcaaccccttccggccagatgatgatggcatctttgtgaccagggtgcagcctgagggccctgccagcaagctgctgcagcccggggacaagatcatccaggccaacggctacagcttcatcaacattgaacatggccaggccgtgtccctgctgaagaccttccagaacacagtggagctgatcatcgtgcgggaggtgagcagctag

SEQ ID NO: 151377 - DNA, 1158 bp, synthetic construct
  misc_feature 1..1158: note = Description of Artificial Sequence: Synthetic coding sequence
  source 1..1158: mol_type = other DNA
atgaaggaggaggagggcttcccagaagatgaggccacagaaagtgagaccctgagcctggtgaaggagctggatgccttccccaaggtgcctgagagctatgtggagaccagcgccagcggcggcaccgtgtccctgattgccttcaccaccatggccctgctgaccatcatggagttctctgtgtaccaggacacctggatgaagtatgaatatgaggtggacaaggacttcagcagcaagctgcgcatcaacatcgacatcaccgtggccatgaagtgccagtatgtgggcgcagatgtgctggacctggccgagaccatggtggccagcgcagatggcctggtgtatgagcccaccgtgtttgacctgagcccccagcagaaggagtggcagaggatgctgcagctgatccagagccggctgcaggaggagcacagcctgcaggacgtcatcttcaagagcgccttcaagagcaccagcacagccctgcccccccgggaggatgacagcagccagagccccaatgcctgccgcatccacggccacctgtatgtgaacaaggtggccggcaacttccacatcaccgtgggcaaggccatcccccacccccggggccacgcccacctggccgccctggtgaaccacgagagctacaacttcagccacagaattgaccacctgagctttggagagctggtgcctgccatcatcaaccccctggatggaacagagaagatcgccatcgaccacaaccagatgttccagtacttcatcaccgtggtgcccaccaagctgcacacctacaagatctctgctgacacccaccagttctctgtgacagagcgggagcgcatcatcaaccacgccgccggcagccacggcgtgtctggcatcttcatgaagtatgacctgagcagcctgatggtgacagtgacagaggagcacatgcccttctggcagttctttgtgcggctgtgtggcatcgtgggcggcatcttcagcaccaccggcatgctgcatggaattggcaagttcatcgtggagatcatctgctgccgcttccggctgggcagctacaagcctgtgaacagcgtgccctttgaagatggccacacagacaaccacctgcccctgctggagaacaacacccactag

SEQ ID NO: 151378 - DNA, 1134 bp, synthetic construct
  misc_feature 1..1134: note = Description of Artificial Sequence: Synthetic coding sequence
  source 1..1134: mol_type = other DNA
atgaggcggctgaacaggaagaagaccctgagcctggtgaaggagctggatgccttccccaaggtgcctgagagctatgtggagaccagcgccagcggcggcaccgtgtccctgattgccttcaccaccatggccctgctgaccatcatggagttctctgtgtaccaggacacctggatgaagtatgaatatgaggtggacaaggacttcagcagcaagctgcgcatcaacatcgacatcaccgtggccatgaagtgccagtatgtgggcgcagatgtgctggacctggccgagaccatggtggccagcgcagatggcctggtgtatgagcccaccgtgtttgacctgagcccccagcagaaggagtggcagaggatgctgcagctgatccagagccggctgcaggaggagcacagcctgcaggacgtcatcttcaagagcgccttcaagagcaccagcacagccctgcccccccgggaggatgacagcagccagagccccaatgcctgccgcatccacggccacctgtatgtgaacaaggtggccggcaacttccacatcaccgtgggcaaggccatcccccacccccggggccacgcccacctggccgccctggtgaaccacgagagctacaacttcagccacagaattgaccacctgagctttggagagctggtgcctgccatcatcaaccccctggatggaacagagaagatcgccatcgaccacaaccagatgttccagtacttcatcaccgtggtgcccaccaagctgcacacctacaagatctctgctgacacccaccagttctctgtgacagagcgggagcgcatcatcaaccacgccgccggcagccacggcgtgtctggcatcttcatgaagtatgacctgagcagcctgatggtgacagtgacagaggagcacatgcccttctggcagttctttgtgcggctgtgtggcatcgtgggcggcatcttcagcaccaccggcatgctgcatggaattggcaagttcatcgtggagatcatctgctgccgcttccggctgggcagctacaagcctgtgaacagcgtgccctttgaagatggccacacagacaaccacctgcccctgctggagaacaacacccactag

SEQ ID NO: 151379 - DNA, 663 bp, synthetic construct
  misc_feature 1..663: note = Description of Artificial Sequence: Synthetic coding sequence
  source 1..663: mol_type = other DNA
atgaggcggctgaacaggaagaagaccctgagcctggtgaaggagctggatgccttccccaaggtgcctgagagctatgtggagaccagcgccagcggcggcaccgtgtccctgattgccttcaccaccatggccctgctgaccatcatggagttctctgtgtaccaggacacctggatgaagtatgaatatgaggtggacaaggacttcagcagcaagctgcgcatcaacatcgacatcaccgtggccatgaagtgccagtatgtgggcgcagatgtgctggacctggccgagaccatggtggccagcgcagatggcctggtgtatgagcccaccgtgtttgacctgagcccccagcagaaggagtggcagaggatgctgcagctgatccagagccggctgcaggaggagcacagcctgcaggacgtcatcttcaagagcgccttcaagagcaccagcacagccctgcccccccgggaggatgacagcagccagagccccaatgcctgccgcatccacggccacctgtatgtgaacaaggtggccggcaacttccacatcaccgtgggcaaggccatcccccacccccggggccacgcccacctggccgccctggtgaaccacgagagctacaacttcagccacagaattgaccacctgtag

SEQ ID NO: 151380 - DNA, 216 bp, synthetic construct
  misc_feature 1..216: note = Description of Artificial Sequence: Synthetic coding sequence
  source 1..216: mol_type = other DNA
atgaggcggctgaacaggaagaagaccctgagcctggtgaaggagctggatgccttccccaaggtgcctgagagctatgtggagaccagcgccagcggcggcaccgtgtccctgattgccttcaccaccatggccctgctgaccatcatggagttctctgtgtaccaggacacctggatgaagtatgaatatgaggtggacaaggacttctcctag

SEQ ID NO: 151381 - DNA, 528 bp, synthetic construct
  misc_feature 1..528: note = Description of Artificial Sequence: Synthetic coding sequence
  source 1..528: mol_type = other DNA
atgaggcggctgaacaggaagaagaccctgagcctggtgaaggagctggatgccttccccaaggtgcctgagagctatgtggagaccagcgccagcggcggcaccgtgtccctgattgccttcaccaccatggccctgctgaccatcatggagttctctgtgtaccaggacacctggatgaagtatgaatatgaggtggacaaggacttcagcagcaagctgcgcatcaacatcgacatcaccgtggccatgaagtgccagtatgtgggcgcagatgtgctggacctggccgagaccatggtggccagcgcagatggcctggtgtatgagcccaccgtgtttgacctgagcccccagcagaaggagtggcagaggatgctgcagctgatccagagccggctgcaggaggagcacagcctgcaggacgtcatcttcaagagcgccttcaagagcaccagcacagccctgcccccccgggaggatgacagcagccagagccccaatgcctgccgcatccacggccactag

SEQ ID NO: 151382 - DNA, 1158 bp, synthetic construct
  misc_feature 1..1158: note = Description of Artificial Sequence: Synthetic coding sequence
  source 1..1158: mol_type = other DNA
atgcctgagtacaagggccgcacagtgctggtgagagatgcccaggagggctctgtgaccctgcagatcctggatgtgcggctggaggaccagggcagctaccgctgcctgatccaggtgggcaacctgagcaaggaggacaccgtcatcctgcaggtggccgcccccagcgtgggcagcctgagccccagcgctgtggccctggccgtcatcctgcctgtgctggtgctgctgatcatggtgtgcctgtgcctgatctggaagcagaggcgggccaaggagaagctgctgtatgagcacgtgacagaggtggacaacctgctgagtgaccacgccaaggagaagggcaagctgcacaaggctgtgaagaagctgcggtctgagctgaagctgaagagagctgctgccaacagcggctggaggcgggcccggctgcactttgtggccgtgaccctggaccctgacacagcccaccccaagctgatcctgtctgaggaccagagatgtgtgcggctgggggaccggcggcagcctgtgcctgacaacccccagagatttgattttgtggtgtccatcctgggcagcgagtacttcaccaccggctgccactactgggaggtgtatgtgggggacaagaccaagtggatcctgggcgtgtgcagcgagagcgtgtccaggaagggcaaggtgacagccagccctgccaacggccactggctgctgcggcagagcagaggaaatgaatatgaggccctgaccagcccccagaccagcttccggctgaaggagcccccaagatgtgtgggcatcttcctggactatgaggccggggtcatctccttctacaacgtgaccaacaagagccacatcttcaccttcacccacaacttcagcggccccctgcggcccttctttgagccctgcctgcatgatggcggcaagaacacagcccccctggtgatctgcagcgagctgcacaagtctgaggagagcatcgtgcccaggcctgagggcaaaggacatgccaatggagatgtgtccctgaaggtgaacagcagcctgctgccccccaaggcccctgagctgaaggacatcatcctgagcctgcccccagacctgggccctgccctgcaggagctgaaggcccccagcttctag

SEQ ID NO: 151383 - DNA, 1428 bp, synthetic construct
  misc_feature 1..1428: note = Description of Artificial Sequence: Synthetic coding sequence
  source 1..1428: mol_type = other DNA
atggagatggccagcagcgctggctcctggctgagcggctgcctgatccccctggtgttcctgcggctgtctgtgcacgtgtctggccatgctggagatgctgggaagttccacgtggccctgctgggcggcacagctgagctgctgtgccccctgagcctgtggccaggcaccgtgcccaaggaggtgcgctggctgcggagccccttcccccagaggagccaggccgtgcacatcttcagagatggcaaggaccaggatgaggacctgatgcctgagtacaagggccgcacagtgctggtgagagatgcccaggagggctctgtgaccctgcagatcctggatgtgcggctggaggaccagggcagctaccgctgcctgatccaggtgggcaacctgagcaaggaggacaccgtcatcctgcaggtggccgcccccagcgtgggcagcctgagccccagcgctgtggccctggccgtcatcctgcctgtgctggtgctgctgatcatggtgtgcctgtgcctgatctggaagcagaggcgggccaaggagaagctgctgtatgagcacgtgacagaggtggacaacctgctgagtgaccacgccaaggagaagggcaagctgcacaaggctgtgaagaagctgcggtctgagctgaagctgaagagagctgctgccaacagcggctggaggcgggcccggctgcactttgtggccgtgaccctggaccctgacacagcccaccccaagctgatcctgtctgaggaccagagatgtgtgcggctgggggaccggcggcagcctgtgcctgacaacccccagagatttgattttgtggtgtccatcctgggcagcgagtacttcaccaccggctgccactactgggaggtgtatgtgggggacaagaccaagtggatcctgggcgtgtgcagcgagagcgtgtccaggaagggcaaggtgacagccagccctgccaacggccactggctgctgcggcagagcagaggaaatgaatatgaggccctgaccagcccccagaccagcttccggctgaaggagcccccaagatgtgtgggcatcttcctggactatgaggccggggtcatctccttctacaacgtgaccaacaagagccacatcttcaccttcacccacaacttcagcggccccctgcggcccttctttgagccctgcctgcatgatggcggcaagaacacagcccccctggtgatctgcagcgagctgcacaagtctgaggagagcatcgtgcccaggcctgagggcaaaggacatgccaatggagatgtgtccctgaaggtgaacagcagcctgctgccccccaaggcccctgagctgaaggacatcatcctgagcctgcccccagacctgggccctgccctgcaggagctgaaggcccccagcttctag

SEQ ID NO: 151384 - DNA, 1428 bp, synthetic construct; identical to SEQ ID NO: 151383
  misc_feature 1..1428: note = Description of Artificial Sequence: Synthetic coding sequence
  source 1..1428: mol_type = other DNA

SEQ ID NO: 151385 - DNA, 2595 bp, synthetic construct
  misc_feature 1..2595: note = Description of Artificial Sequence: Synthetic coding sequence
  source 1..2595: mol_type = other DNA
atgaccacagagaagagcctggtgacagaagctgagaacagccagcaccagcagaaggaggagggggaggaggccatcaacagcggccagcaggagccccagcaggaggagagctgccagacagctgctgagggggacaactggtgtgagcagaagctgaaggccagcaatggagacacccccacccatgaggacctgaccaagaacaaggagaggaccagcgagagccggggcctgagccgcctcttcagcagcttcctgaagaggcccaagagccaggtgtctgaggaggagggcaaggaggtggagagtgacaaggagaagggggagggcggccagaaggagattgaatttggcaccagcctggatgaggagatcatcctgaaggcccccatcgccgcccctgagcctgagctgaagacagaccccagcctggacctgcacagcctgagcagcgctgagacccagcctgcccaggaggagctgcgggaggaccctgactttgagatcaaggagggggagggcctggaggagtgcagcaagattgaggtgaaggaggagagcccccagagcaaggccgagacagagctgaaggccagccagaagcccatcaggaagcacaggaacatgcactgcaaggtgtccctgctggatgacacagtgtatgaatgtgtggtggagaagcacgccaagggccaggacctgctgaagagggtgtgtgagcacctgaacctgctggaggaggactacttcggcctggccatctgggacaatgccaccagcaagacctggctggacagcgccaaggagatcaagaagcaggtgcggggcgtgccctggaacttcaccttcaacgtgaagttctaccccccagaccctgcccagctgacagaggacatcacccgctactacctgtgcctgcagctgcggcaggacatcgtggccggccgcctgccctgcagctttgccaccctggccctgctgggcagctacaccatccagagcgagctgggggactatgaccctgagctgcatggagtggactatgtgtctgacttcaagctggcccccaaccagaccaaggagctggaggagaaggtgatggagctgcacaagagctaccgctccatgaccccagcccaggccgacctggagttcctggagaatgccaagaagctgtccatgtatggagtggacctgcacaaggccaaggacctggagggcgtggacatcatcctgggcgtgtgcagcagcggcctgctggtgtacaaggacaagctgcgcatcaaccgcttcccctggcccaaggtgctgaagatctcctacaagaggagcagcttcttcatcaagatccggcctggagagcaggagcagtatgagagcaccatcggcttcaagctgcccagctaccgggccgccaagaagctgtggaaggtgtgtgtggagcaccacaccttcttccggctgaccagcacagacaccatccccaagagcaagttcctggccctgggcagcaagttccgctacagcggccgcacccaggcccagacccggcaggccagcgccctgattgacaggcctgccccccactttgagaggacagccagcaagagggccagccgcagcctggatggagctgctgctgtggacagcgctgacaggagcccccggcccaccagcgccccagccatcacccagggccaggtggccgagggcggcgtgctggatgccagcgccaagaagacagtggtgcccaaggcccagaaggagaccgtgaaggccgaggtgaagaaggaggatgagcccccagagcaggccgagcctgagcccacagaggcctggaaggtggagaagacccacatcgaggtgacagtgcccaccagcaatggagaccagacccagaagctggccgagaagacagaagatctcatccgcatgaggaagaagaagcgggagcggctggatggagagaacatctacatccgccacagcaacctgatgctggaggacctggacaagagccaggaggagatcaagaagcaccacgccagcatcagcgagctgaagaagaacttcatggagagcgtgcctgagccccggcccagcgagtgggacaagaggctgagcacccacagccccttccgcaccctgaacatcaatggccagatccccactggagagggcccccccctggtgaagacccagacagtgaccatcagtgacaatgccaatgctgtgaagtctgagatccccaccaaggatgtgcccatcgtgcacacagagaccaagaccatcacctatgaagctgcccagacagatgacaacagcggggacctggaccccggggtgctgctgacagcccagaccatcaccagcgagacccccagcagcaccaccaccacccagatcaccaagacagtgaagggcggcatcagcgagacccgcatcgagaagagaattgtcatcactggagatgctgacatcgaccatgaccaggtgctggtgcaggccatcaaggaggccaaggagcagcacccagacatgtctgtgaccaaggtggtggtgcaccaggagacagaaattgctgatgaatag

SEQ ID NO: 151386 - DNA, 2328 bp, synthetic construct
  misc_feature 1..2328: note = Description of Artificial Sequence: Synthetic coding sequence
  source 1..2328: mol_type = other DNA
atgaccacagagaagagcctggtgacagaagctgagaacagccagcaccagcagaaggaggagggggaggaggccatcaacagcggccagcaggagccccagcaggaggagagctgccagacagctgctgagggggacaactggtgtgagcagaagctgaaggccagcaatggagacacccccacccatgaggacctgaccaagaacaaggagaggaccagcgagagccggggcctgagccgcctcttcagcagcttcctgaagaggcccaagagccaggtgtctgaggaggagggcaaggaggtggagagtgacaaggagaagggggagggcggccagaaggagattgaatttggcaccagcctggatgaggagatcatcctgaaggcccccatcgccgcccctgagcctgagctgaagacagaccccagcctggacctgcacagcctgagcagcgctgagacccagcctgcccaggaggagctgcgggaggaccctgactttgagatcaaggagggggagggcctggaggagtgcagcaagattgaggtgaaggaggagagcccccagagcaaggccgagacagagctgaaggccagccagaagcccatcaggaagcacaggaacatgcactgcaaggtgtccctgctggatgacacagtgtatgaatgtgtggtggagacctggctggacagcgccaaggagatcaagaagcaggtgcggggcgtgccctggaacttcaccttcaacgtgaagttctaccccccagaccctgcccagctgacagaggacatcacccgctactacctgtgcctgcagctgcggcaggacatcgtggccggccgcctgccctgcagctttgccaccctggccctgctgggcagctacaccatccagagcgagctgggggactatgaccctgagctgcacggcgtggactatgtgtctgacttcaagctggcccccaaccagaccaaggagctggaggagaaggtgatggagctgcacaagagctaccgctccatgaccccagcccaggccgacctggagttcctggagaatgccaagaagctgtccatgtatggagtggacctgcacaaggccaaggacctggagggcgtggacatcatcctgggcgtgtgcagcagcggcctgctggtgtacaaggacaagctgcgcatcaaccgcttcccctggcccaaggtgctgaagatctcctacaagaggagcagcttcttcatcaagatccggcctggagagcaggagcagtatgagagcaccatcggcttcaagctgcccagctacagagctgccaagaagctgtggaaggtgtgtgtggagcaccacaccttcttccggctgaccagcacagacaccatccccaagagcaagttcctggccctgggcagcaagttccgctacagcggccgcacccaggcccagacccggcaggccagcgccctgattgacaggcctgccccccactttgagaggacagccagcaagagggccagccgcagcctggatggagctgctgctgtggacagcgctgacaggagcccccggcccaccagcgccccagccatcacccagggccaggtggccgagggcggcgtgctggatgccagcgccaagaagacagtggtgcccaaggcccagaaggagaccgtgaaggccgaggtgaagaaggaggatgagcccccagagcaggccgagcctgagcccacagaggcctggaaggacctggacaagagccaggaggagatcaagaagcaccacgccagcatcagcgagctgaagaagaacttcatggagagcgtgcctgagccccggcccagcgagtgggacaagaggctgagcacccacagccccttccgcaccctgaacatcaatggccagatccccaccggggagggcccccccctggtgaagacccagacagtgaccatcagtgacaatgccaatgctgtgaagtctgagatccccaccaaggatgtgcccatcgtgcacacagagaccaagaccatcacctatgaggccgcccagacagatgacaacagcggggacctggaccccggggtgctgctgacagcccagaccatcaccagcgagacccccagcagcaccaccaccacccagatcaccaagacagtgaagggcggcatcagcgagaccagaattgagaagagaattgtcatcactggagatgctgacatcgaccatgaccaggtgctggtgcaggccatcaaggaggccaaggagcagcacccagacatgtctgtgaccaaggtggtggtgcaccaggagacagaaattgctgatgaatag

SEQ ID NO: 151387 - DNA, 1926 bp, synthetic construct
  misc_feature 1..1926: note = Description of Artificial Sequence: Synthetic coding sequence
  source 1..1926: mol_type = other DNA
atgcactgcaaggtgtccctgctggatgacacagtgtatgaatgtgtggtggagaagcacgccaagggccaggacctgctgaagagggtgtgtgagcacctgaacctgctggaggaggactacttcggcctggccatctgggacaatgccaccagcaagacctggctggacagcgccaaggagatcaagaagcaggtgcggggcgtgccctggaacttcaccttcaacgtgaagttctaccccccagaccctgcccagctgacagaggacatcacccgctactacctgtgcctgcagctgcggcaggacatcgtggccggccgcctgccctgcagctttgccaccctggccctgctgggcagctacaccatccagagcgagctgggggactatgaccctgagctgcacggcgtggactatgtgtctgacttcaagctggcccccaaccagaccaaggagctggaggagaaggtgatggagctgcacaagagctaccgctccatgaccccagcccaggccgacctggagttcctggagaatgccaagaagctgtccatgtatggagtggacctgcacaaggccaaggacctggagggcgtggacatcatcctgggcgtgtgcagcagcggcctgctggtgtacaaggacaagctgcgcatcaaccgcttcccctggcccaaggtgctgaagatctcctacaagaggagcagcttcttcatcaagatccggcctggagagcaggagcagtatgagagcaccatcggcttcaagctgcccagctacagagctgccaagaagctgtggaaggtgtgtgtggagcaccacaccttcttccggctgaccagcacagacaccatccccaagagcaagttcctggccctgggcagcaagttccgctacagcggccgcacccaggcccagacccggcaggccagcgccctgattgacaggcctgccccccactttgagaggacagccagcaagagggccagccgcagcctggatggagctgctgctgtggacagcgctgacaggagcccccggcccaccagcgccccagccatcacccagggccaggtggccgagggcggcgtgctggatgccagcgccaagaagacagtggtgcccaaggcccagaaggagaccgtgaaggccgaggtgaagaaggaggatgagcccccagagcaggccgagcctgagcccacagaggcctggaaggtggagaagacccacatcgaggtgacagtgcccaccagcaatggagaccagacccagaagaagcgggagcggctggatggagagaacatctacatccgccacagcaacctgatgctggaggacctggacaagagccaggaggagatcaagaagcaccacgccagcatcagcgagctgaagaagaacttcatggagagcgtgcctgagccccggcccagcgagtgggacaagaggctgagcacccacagccccttccgcaccctgaacatcaatggccagatccccaccggggagggcccccccctggtgaagacccagacagtgaccatcagtgacaatgccaatgctgtgaagtctgagatccccaccaaggatgtgcccatcgtgcacacagagaccaagaccatcacctatgaggccgcccagacagatgacaacagcggggacctggaccccggggtgctgctgacagcccagaccatcaccagcgagacccccagcagcaccaccaccacccagatcaccaagacagtgaagggcggcatcagcgagaccagaattgagaagagaattgtcatcactggagatgctgacatcgaccatgaccaggtgctggtgcaggccatcaaggaggccaaggagcagcacccagacatgtctgtgaccaaggtggtggtgcaccaggagacagaaattgctgatgaatag

SEQ ID NO: 151388 - DNA, 2496 bp, synthetic construct
  misc_feature 1..2496: note = Description of Artificial Sequence: Synthetic coding sequence
  source 1..2496: mol_type = other DNA
atgaccacagagaagagcctggtgacagaagctgagaacagccagcaccagcagaaggaggagggggaggaggccatcaacagcggccagcaggagccccagcaggaggagagctgccagacagctgctgagggggacaactggtgtgagcagaagctgaaggccagcaatggagacacccccacccatgaggacctgaccaagaacaaggagaggaccagcgagagccggggcctgagccgcctcttcagcagcttcctgaagaggcccaagagccaggtgtctgaggaggagggcaaggaggtggagagtgacaaggagaagggggagggcggccagaaggagattgaatttggcaccagcctggatgaggagatcatcctgaaggcccccatcgccgcccctgagcctgagctgaagacagaccccagcctggacctgcacagcctgagcagcgctgagacccagcctgcccaggaggagctgcgggaggaccctgactttgagatcaaggagggggagggcctggaggagtgcagcaagattgaggtgaaggaggagagcccccagagcaaggccgagacagagctgaaggccagccagaagcccatcaggaagcacaggaacatgcactgcaaggtgtccctgctggatgacacagtgtatgaatgtgtggtggagaagcacgccaagggccaggacctgctgaagagggtgtgtgagcacctgaacctgctggaggaggactacttcggcctggccatctgggacaatgccaccagcaagacctggctggacagcgccaaggagatcaagaagcaggtgcggggcgtgccctggaacttcaccttcaacgtgaagttctaccccccagaccctgcccagctgacagaggacatcacccgctactacctgtgcctgcagctgcggcaggacatcgtggccggccgcctgccctgcagctttgccaccctggccctgctgggcagctacaccatccagagcgagctgggggactatgaccctgagctgcatggagtggactatgtgtctgacttcaagctggcccccaaccagaccaaggagctggaggagaaggtgatggagctgcacaagagctaccgctccatgaccccagcccaggccgacctggagttcctggagaatgccaagaagctgtccatgtatggagtggacctgcacaaggccaaggacctggagggcgtggacatcatcctgggcgtgtgcagcagcggcctgctggtgtacaaggacaagctgcgcatcaaccgcttcccctggcccaaggtgctgaagatctcctacaagaggagcagcttcttcatcaagatccggcctggagagcaggagcagtatgagagcaccatcggcttcaagctgcccagctaccgggccgccaagaagctgtggaaggtgtgtgtggagcaccacaccttcttccggctgaccagcacagacaccatccccaagagcaagttcctggccctgggcagcaagttccgctacagcggccgcacccaggcccagacccggcaggccagcgccctgattgacaggcctgccccccactttgagaggacagccagcaagagggccagccgcagcctggatggagctgctgctgtggacagcgctgacaggagcccccggcccaccagcgccccagccatcacccagggccaggtggccgagggcggcgtgctggatgccagcgccaagaagacagtggtgcccaaggcccagaaggagaccgtgaaggccgaggtgaagaaggaggatgagcccccagagcaggccgagcctgagcccacagaggcctggaagaagaagcgggagcggctggatggagagaacatctacatccgccacagcaacctgatgctggaggacctggacaagagccaggaggagatcaagaagcaccacgccagcatcagcgagctgaagaagaacttcatggagagcgtgcctgagccccggcccagcgagtgggacaagaggctgagcacccacagccccttccgcaccctgaacatcaatggccagatccccaccggggagggcccccccctggtgaagacccagacagtgaccatcagtgacaatgccaatgctgtgaagtctgagatccccaccaaggatgtgcccatcgtgcacacagagaccaagaccatcacctatgaggccgcccagacagatgacaacagcggggacctggaccccggggtgctgctgacagcccagaccatcaccagcgagacccccagcagcaccaccaccacccagatcaccaagacagtgaagggcggcatcagcgagaccagaattgagaagagaattgtcatcactggagatgctgacatcgaccatgaccaggtgctggtgcaggccatcaaggaggccaaggagcagcacccagacatgtctgtgaccaaggtggtggtgcaccaggagacagaaattgctgatgaatag

SEQ ID NO: 151389 - DNA, 2484 bp, synthetic construct
  misc_feature 1..2484: note = Description of Artificial Sequence: Synthetic coding sequence
  source 1..2484: mol_type = other DNA
cgggcccgggccgcccggagccagaatgctgtgggccctgtgcctgctgcccccagccctgagaagagcctggtgacagaagctgagaacagccagcaccagcagaaggaggagggggaggaggccatcaacagcggccagcaggagccccagcaggaggagagctgccagacagctgctgagggggacaactggtgtgagcagaagctgaaggccagcaatggagacacccccacccatgaggacctgaccaagaacaaggagaggaccagcgagagccggggcctgagccgcctcttcagcagcttcctgaagaggcccaagagccaggtgtctgaggaggagggcaaggaggtggagagtgacaaggagaagggggagggcggccagaaggagattgaatttggcaccagcctggatgaggagatcatcctgaaggcccccatcgccgcccctgagcctgagctgaagacagaccccagcctggacctgcacagcctgagcagcgctgagacccagcctgcccaggaggagctgagagaagatcctgactttgagatcaaggagggggagggcctggaggagtgcagcaagattgaggtgaaggaggagagcccccagagcaaggccgagacagagctgaaggccagccagaagcccatcaggaagcacaggaacatgcactgcaaggtgtccctgctggatgacacagtgtatgaatgtgtggtggagaagcacgccaagggccaggacctgctgaagagggtgtgtgagcacctgaacctgctggaggaggactacttcggcctggccatctgggacaatgccaccagcaagacctggctggacagcgccaaggagatcaagaagcaggtgcggggcgtgccctggaacttcaccttcaacgtgaagttctaccccccagaccctgcccagctgacagaggacatcacccgctactacctgtgcctgcagctgcggcaggacatcgtggccggccgcctgccctgcagctttgccaccctggccctgctgggcagctacaccatccagagcgagctgggggactatgaccctgagctgcacggcgtggactatgtgtctgacttcaagctggcccccaaccagaccaaggagctggaggagaaggtgatggagctgcacaagagctaccgctccatgaccccagcccaggccgacctggagttcctggagaatgccaagaagctgtccatgtatggagtggacctgcacaaggccaaggacctggagggcgtggacatcatcctgggcgtgtgcagcagcggcctgctggtgtacaaggacaagctgcgcatcaaccgcttcccctggcccaaggtgctgaagatctcctacaagaggagcagcttcttcatcaagatccggcctggagagcaggagcagtatgagagcaccatcggcttcaagctgcccagctacagagctgccaagaagctgtggaaggtgtgtgtggagcaccacaccttcttccggctgaccagcacagacaccatccccaagagcaagttcctggccctgggcagcaagttccgctacagcggccgcacccaggcccagacccggcaggccagcgccctgattgacaggcctgccccccactttgagaggacagccagcaagagggccagccgcagcctggatggagctgctgctgtggacagcgctgacaggagcccccggcccaccagcgccccagccatcacccagggccaggtggccgagggcggcgtgctggatgccagcgccaagaagacagtggtgcccaaggcccagaaggagaccgtgaaggccgaggtgaagaaggaggatgagcccccagagcaggccgagcctgagcccacagaggcctggaaggacctggacaagagccaggaggagatcaagaagcaccacgccagcatcagcgagctgaagaagaacttcatggagagcgtgcctgagccccggcccagcgagtgggacaagaggctgagcacccacagccccttccgcaccctgaacatcaatggccagatccccaccggggagggcccccccctggtgaagacccagacagtgaccatcagtgacaatgccaatgctgtgaagtctgagatccccaccaaggatgtgcccatcgtgcacacagagaccaagaccatcacctatgaggccgcccagacagatgacaacagcggggacctggaccccggggtgctgctgacagcccagaccatcaccagcgagacccccagcagcaccaccaccacccagatcaccaagacagtgaagggcggcatcagcgagaccagaattgagaagagaattgtcatcactggagatgctgacatcgaccatgaccaggtgctggtgcaggccatcaaggaggccaaggagcagcacccagacatgtctgtgaccaaggtggtggtgcaccaggagacagaaattgctgatgaatag

SEQ ID NO: 151390 - DNA, 2163 bp, synthetic construct
  misc_feature 1..2163: note = Description of Artificial Sequence: Synthetic coding sequence
  source 1..2163: mol_type = other DNA
atgaccacagagaagagcctggtgacagaagctgagaacagccagcaccagcagaaggaggagggggaggaggccatcaacagcggccagcaggagccccagcaggaggagagctgccagacagctgctgagggggacaactggtgtgagcagaagctgaaggccagcaatggagacacccccacccatgaggacctgaccaagaacaaggagaggaccagcgagagccggggcctgagccgcctcttcagcagcttcctgaagaggcccaagagccaggtgtctgaggaggagggcaaggaggtggagagtgacaaggagaagggggagggcggccagaaggagattgaatttggcaccagcctggatgaggagatcatcctgaaggcccccatcgccgcccctgagcctgagctgaagacagaccccagcctggacctgcacagcctgagcagcgctgagacccagcctgcccaggaggagctgcgggaggaccctgactttgagatcaaggagggggagggcctggaggagtgcagcaagattgaggtgaaggaggagagcccccagagcaaggccgagacagagctgaaggccagccagaagcccatcaggaagcacaggaacatgcactgcaaggtgtccctgctggatgacacagtgtatgaatgtgtggtggagaagcacgccaagggccaggacctgctgaagagggtgtgtgagcacctgaacctgctggaggaggactacttcggcctggccatctgggacaatgccaccagcaagacctggctggacagcgccaaggagatcaagaagcaggtgcggggcgtgccctggaacttcaccttcaacgtgaagttctaccccccagaccctgcccagctgacagaggacatcacccgctactacctgtgcctgcagctgcggcaggacatcgtggccggccgcctgccctgcagctttgccaccctggccctgctgggcagctacaccatccagagcgagctgggggactatgaccctgagctgcatggagtggactatgtgtctgacttcaagctggcccccaaccagaccaaggagctggaggagaaggtgatggagctgcacaagagctaccgctccatgaccccagcccaggccgacctggagttcctggagaatgccaagaagctgtccatgtatggagtggacctgcacaaggccaaggacctggagggcgtggacatcatcctgggcgtgtgcagcagcggcctgctggtgtacaaggacaagctgcgcatcaaccgcttcccctggcccaaggtgctgaagatctcctacaagaggagcagcttcttcatcaagatccggcctggagagcaggagcagtatgagagcaccatcggcttcaagctgcccagctaccgggccgccaagaagctgtggaaggtgtgtgtggagcaccacaccttcttccggctgaccagcacagacaccatccccaagagcaagttcctggccctgggcagcaagttccgctacagcggccgcacccaggcccagacccggcaggccagcgccctgattgacaggcctgccccccactttgagaggacagccagcaagagggccagccgcagcctggatggagctgctgctgtggacagcgctgacaggagcccccggcccaccagcgccccagccatcacccagggccaggtggccgagggcggcgtgctggatgccagcgccaagaagacagtggtgcccaaggcccagaaggagaccgtgaaggccgaggtgaagaaggaggatgagcccccagagcaggccgagcctgagcccacagaggcctggaaggtggagaagacccacatcgaggtgacagtgcccaccagcaatggagaccagacccagaagaagcgggagcggctggatggagagaacatctacatccgccacagcaacctgatgctggaggacctggacaagagccaggaggagatcaagaagcaccacgccagcatcagcgagctgaagaagaacttcatggagagcgtgcctgagccccggcccagcgagtgggacaagaggctgagcacccacagccccttccgcaccctgaacatcaatggccagatccccactggagagggcgtgtccaccctgagcacctag

SEQ ID NO: 151391 - DNA, 2595 bp, synthetic construct; identical to SEQ ID NO: 151385
  misc_feature 1..2595: note = Description of Artificial Sequence: Synthetic coding sequence
  source 1..2595: mol_type = other DNA

SEQ ID NO: 151392 - DNA, 1767 bp, synthetic construct
  misc_feature 1..1767: note = Description of Artificial Sequence: Synthetic coding sequence
  source 1..1767: mol_type = other DNA
atgcactgcaaggtgtccctgctggatgacacagtgtatgaatgtgtggtggagaagcacgccaagggccaggacctgctgaagagggtgtgtgagcacctgaacctgctggaggaggactacttcggcctggccatctgggacaatgccaccagcaagacctggctggacagcgccaaggagatcaagaagcaggtgcggggcgtgccctggaacttcaccttcaacgtgaagttctaccccccagaccctgcccagctgacagaggacatcacccgctactacctgtgcctgcagctgcggcaggacatcgtggccggccgcctgccctgcagctttgccaccctggccctgctgggcagctacaccatccagagcgagctgggggactatgaccctgagctgcacggcgtggactatgtgtctgacttcaagctggcccccaaccagaccaaggagctggaggagaaggtgatggagctgcacaagagctaccgctccatgaccccagcccaggccgacctggagttcctggagaatgccaagaagctgtccatgtatggagtggacctgcacaaggccaaggacctggagggcgtggacatcatcctgggcgtgtgcagcagcggcctgctggtgtacaaggacaagctgcgcatcaaccgcttcccctggcccaaggtgctgaagatctcctacaagaggagcagcttcttcatcaagatccggcctggagagcaggagcagtatgagagcaccatcggcttcaagctgcccagctacagagctgccaagaagctgtggaaggtgtgtgtggagcaccacaccttcttccggctgaccagcacagacaccatccccaagagcaagttcctggccctgggcagcaagttccgctacagcggccgcacccaggcccagacccggcaggccagcgccctgattgacaggcctgccccccactttgagaggacagccagcaagagggccagccgcagcctggatggagctgctgctgtggacagcgctgacaggagcccccggcccaccagcgccccagccatcacccagggccaggtggccgagggcggcgtgctggatgccagcgccaagaagacagtggtgcccaaggcccagaaggagaccgtgaaggccgaggtgaagaaggaggatgagcccccagagcaggccgagcctgagcccacagaggcctggaagaagaagcgggagcggctggatggagagaacatctacatccgccacagcaacctgatgctggaggacctggacaagagccaggaggagatcaagaagcaccacgccagcatcagcgagctgaagaagaacttcatggagagcgtgcctgagccccggcccagcgagtgggacaagaggctgagcacccacagccccttccgcaccctgaacatcaatggccagatccccactggagagggcccccccctggtgaagacccagacagtgaccatcagtgacaatgccaatgctgtgaagtctgagatccccaccaaggatgtgcccatcgtgcacacagagaccaagaccatcacctatgaagctgcccagacagtgaagggcggcatcagcgagacccgcatcgagaagagaattgtcatcactggagatgctgacatcgaccatgaccaggtgctggtgcaggccatcaaggaggccaaggagcagcacccagacatgtctgtgaccaaggtggtggtgcaccaggagacagaaattgctgatgaatag

SEQ ID NO: 151393 - DNA, 2115 bp, synthetic construct
  misc_feature 1..2115: note = Description of Artificial Sequence: Synthetic coding sequence
  source 1..2115: mol_type = other DNA
atgaccacagagaagagcctggtgacagaagctgagaacagccagcaccagcagaaggaggagggggaggaggccatcaacagcggccagcaggagccccagcaggaggagagctgccagacagctgctgagggggacaactggtgtgagcagaagctgaaggccagcaatggagacacccccacccatgaggacctgaccaagaacaaggagaggaccagcgagagccggggcctgagccgcctcttcagcagcttcctgaagaggcccaagagccaggtgtctgaggaggagggcaaggaggtggagagtgacaaggagaagggggagggcggccagaaggagattgaatttggcaccagcctggatgaggagatcatcctgaaggcccccatcgccgcccctgagcctgagctgaagacagaccccagcctggacctgcacagcctgagcagcgctgagacccagacctggctggacagcgccaaggagatcaagaagcaggtgcggggcgtgccctggaacttcaccttcaacgtgaagttctaccccccagaccctgcccagctgacagaggacatcacccgctactacctgtgcctgcagctgcggcaggacatcgtggccggccgcctgccctgcagctttgccaccctggccctgctgggcagctacaccatccagagcgagctgggggactatgaccctgagctgcatggagtggactatgtgtctgacttcaagctggcccccaaccagaccaaggagctggaggagaaggtgatggagctgcacaagagctaccgctccatgaccccagcccaggccgacctggagttcctggagaatgccaagaagctgtccatgtatggagtggacctgcacaaggccaaggacctggagggcgtggacatcatcctgggcgtgtgcagcagcggcctgctggtgtacaaggacaagctgcgcatcaaccgcttcccctggcccaaggtgctgaagatctcctacaagaggagcagcttcttcatcaagatccggcctggagagcaggagcagtatgagagcaccatcggcttcaagctgcccagctaccgggccgccaagaagctgtggaaggtgtgtgtggagcaccacaccttcttccggctgaccagcacagacaccatccccaagagcaagttcctggccctgggcagcaagttccgctacagcggccgcacccaggcccagacccggcaggccagcgccctgattgacaggcctgccccccactttgagaggacagccagcaagagggccagccgcagcctggatggagctgctgctgtggacagcgctgacaggagcccccggcccaccagcgccccagccatcacccagggccaggtggccgagggcggcgtgctggatgccagcgccaagaagacagtggtgcccaaggcccagaaggagaccgtgaaggccgaggtgaagaaggaggatgagcccccagagcaggccgagcctgagcccacagaggcctggaaggacctggacaagagccaggaggagatcaagaagcaccacgccagcatcagcgagctgaagaagaacttcatggagagcgtgcctgagccccggcccagcgagtgggacaagaggctgagcacccacagccccttccgcaccctgaacatcaatggccagatccccactggagagggcccccccctggtgaagacccagacagtgaccatcagtgacaatgccaatgctgtgaagtctgagatccccaccaaggatgtgcccatcgtgcacacagagaccaagaccatcacctatgaagctgcccagacagatgacaacagcggggacctggaccccggggtgctgctgacagcccagaccatcaccagcgagacccccagcagcaccaccaccacccagatcaccaagacagtgaagggcggcatcagcgagacccgcatcgagaagagaattgtcatcactggagatgctgacatcgaccatgaccaggtgctggtgcaggccatcaaggaggccaaggagcagcacccagacatgtctgtgaccaaggtggtggtgcaccaggagacagaaattgctgatgaatag

SEQ ID NO: 151394 - DNA, 2304 bp, synthetic construct
  misc_feature 1..2304: note = Description of Artificial Sequence: Synthetic coding sequence
  source 1..2304: mol_type = other DNA
atgaccacagagaagagcctggtgacagaagctgagaacagccagcaccagcagaaggaggagggggaggaggccatcaacagcggccagcaggagccccagcaggaggagagctgccagacagctgctgagggggacaactggtgtgagcagaagctgaaggccagcaatggagacacccccacccatgaggacctgaccaagaacaaggagaggaccagcgagagccggggcctgagccgcctcttcagcagcttcctgaagaggcccaagagccaggtgtctgaggaggagggcaaggaggtggagagtgacaaggagaagggggagggcggccagaaggagattgaatttggcaccagcctggatgaggagatcatcctgaaggcccccatcgccgcccctgagcctgagctgaagacagaccccagcctggacctgcacagcctgagcagcgctgagacccagcctgcccaggaggagctgcgggaggaccctgactttgagatcaaggagggggagggcctggaggagtgcagcaagattgaggtgaaggaggagagcccccagagcaaggccgagacagagctgaaggccagccagaagcccatcaggaagcacaggaacatgcactgcaaggtgtccctgctggatgacacagtgtatgaatgtgtggtggagaagcacgccaagggccaggacctgctgaagagggtgtgtgagcacctgaacctgctggaggaggactacttcggcctggccatctgggacaatgccaccagcaagacctggctggacagcgccaaggagatcaagaagcaggtgcggggcgtgccctggaacttcaccttcaacgtgaagttctaccccccagaccctgcccagctgacagaggacatcacccgctactacctgtgcctgcagctgcggcaggacatcgtggccggccgcctgccctgcagctttgccaccctggccctgctgggcagctacaccatccagagcgagctgggggactatgaccctgagctgcatggagtggactatgtgtctgacttcaagctggcccccaaccagaccaaggagctggaggagaaggtgatggagctgcacaagagctaccgctccatgaccccagcccaggccgacctggagttcctggagaatgccaagaagctgtccatgtatggagtggacctgcacaaggccaaggacctggagggcgtggacatcatcctgggcgtgtgcagcagcggcctgctggtgtacaaggacaagctgcgcatcaaccgcttcccctggcccaaggtgctgaagatctcctacaagaggagcagcttcttcatcaagatccggcctggagagcaggagcagtatgagagcaccatcggcttcaagctgcccagctaccgggccgccaagaagctgtggaaggtgtgtgtggagcaccacaccttcttccggctgaccagcacagacaccatccccaagagcaagttcctggccctgggcagcaagttccgctacagcggccgcacccaggcccagacccggcaggccagcgccctgattgacaggcctgccccccactttgagaggacagccagcaagagggccagccgcagcctggatggagctgctgctgtggacagcgctgacaggagcccccggcccaccagcgccccagccatcacccagggccaggtggccgagggcggcgtgctggatgccagcgccaagaagacagtggtgcccaaggcccagaaggagaccgtgaaggccgaggtgaagaaggaggatgagcccccagagcaggccgagcctgagcccacagaggcctggaaggacctggacaagagccaggaggagatcaagaagcaccacgccagcatcagcgagctgaagaagaacttcatggagagcgtgcctgagccccggcccagcgagtgggacaagaggctgagcacccacagccccttccgcaccctgaacatcaatggccagatccccactggagagggcacagatgacaacagcggggacctggaccccggggtgctgctgacagcccagaccatcaccagcgagacccccagcagcaccaccaccacccagatcaccaagacagtgaagggcggcatcagcgagaccagaattgagaagagaattgtcatcactggagatgctgacatcgaccatgaccaggtgctggtgcaggccatcaaggaggccaaggagcagcacccagacatgtctgtgaccaaggtggtggtgcaccaggagacagaaattgctgatgaatag

SEQ ID NO: 151395 - DNA, 2145 bp, synthetic construct
  misc_feature 1..2145: note = Description of Artificial Sequence: Synthetic coding sequence
  source 1..2145: mol_type = other DNA
atgaccacagagaagagcctggtgacagaagctgagaacagccagcaccagcagaaggaggagggggaggaggccatcaacagcggccagcaggagccccagcaggaggagagctgccagacagctgctgagggggacaactggtgtgagcagaagctgaaggccagcaatggagacacccccacccatgaggacctgaccaagaacaaggagaggaccagcgagagccggggcctgagccgcctcttcagcagcttcctgaagaggcccaagagccaggtgtctgaggaggagggcaaggaggtggagagtgacaaggagaagggggagggcggccagaaggagattgaatttggcaccagcctggatgaggagatcatcctgaaggcccccatcgccgcccctgagcctgagctgaagacagaccccagcctggacctgcacagcctgagcagcgctgagacccagcctgcccaggaggagctgcgggaggaccctgactttgagatcaaggagggggagggcctggaggagtgcagcaagattgaggtgaaggaggagagcccccagagcaaggccgagacagagctgaaggccagccagaagcccatcaggaagcacaggaacatgcactgcaaggtgtccctgctggatgacacagtgtatgaatgtgtggtggagaagcacgccaagggccaggacctgctgaagagggtgtgtgagcacctgaacctgctggaggaggactacttcggcctggccatctgggacaatgccaccagcaagacctggctggacagcgccaaggagatcaagaagcaggtgcggggcgtgccctggaacttcaccttcaacgtgaagttctaccccccagaccctgcccagctgacagaggacatcacccgctactacctgtgcctgcagctgcggcaggacatcgtggccggccgcctgccctgcagctttgccaccctggccctgctgggcagctacaccatccagagcgagctgggggactatgaccctgagctgcatggagtggactatgtgtctgacttcaagctggcccccaaccagaccaaggagctggaggagaaggtgatggagctgcacaagagctaccgctccatgaccccagcccaggccgacctggagttcctggagaatgccaagaagctgtccatgtatggagtggacctgcacaaggccaaggacctggagggcgtggacatcatcctgggcgtgtgcagcagcggcctgctggtgtacaaggacaagctgcgcatcaaccgcttcccctggcccaaggtgctgaagatctcctacaagaggagcagcttcttcatcaagatccggcctggagagcaggagcagtatgagagcaccatcggcttcaagctgcccagctaccgggccgccaagaagctgtggaaggtgtgtgtggagcaccacaccttcttccggctgaccagcacagacaccatccccaagagcaagttcctggccctgggcagcaagttccgctacagcggccgcacccaggcccagacccggcaggccagcgccctgattgacaggcctgccccccactttgagaggacagccagcaagagggccagccgcagcctggatggagctgctgctgtggacagcgctgacaggagcccccggcccaccagcgccccagccatcacccagggccaggtggccgagggcggcgtgctggatgccagcgccaagaagacagtggtgcccaaggcccagaaggagaccgtgaaggccgaggtgaagaaggaggatgagcccccagagcaggccgagcctgagcccacagaggcctggaaggtggagaagacccacatcgaggtgacagtgcccaccagcaatggagaccagacccagaagaagcgggagcggctggatggagagaacatctacatccgccacagcaacctgatgctggaggacctggacaagagccaggaggagatcaagaagcaccacgccagcatcagcgagctgaagaagaacttcatggagagcgtgcctgagccccggcccagcgagtgggacaagaggctgagcacccacagccccttccgcaccctgaacatcaatggccagatccccactggagagggctag

SEQ ID NO: 151396 - DNA, 2061 bp, synthetic construct
  misc_feature 1..2061: note = Description of Artificial Sequence: Synthetic coding sequence
  source 1..2061: mol_type = other DNA
atgggctgcttctgtgctgtgcctgaggagttctactgtgaggtgctgctgctggatgagagcaagctgaccctgaccacccagcagcagggcatcaagaagagcaccaagggctctgtggtgctggaccacgtgttccaccacgtgaacctggtggagattgactacttcggcctgcgctactgtgacaggagccaccagacctactggctggaccctgccaagaccctggccgagcacaaggagctgatcaacacaggccccccctacaccctgtacttcggcatcaagttctatgcagaggacccctgcaagctgaaggaggagatcacccgctaccagttcttcctgcaggtgaagcaggatgtgctgcagggccgcctgccctgccctgtgaacacagctgcccagctgggcgcctatgccatccagagcgagctgggggactatgacccctacaagcacacagctggctacgtgtctgagtacagatttgtgcctgaccagaaggaggagctggaggaggccatcgagcgcatccacaagaccctgatgggccagatccccagcgaggccgagctgaactacctgaggacagccaagagcctggagatgtatggagtggacctgcaccctgtgtatggagagaacaagtctgagtacttcctgggcctgacccctgtgggcgtggtggtgtacaagaacaagaagcaggtgggcaagtacttctggccccgcatcaccaaggtgcacttcaaggagacccagtttgagctgcgggtgctgggcaaggactgcaatgagaccagcttcttctttgaggcccggagcaagacagcctgcaagcacctgtggaagtgcagcgtggagcaccacaccttcttcaggatgccagaaaatgaaagcaacagcctgagcaggaagctgagcaagtttggcagcatccgctacaagcaccgctacagcggccgcacagccctgcagatgagccgggacctgagcatccagctgcccaggccagaccagaatgtgaccaggagccgcagcaagacctaccccaagagaattgcccagacccagcctgctgagagcaacagcatcagccgcatcacagccaacatggagaatggagaaaatgaaggcaccatcaagatcatcgcccccagccctgtgaagagcttcaagaaggccaagaatgaaaacagcccagacacccagaggagcaagagccacgccccctgggaggagaatggcccccagagcggcctgtacaacagccccagcgacaggaccaagagccccaagttcccctacaccaggagaagaaaccccagctgtggcagtgacaatgacagcgtgcagcctgtgagaagaaggaaggcccacaacagcggggaggacagcgacctgaagcagaggcggcgcagccgcagccgctgcaacaccagcagcggcagcgagagcgagaacagcaaccgggagtacaggaagaagaggaaccgcatccggcaggagaatgacatggtggacagcgccccccagtgggaggccgtgctgcggcggcagaaggagaagaaccaggccgaccccaacaacagaagaagccgccacaggagccgcagccgcagcccagacatccaggccaaggaggagctgtggaagcacatccagaaggagctggtggaccccagcggcctgtctgaggagcagctgaaggagatcccctacaccaagattgagacccagggcgaccccatccgcatccgccacagccacagccccaggagctaccggcagtacagaagaagccagtgcagtgatggagagaggtctgtgctgtctgaggtgaacagcaagacagacctggtgccccccctgcctgtgaccaggagcagtgatgcccagggcagcggagatgccaccgtgcaccagaggagaaatggcagcaaggacagcctgatggaggagaagccccagaccagcaccaacaacctggccggcaagcacacagccaagaccatcaagaccatccaggccagccggctgaagacagagacctag

SEQ ID NO: 151397 - DNA, 1836 bp, synthetic construct
  misc_feature 1..1836: note = Description of Artificial Sequence: Synthetic coding sequence
  source 1..1836: mol_type = other DNA
atggacttcaagaagagcaagctgaccctggtggtggtggaggatgatgaccagggccgggagcaggagcacacctttgtgttccggctggacagcgcccggacctgcaagcacctgtggaagtgtgctgtggagcaccacgccttcttccggctgcggaccccaggcaacagcaagagcaacagaagtgacttcatccggctgggcagccgcttccgcttcagcggccgcacagagtaccaggccacccacggcagccggctgcggaggaccagcacctttgagaggaagcccagcaagcgctaccccagcagaagacacagcaccttcaaggccagcaaccctgtgattgctgcccagctgtgcagcaagaccaaccctgaggtgcacaactaccagccccagtaccaccccaacatccaccccagccagccccgctggcacccccacagccccaacgtgtcctaccccctgcccagccctgtgctgagcagcagtgaccggctgccctttggaattgaagaaaatggaggcacccccttcctgacagctgccagcggccgccaccaccaccagcaccagcaccagcaccagcaccagcaccacagcaactacagcctgagcctgaccctggagaacaaggagggccccctgcggagccccaacagcagcagcaagagcctgaccaagctgagccctggcaccccagccctcttcagcgaggccgccgcccacctgaagaagctggagctggagaccgtgaaggctgctggcccctggccacccctgcacatcaacatcaacaaggccgaggagaagaaggtgtctgagaagaccctgcagacccccctgctgcccagccctgtggccgaccacgtgaagtgcaacatcctgaaggcccagctggagaatgccagccgggtgaacatccagggcggcaaggaggagagcccctttgtgaacatcaacaagaagagcagcctgcaggatgcctctgtgcgcagccccatccccatccgggtggagacagcccagcctgctgtggagaagccagagatcaagccaccccgggtgaggaagctgacccggcagtacagctttgatgaagatgacctgcccccagacctggccgaggccgtgggcgtgaccaccagcaccaccaccaacaccaccacagctgccacccaggtgtctgtgcccctgcccagccccaaggtgcagaatgtgagcagcccccacaagtctgagggcaagggcctgctgagccctggggccaagagccccagcgaccggggcggggccttcaccctggagcccggggacctgctgatggacttcacagaggccacccccctggccgagcccgccagcaacccccactgtgcccacagccgctgcagcccccccctgagcctgcccatgaaggaggagaccactggagtgtgcatgtacccacccatcaagaccaggctcatcaagaccttccctgtggacaccatgaaccccttcccagacaccttcaccaccggcccccagttcaccgctgacttccgggacagcaagctgcagtgctgccccggccccaccagccccctcatcccagctgccaccctgcggcccctgacagagaccgtgcacagcgctgaccacctgcaccaccctgagacctgcttcagcggcagccagtgccgggacaccccagctggcaccggggagcgggaggatgatgagaagacagtggatgacagaacagtgaagttcagcccctgccacctggaggatggcatggtgcccagcgtgcggctgctgagcagcggctttgtgtgcagcctgtag

SEQ ID NO: 151398 - DNA, 1323 bp, synthetic construct
  misc_feature 1..1323: note = Description of Artificial Sequence: Synthetic coding sequence
  source 1..1323: mol_type = other DNA
atgaagttcctgctgatcaaggatgcccctgggaagaagaagaggaagaacctgatgctgtccttcaagaggaagcacgccaagggccaggacctgtttgaccagatcgtgtaccacctggacctggtggagacagactacttcggcctgcagttcctggacagcgcccaggtggcccactggctggaccacgccaagcccatcaagaagcagatgaagattggccctgcctatgccctgcacttccgggtgaagtactacagcagcgagcccaacaacctgcgggaggagttcacccgctacctgtttgtgctgcagctgcggcatgacatcctgagcggcaagctgaagtgcccctatgaaacagctgtggagctggccgccctgtgcctgcaggccgagctgggagaatgtgagctgcctgagcacaccccagagctggtgtctgagttccgcttcatccccaaccagacagaggccatggagtttgacatcttccagcgctggaaggaatgtcggggcaagagccctgcccaggccgagctgagctacctgaacaaggccaagtggctggagatgtatggagtggacatgcacgtggtgcggggcagagatggctgtgagtacagcctgggcctgacccccaccggcatcctgatctttgaaggagccaacaagattggcctcttcttctggcccaagatcaccaagatggacttcaagaagagcaagctgaccctggtggtggtggaggatgatgaccagggccgggagcaggagcacacctttgtgttccggctggacagcgcccggacctgcaagcacctgtggaagtgtgctgtggagcaccacgccttcttccggctgcggaccccaggcaacagcaagagcaacagaagtgacttcatccggctgggcagccgcttccgcttcagcggccgcacagagtaccaggccacccacggcagccggctgcggaggaccagcacctttgagaggaagcccagcaagcgctaccccagccgccgccacagcaccttcaaggccagcaaccctgtgattgctgcccagctgtgcagcaagaccaaccctgaggtgcacaactaccagccccagtaccaccccaacatccaccccagccagccccgctggcacccccacagccccaacgtgcggcccagcttccaggatgacaggagccactggaaggccagcgccagcggagatgacagccactttgattatgtgcatgaccagaaccagaagaacctgggcggcatgcagagcatgatgtacagagacaagctgatgacagccctgtag

SEQ ID NO: 151399 - DNA, 1557 bp, synthetic construct
  misc_feature 1..1557: note = Description of Artificial Sequence: Synthetic coding sequence
  source 1..1557: mol_type = other DNA
atgctgcgcttcctgcggaggacctttggaagaagatccatgcagagatatgcccggggagctgctggccgcggggctgctggcctgggagatgaaagagatggcggcccccggggcggccctgctgctgctgccagcagcagcgccctgcctgctgcccctgggggctctgtgtttcctgctgggggcggccccctgctgaccggcggcgctgctgtgcacatctctgctgctggggccgccaaggccaccctgtactgcagggtcttcctgctggatggaacagaggtgtctgtggacctgcccaagcacgccaagggccaggacctgtttgaccagatcgtgtaccacctggacctggtggagacagactacttcggcctgcagttcctggacagcgcccaggtggcccactggctggaccacgccaagcccatcaagaagcagatgaagattggccctgcctatgccctgcacttccgggtgaagtactacagcagcgagcccaacaacctgcgggaggagttcacccgctacctgtttgtgctgcagctgcggcatgacatcctgagcggcaagctgaagtgcccctatgaaacagctgtggagctggccgccctgtgcctgcaggccgagctgggagaatgtgagctgcctgagcacaccccagagctggtgtctgagttccgcttcatccccaaccagacagaggccatggagtttgacatcttccagcgctggaaggaatgtcggggcaagagccctgcccaggccgagctgagctacctgaacaaggccaagtggctggagatgtatggagtggacatgcacgtggtgcggggcagagatggctgtgagtacagcctgggcctgacccccaccggcatcctgatctttgaaggagccaacaagattggcctcttcttctggcccaagatcaccaagatggacttcaagaagagcaagctgaccctggtggtggtggaggatgatgaccagggccgggagcaggagcacacctttgtgttccggctggacagcgcccggacctgcaagcacctgtggaagtgtgctgtggagcaccacgccttcttccggctgcggaccccaggcaacagcaagagcaacagaagtgacttcatccggctgggcagccgcttccgcttcagcggccgcacagagtaccaggccacccacggcagccggctgcggaggaccagcacctttgagaggaagcccagcaagcgctaccccagccgccgccacagcaccttcaaggccagcaaccctgtgattgctgcccagctgtgcagcaagaccaaccctgaggtgcacaactaccagccccagtaccaccccaacatccaccccagccagccccgctggcacccccacagccccaacgtgcggcccagcttccaggatgacaggagccactggaaggccagcgccagcggagatgacagccactttgattatgtgcatgaccagaaccagaagaacctgggcggcatgcagagcatgatgtacagagacaagctgatgacagccctgtag

SEQ ID NO: 151400 - DNA, 2703 bp, synthetic construct
  misc_feature 1..2703: note = Description of Artificial Sequence: Synthetic coding sequence
  source 1..2703: mol_type = other DNA
atgctgcgcttcctgcggaggacctttggaagaagatccatgcagagatatgcccggggagctgctggccgcggggctgctggcctgggagatgaaagagatggcggcccccggggcggccctgctgctgctgccagcagcagcgccctgcctgctgcccctgggggctctgtgtttcctgctgggggcggccccctgctgaccggcggcgctgctgtgcacatctctgctgctggggccgccaaggccaccctgtactgcagggtcttcctgctggatggaacagaggtgtctgtggacctgcccaagcacgccaagggccaggacctgtttgaccagatcgtgtaccacctggacctggtggagacagactacttcggcctgcagttcctggacagcgcccaggtggcccactggctggaccacgccaagcccatcaagaagcagatgaagattggccctgcctatgccctgcacttccgggtgaagtactacagcagcgagcccaacaacctgcgggaggagttcacccgctacctgtttgtgctgcagctgcggcatgacatcctgagcggcaagctgaagtgcccctatgaaacagctgtggagctggccgccctgtgcctgcaggccgagctgggagaatgtgagctgcctgagcacaccccagagctggtgtctgagttccgcttcatccccaaccagacagaggccatggagtttgacatcttccagcgctggaaggaatgtcggggcaagagccctgcccaggccgagctgagctacctgaacaaggccaagtggctggagatgtatggagtggacatgcacgtggtgcggggcagagatggctgtgagtacagcctgggcctgacccccaccggcatcctgatctttgaaggagccaacaagattggcctcttcttctggcccaagatcaccaagatggacttcaagaagagcaagctgaccctggtggtggtggaggatgatgaccagggccgggagcaggagcacacctttgtgttccggctggacagcgcccggacctgcaagcacctgtggaagtgtgctgtggagcaccacgccttcttccggctgcggaccccaggcaacagcaagagcaacagaagtgacttcatccggctgggcagccgcttccgcttcagcggccgcacagagtaccaggccacccacggcagccggctgcggaggaccagcacctttgagaggaagcccagcaagcgctaccccagccgccgccacagcaccttcaaggccagcaaccctgtgattgctgcccagctgtgcagcaagaccaaccctgaggtgcacaactaccagccccagtaccaccccaacatccaccccagccagccccgctggcacccccacagccccaacgtgtcctaccccctgcccagccctgtgctgagcagcagtgaccggctgcccttcggcatcgaggagaatggaggcacccccttcctgacagctgccagcggccgccaccaccaccagcaccagcaccagcaccagcaccagcaccacagcaactacagcctgagcctgaccctggagaacaaggagggccccctgcggagccccaacagcagcagcaagagcctgaccaagctgagccctggcaccccagccctcttcagcgaggccgccgcccacctgaagaagctggagctggagaccgtgaaggccgccggcccctggccacccctgcacatcaacatcaacaaggccgaggagaagaaggtgtctgagaagaccctgcagacccccctgctgcccagccctgtggccgaccacgtgaagtgcaacatcctgaaggcccagctggagaatgccagccgggtgaacatccagggcggcaaggaggagagcccctttgtgaacatcaacaagaagagcagcctgcaggatgcctctgtgcgcagccccatccccatccgggtggagacagcccagcctgctgtggagaagccagagatcaagccaccccgggtgaggaagctgacccggcagtacagctttgatgaagatgacctgcccccagacctggccgaggccgtgggcgtgaccaccagcaccaccaccaacaccaccacagctgccacccaggtgtctgtgcccctgcccagccccaaggtgcagaatgtgagcagcccccacaagtctgagggcaagggcctgctgagccctggggccaagagccccagcgacagaggaggagccttcaccctggagcccggggacctgctgatggacttcacagaggccacccccctggccgagcccgccagcaacccccactgtgcccacagccgctgcagcccccccctgagcctgcccatgaaggaggagaccaccggggtgtgcatgtacccacccatcaagaccaggctcatcaagaccttccctgtggacaccatgaaccccttcccagacaccttcaccaccggcccccagttcaccgctgacttccgggacagcaagctgcagtgctgccccggccccaccagccccctcatcccagctgccaccctgcggcccctgacagaaacagtgtccacagtgcagaccatctacaccaccaggaagcctgtgtccctggccgccagcgctgagaccctgcggcaggagctggagcgggagaagatgatgaagaggctgctgatgacagagctgtag

SEQ ID NO: 151401 - DNA, 2202 bp, synthetic construct
  misc_feature 1..2202: note = Description of Artificial Sequence: Synthetic coding sequence
  source 1..2202: mol_type = other DNA
atgctgtccttcttccggaggaccctgggcagaagatccatgaggaagcacgccgagaaggagcggctgcgggaggcccagagagctgccacccacatcccagctgctggggacagcaagagcatcatcacctgccgggtgtccctgctggatggaacagatgtgtctgtggacctgcccaagaaggccaagggccaggagctgtttgaccagatcatgtaccacctggacctgattgaaagtgactacttcggcctgcgcttcatggattctgcccaggtggcccactggctggatggcaccaagagcatcaagaagcaggtgaagattggcagcccctactgcctgcacctgcgggtgaagttctacagcagcgagcccaacaacctgcgggaggagctgacccgctacctgtttgtgctgcagctgaagcaggacatcctgagcggcaagctggactgcccctttgacacagctgtgcagctggccgcctacaacctgcaggccgagctgggggactatgacctggccgagcacagccctgagctggtgtctgagttccgctttgtgcccatccagacagaggagatggagctggccatctttgagaagtggaaggagtaccggggccagaccccagcccaggccgagaccaactacctgaacaaggccaagtggctggagatgtatggagtggacatgcacgtggtgaaggccagagatggaaatgactacagcctgggcctgacccccaccggggtgctggtgtttgaaggagacaccaagattggcctcttcttctggcccaagatcacccggctggacttcaagaagaacaagctgaccctggtggtggtggaggatgatgaccagggcaaggagcaggagcacacctttgtgttccggctggaccaccccaaggcctgcaagcacctgtggaagtgtgctgtggagcaccacgccttcttccggctgcggggccctgtgcagaagagcagccacaggagcggcttcatccggctgggcagccgcttccgctacagcggcaagacagagtaccagaccaccaagaccaacaaggcccggcgcagcaccagctttgaaagaagacccagcaagcgctacagcaggaggaccctgcagatgaaggcctgtgccaccaagccagaggagctgtctgtgcacaacaacgtgtccacccagagcaatggcagccagcaggcctggggcatgaggtctgccctgcctgtgagccccagcatcagcagcgcccctgtgcctgtggagattgagaacctgccccagagccctggaacagaccagcacgacaggaagtgcatccccctgaacatcgacctgctgaacagcccagacctgctggaggccaccatcggagatgtgattggagccagtgacaccatggagaccagccaggccctgaatgatgtgaatgtggccacccggctgcccggcctgggggagcctgaggtggagtatgagaccctgaaggacaccagcgagaagctgaagcagctggagatggagaacagccccctgctgagccccaggagcaacattgatgtgaacatcaacagccaggaggaggtggtgaagctgacagagaagtgcctgaacaacgtcatcgagagccctggcctgaatgtgatgagggtgcccccagacttcaagagcaacatcctgaaggcccaggtggaggccgtgcacaaggtgaccaaggaggacagcctgctgagccacaagaatgccaacgtgcaggatgctgccaccaacagcgctgtgctgaatgaaaataatgtgcccctgcccaaggagagcctggagaccctgatgctgatcaccccagctgacagcggctctgtgctgaaggaggccacagatgagctggatgccctgctggccagcctgacagagaacctgattgaccacacagtggccccccaggtgagcagcacctccatgatcaccccccgctggatcgtgccccagagcggggccatgagcaatggcctggccggctgtgagatgctgctgaccgggaaggagggccacggcaacaaggatggcatcagcctcatcagccccccagcccccttcctggtggatgctgtgaccagcagcggccccatcctggccgaggaggccgtgctgaagcagaagtgcctgctgaccacagagctgtag

SEQ ID NO: 151402 - DNA, 1518 bp, synthetic construct
  misc_feature 1..1518: note = Description of Artificial Sequence: Synthetic coding sequence
  source 1..1518: mol_type = other DNA
atgctgtccttcttccggaggaccctgggcagaagatccatgaggaagcacgccgagaaggagcggctgcgggaggcccagagagctgccacccacatcccagctgctggggacagcaagagcatcatcacctgccgggtgtccctgctggatggaacagatgtgtctgtggacctgcccaagaaggccaagggccaggagctgtttgaccagatcatgtaccacctggacctgattgaaagtgactacttcggcctgcgcttcatggattctgcccaggtggcccactggctggatggcaccaagagcatcaagaagcaggtgaagattggcagcccctactgcctgcacctgcgggtgaagttctacagcagcgagcccaacaacctgcgggaggagctgacccgctacctgtttgtgctgcagctgaagcaggacatcctgagcggcaagctggactgcccctttgacacagctgtgcagctggccgcctacaacctgcaggccgagctgggggactatgacctggccgagcacagccctgagctggtgtctgagttccgctttgtgcccatccagacagaggagatggagctggccatctttgagaagtggaaggagtaccggggccagaccccagcccaggccgagaccaactacctgaacaaggccaagtggctggagatgtatggagtggacatgcacgtggtgaaggccagagatggaaatgactacagcctgggcctgacccccaccggggtgctggtgtttgaaggagacaccaagattggcctcttcttctggcccaagatcacccggctggacttcaagaagaacaagctgaccctggtggtggtggaggatgatgaccagggcaaggagcaggagcacacctttgtgttccggctggaccaccccaaggcctgcaagcacctgtggaagtgtgctgtggagcaccacgccttcttccggctgcggggccctgtgcagaagagcagccacaggagcggcttcatccggctgggcagccgcttccgctacagcggcaagacagagtaccagaccaccaagaccaacaaggcccggcgcagcaccagctttgaaagaagacccagcaagcgctacagcaggaggaccctgcagatgaaggcctgtgccaccaagccagaggagctgtctgtgcacaacaacgtgtccacccagagcaatggcagccagcaggcctggggcatgaggtctgccctgcctgtgagccccagcatcagcagcgcccctgtgcctgtggagattgagaacctgccccagagccctggaacagaccagcacgacaggaagtggctgtctgctgccagtgactgctgccagagaggaggcaaccagtggaacacccgggccctgcccccaccccagacagcccacaggaactacacagactttgtgcatgagcacaacgtgaagaatgccggcatcagacatgatgtgcacttccctggccacacagccatgacagagatctag

SEQ ID NO: 151403 - DNA, 1518 bp, synthetic construct; identical to SEQ ID NO: 151402
  misc_feature 1..1518: note = Description of Artificial Sequence: Synthetic coding sequence
  source 1..1518: mol_type = other DNA

SEQ ID NO: 151404 - DNA, 2064 bp, synthetic construct
  misc_feature 1..2064: note = Description of Artificial Sequence: Synthetic coding sequence
  source 1..2064: mol_type = other DNA
atgctgtccttcttccggaggaccctgggcagaagatccatgaggaagcacgccgagaaggagcggctgcgggaggcccagagagctgccacccacatcccagctgctggggacagcaagagcatcatcacctgccgggtgtccctgctggatggaacagatgtgtctgtggacctgcccaagaaggccaagggccaggagctgtttgaccagatcatgtaccacctggacctgattgaaagtgactacttcggcctgcgcttcatggattctgcccaggtggcccactggctggatggcaccaagagcatcaagaagcaggtgaagattggcagcccctactgcctgcacctgcgggtgaagttctacagcagcgagcccaacaacctgcgggaggagctgacccgctacctgtttgtgctgcagctgaagcaggacatcctgagcggcaagctggactgcccctttgacacagctgtgcagctggccgcctacaacctgcaggccgagctgggggactatgacctggccgagcacagccctgagctggtgtctgagttccgctttgtgcccatccagacagaggagatggagctggccatctttgagaagtggaaggagtaccggggccagaccccagcccaggccgagaccaactacctgaacaaggccaagtggctggagatgtatggagtggacatgcacgtggtgaaggccagagatggaaatgactacagcctgggcctgacccccaccggggtgctggtgtttgaaggagacaccaagattggcctcttcttctggcccaagatcacccggctggacttcaagaagaacaagctgaccctggtggtggtggaggatgatgaccagggcaaggagcaggagcacacctttgtgttccggctggaccaccccaaggcctgcaagcacctgtggaagtgtgctgtggagcaccacgccttcttccggctgcggggccctgtgcagaagagcagccacaggagcggcttcatccggctgggcagccgcttccgctacagcggcaagacagagtaccagaccaccaagaccaacaaggcccggcgcagcaccagctttgaaagaagacccagcaagcgctacagcaggaggaccctgcagatgaaggcctgtgccaccaagccagaggagctgtctgtgcacaacaacgtgtccacccagagcaatggcagccagcaggcctggggcatgaggtctgccctgcctgtgagccccagcatcagcagcgcccctgtgcctgtggagattgagaacctgccccagagccctggaacagaccagcacgacaggaagtgcatccccctgaacatcgacctgctgaacagcccagacctgctggaggccaccatcggagatgtgattggagccagtgacaccatggagaccagccaggccctgaatgatgtgaatgtggccacccggctgcccggcctgggggagcctgaggtggagtatgagaccctgaaggacaccagcgagaagctgaagcagctggagatggagaacagccccctgctgagccccaggagcaacattgatgtgaacatcaacagccaggaggaggtggtgaagctgacagagaagtgcctgaacaacgtcatcgagagccctggcctgaatgtgatgagggtgcccccagacttcaagagcaacatcctgaaggcccaggtggaggccgtgcacaaggtgaccaaggaggacagcctgctgagccacaagaatgccaacgtgcaggatgctgccaccaacagcgctgtgctgaatgaaaataatgtgcccctgcccaaggagagcctggagaccctgatgctgatcaccccagctgacagcggctctgtgctgaaggaggccacagatgagctggatgccctgctggccagcctgacagagaacctgattgaccacacagtggccccccaggtgagcagcacctccatgatcaccccccgctggatcgtgcccctgtggagccactttggaagaagaagctgcccagaggccgaggtgttcacagaccactag

SEQ ID NO: 151405 - DNA, 2199 bp, synthetic construct
  misc_feature 1..2199: note = Description of Artificial Sequence: Synthetic coding sequence
  source 1..2199: mol_type = other DNA
atgctgtccttcttccggaggaccctgggcagaagatccatgaggaagcacgccgagaaggagcggctgcgggaggcccagagagctgccacccacatcccagctgctggggacagcaagagcatcatcacctgccgggtgtccctgctggatggaacagatgtgtctgtggacctgcccaagaaggccaagggccaggagctgtttgaccagatcatgtaccacctggacctgattgaaagtgactacttcggcctgcgcttcatggattctgcccaggtggcccactggctggatggcaccaagagcatcaagaagcaggtgaagattggcagcccctactgcctgcacctgcgggtgaagttctacagcagcgagcccaacaacctgcgggaggagctgacccgctacctgtttgtgctgcagctgaagcaggacatcctgagcggcaagctggactgcccctttgacacagctgtgcagctggccgcctacaacctgcaggccgagctgggggactatgacctggccgagcacagccctgagctggtgtctgagttccgctttgtgcccatccagacagaggagatggagctggccatctttgagaagtggaaggagtaccggggccagaccccagcccaggccgagaccaactacctgaacaaggccaagtggctggagatgtatggagtggacatgcacgtggtgaaggccagagatggaaatgactacagcctgggcctgacccccaccggggtgctggtgtttgaaggagacaccaagattggcctcttcttctggcccaagatcacccggctggacttcaagaagaacaagctgaccctggtggtggtggaggatgatgaccagggcaaggagcaggagcacacctttgtgttccggctggaccaccccaaggcctgcaagcacctgtggaagtgtgctgtggagcaccacgccttcttccggctgcggggccctgtgcagaagagcagccacaggagcggcttcatccggctgggcagccgcttccgctacagcggcaagacagagtaccagaccaccaagaccaacaaggcccggcgcagcaccagctttgaaagaagacccagcaagcgctacagcaggaggaccctgcagatgaaggcctgtgccaccaagccagaggagctgtctgtgcacaacaacgtgtccacccagagcaatggcagccagcaggcctggggcatgaggtctgccctgcctgtgagccccagcatcagcagcgcccctgtgcctgtggagattgagaacctgccccagagccctggaacagaccagcacgacaggaagtgcatccccctgaacatcgacctgctgaacagcccagacctgctggaggccaccatcggagatgtgattggagccagtgacaccatggagaccagccaggccctgaatgatgtgaatgtggccacccggctgcccggcctgggggagcctgaggtggagtatgagaccctgaaggacaccagcgagaagctgaagcagctggagatggagaacagccccctgctgagccccaggagcaacattgatgtgaacatcaacagccaggaggaggtggtgaagctgacagagaagtgcctgaacaacgtcatcgagagccctggcctgaatgtgatgagggtgcccccagacttcaagagcaacatcctgaaggcccaggtggaggccgtgcacaaggtgaccaaggaggacagcctgctgagccacaagaatgccaacgtgcaggatgctgccaccaacagcgctgtgctgaatgaaaataatgtgcccctgcccaaggagagcctggagaccctgatgctgatcaccccagctgacagcggctctgtgctgaaggaggccacagatgagctggatgccctgctggccagcctgacagagaacctgattgaccacacagtggccccccaggtgagcagcacctccatgatcaccccccgctggatcgtgcccagcggggccatgagcaatggcctggccggctgtgagatgctgctgaccgggaaggagggccacggcaacaaggatggcatcagcctcatcagccccccagcccccttcctggtggatgctgtgaccagcagcggccccatcctggccgaggaggccgtgctgaagcagaagtgcctgctgaccacagagctgtag

SEQ ID NO: 151406 - DNA, 2340 bp, synthetic construct
  misc_feature 1..2340: note = Description of Artificial Sequence: Synthetic coding sequence
  source 1..2340: mol_type = other DNA
atggaggagaaggactacagcgaggctgatggcctgtctgagaggaccacccccagcaaggcccagaagagcccccagaagatcgccaagaagtacaagagcgccatctgccgggtgaccctgctggatgcctctgaatatgaatgtgaggtggagaagcacggccggggccaggtgctgtttgacctggtgtgtgagcacctgaacctgctggagaaggactacttcggcctgaccttctgtgatgctgacagccagaagaactggctggaccccagcaaggagatcaagaagcagatccgcagcagcccctggaactttgccttcaccgtgaagttctaccccccagaccctgcccagctgacagaggacatcacccgctactacctgtgcctgcagctgcgggctgacatcatcaccggccgcctgccctgcagctttgtgacccacgccctgctgggcagctatgctgtgcaggccgagctgggggactatgatgctgaggagcacgtgggcaactacgtgtctgagctgcgctttgcccccaaccagacccgggagctggaggagcgcatcatggagctgcacaagacctaccggggcatgaccccaggagaggccgagatccacttcctggagaatgccaagaagctgtccatgtatggagtggacctgcaccacgccaaggacagcgagggcatcgacatcatgctgggcgtgtgtgccaacggcctgctgatctacagagaccggctgcgcatcaacagatttgcctggcccaagatcctgaagatctcctacaagaggagcaacttctacatcaagatccggcctggagaatatgagcagtttgagagcaccatcggcttcaagctgcccaaccacaggtctgccaagaggctgtggaaggtgtgcatcgagcaccacaccttcttccggctggtgtccccagagcccccacccaagggcttcctggtgatgggcagcaagttccgctacagcggccgcacccaggcccagacccggcaggccagcgccctgattgacaggcctgcccccttctttgagaggagcagcagcaagcgctacaccatgagccgcagcctggatggagctgagttcagcaggcctgcctctgtgtctgagaaccatgatgctggcccagatggagacaagagagatgaagatggagagagcggcggccagaggtctgaggccgaggagggggaggtgaggacccccaccaagatcaaggagctgaagttcctggacaagccagaagatgtgctgctgaagcaccaggccagcatcaatgagctgaagaggaccctgaaggagcccaacagcaagctgatccaccgggaccgggactgggagcgggagcggcggctgcccagcagccctgccagccccagccccaagggcaccccagagaaggccaatgaaagagctggcctgcgggagggcagcgaggagaaggtgaagccaccccggccccgggcccctgagagtgacacaggagatgaggaccaggaccaggagcgggacacagtgttcctgaaggacaaccacctggccattgaaaggaagtgcagcagcatcaccgtgagcagcaccagcagcctggaggccgaggtggacttcaccgtgattggagactaccacggcagcgcctttgaggacttcagccgcagcctgcctgagctggaccgggacaagagtgacagcgacacagagggcctgctcttcagccgggacctgaacaagggggcccccagccaggatgatgagagcggcggcatcgaggacagcccagacagaggagcctgcagcaccccagacatgccccagtttgagcctgtgaagacagagaccatgacagtgagcagcctggccatcaggaagaagattgagcctgaggccgtgctgcagaccagggtgtctgccatggacaacacccaggagaacagcctgaagagcgggaaaggagctgctgccatgatccctggcccccagacagtggccacagagatccgcagcctgagccccatcatcggcaaggatgtgctgaccagcacctacggggccacagctgagaccctgagcaccagcaccaccacccacgtgaccaagacagtgaagggcggcttcagcgagacccgcatcgagaagaggatcatcatcactggagatgaagatgtggaccaggaccaggccctggccctggccatcaaggaggccaagctgcagcacccagacatgctggtgaccaaggctgtggtgtaccgggagacagaccccagccctgaggagcgggacaagaagccccaggagagctag

SEQ ID NO: 151407 - DNA, 2646 bp, synthetic construct
  misc_feature 1..2646: note = Description of Artificial Sequence: Synthetic coding sequence
  source 1..2646: mol_type = other DNA
atgaccacagaaacaggcccagattctgaggtgaagaaggcccaggaggaggccccccagcagcctgaggccgctgctgctgtgaccacccctgtgaccccagctggccacggccaccctgaggccaacagcaatgagaagcaccccagccagcaggacaccaggcctgctgagcagagcctggacatggaggagaaggactacagcgaggctgatggcctgtctgagaggaccacccccagcaaggcccagaagagcccccagaagatcgccaagaagtacaagagcgccatctgccgggtgaccctgctggatgcctctgaatatgaatgtgaggtggagaagcacggccggggccaggtgctgtttgacctggtgtgtgagcacctgaacctgctggagaaggactacttcggcctgaccttctgtgatgctgacagccagaagaactggctggaccccagcaaggagatcaagaagcagatccgcagcagcccctggaactttgccttcaccgtgaagttctaccccccagaccctgcccagctgacagaggacatcacccgctactacctgtgcctgcagctgcgggctgacatcatcaccggccgcctgccctgcagctttgtgacccacgccctgctgggcagctatgctgtgcaggccgagctgggggactatgatgctgaggagcacgtgggcaactacgtgtctgagctgcgctttgcccccaaccagacccgggagctggaggagcgcatcatggagctgcacaagacctaccggggcatgaccccaggagaggccgagatccacttcctggagaatgccaagaagctgtccatgtatggagtggacctgcaccacgccaaggacagcgagggcatcgacatcatgctgggcgtgtgtgccaacggcctgctgatctacagagaccggctgcgcatcaacagatttgcctggcccaagatcctgaagatctcctacaagaggagcaacttctacatcaagatccggcctggagaatatgagcagtttgagagcaccatcggcttcaagctgcccaaccacaggtctgccaagaggctgtggaaggtgtgcatcgagcaccacaccttcttccggctggtgtccccagagcccccacccaagggcttcctggtgatgggcagcaagttccgctacagcggccgcacccaggcccagacccggcaggccagcgccctgattgacaggcctgcccccttctttgagaggagcagcagcaagcgctacaccatgagccgcagcctggatggagctgagttcagcaggcctgcctctgtgtctgagaaccatgatgctggcccagatggagacaagagagatgaagatggagagagcggcggccagaggtctgaggccgaggagggggaggtgaggacccccaccaagatcaaggagctgaagccagagcaggagaccacccccaggcacaagcaggagttcctggacaagccagaagatgtgctgctgaagcaccaggccagcatcaatgagctgaagaggaccctgaaggagcccaacagcaagctgatccaccgggaccgggactgggagcgggagcggcggctgcccagcagccctgccagccccagccccaagggcaccccagagaaggccaatgaaagagctggcctgcgggagggcagcgaggagaaggtgaagccaccccggccccgggcccctgagagtgacacaggagatgaggaccaggaccaggagcgggacacagtgttcctgaaggacaaccacctggccattgaaaggaagtgcagcagcatcaccgtgagcagcaccagcagcctggaggccgaggtggacttcaccgtgattggagactaccacggcagcgcctttgaggacttcagccgcagcctgcctgagctggaccgggacaagagtgacagcgacacagagggcctgctcttcagccgggacctgaacaagggggcccccagccaggatgatgagagcggcggcatcgaggacagcccagacagaggagcctgcagcaccccagacatgccccagtttgagcctgtgaagacagagaccatgacagtgagcagcctggccatcaggaagaagattgagcctgaggccgtgctgcagaccagggtgtctgccatggacaacacccagcaggtggatggcagcgcctctgtgggccgggagttcatcgccaccacccccagcatcaccacagagaccatcagcaccaccatggagaacagcctgaagagcgggaaaggagctgctgccatgatccctggcccccagacagtggccacagagatccgcagcctgagccccatcatcggcaaggatgtgctgaccagcacctacggggccacagctgagaccctgagcaccagcaccaccacccacgtgaccaagacagtgaagggcggcttcagcgagacccgcatcgagaagaggatcatcatcactggagatgaagatgtggaccaggaccaggccctggccctggccatcaaggaggccaagctgcagcacccagacatgctggtgaccaaggctgtggtgtaccgggagacagaccccagccctgaggagcgggacaagaagccccaggagagctag

SEQ ID NO: 151408 - DNA, 2877 bp, synthetic construct
  misc_feature 1..2877: note = Description of Artificial Sequence: Synthetic coding sequence
  source 1..2877: mol_type = other DNA
atgagccgcagcctggatggagctgagttcagcaggcctgcctctgtgtctgagaaccatgatgctggcccagatggagacaagagagatgaagatggagagagcggcggccagaggtctgaggccgaggagggggaggtgaggacccccaccaagatcaaggagctgaagccagagcaggagaccacccccaggcacaagcaggagttcctggacaagccagaagatgtgctgctgaagcaccaggccagcatcaatgagctgaagaggaccctgaaggagcccaacagcaagctgatccaccgggaccgggactgggagcgggagcggcggctgcccagcagccctgccagccccagccccaagggcaccccagagaaggccaatgaaagccagaggacccaggacatcagccagagggacctggtgcctgagcccggggctgctgctggcctggaggtgttcacccagaagagcctggccgccagccctgagggcagcgagcactgggtgttcatcgagcgggagtacaccaggcctgaggagctgggcctgctgaaggtgaccaccatgcagcaggaggagcggcaggccggcctggccggcatcctggccaacggccgcctgagcaaggtggatgtgctggtggacaagttcaaggtggaggtggccacagaggagatggtgggcaacagaagagccaacacccagcagcagggcaagatgattgccagcccagaagattttgaatctgtgggggaggagggcccctggatccgggagagccctggaggagctgccctggccagcggccgcaccctggccgagaagctgctggagggcagcgagctgcgggctgacacccgggaggccaccatccggaaccgctgcatgtctgatggccagcctgagggccagacagagctgaggaagggcctggaggagccccacacctgtggccggcccacagcccctggcaccaggcctgctgaggtggatgtgctgagccctgccagtgacaagggcggcctgcagagcttcctgctggaccctgcccacgccgaggcccgggcagagctgagcaatgaaacagacaccagctttgctgagaggagcttctacctgaactatgaggagaaggacagcgaggaccaggtgctgcccccacccctggaggagaggaagggccgcctggatgcccctcctggaggagagccccggcccaccctgaacagcctggacctgcgggtgtctgctgctgccagcagccgcagcaaggatgaggcccacatgaccagccccaaggagggcgccggcacccccaagaaccacggcggccctggggacctgaagggcagccctgctggccagacctttgctgagggctgggaggatgcccagtggggcgtggagggggagttcccccacctgacagccagcgctgcccgggaggagggcacccctgtgtctggggacctgctgggcaaggccgaggagagccccacagaggagctgaagaagcaccccccccaccggggccagggcgtgcacccagacccccaggcctgtgccctgccccgggccatccccctgaatgtgaggaagcctgtgaagccagaccggggcaacttcccccccaaggagcggggcgtggtgcccacccagaagggcggcgctgagctgaaggaccgggaggccagcgccttcctgcacatggaggtgatcatccccctgcctgccagccctggccacagcgaggacctggccgccctggaggaggccagccccagccccaccagccacggcagcggggagcccagcgagctgcgggagcccttcctgcggcacgtgcacctgagcaaggccagccctgagcccaaggaccaggtgggctttgtggtgtccccagccaccggcggggagcggcggcccccacccatcaccagcaggaagccccgggtggtgcctgaggaggccgagggccgcatccccctgggcttcggcttccccagcggcaagaggcgggagatgaccagcttccaggccggggaccaggagggcagcctggaggacatcagcaagacctctgtggccaacaagatccgcatctttgagacccatggagctgagaccaggaggatgtctgagggggaggcccggagcctgcccaatgatgtgagcagcgaggcccctgtgggccaggccgagcagcagaggagcaccctgagtgacctgggctttgcccagctgcagcccccaggggactttgccagccccaaggccacccacagcaccgtcatccccctggccaccaggcacttccgggaggacaccagcgccagctaccaggaggcccacacagagctggagcctgtgagccccaacagcggctgtgagaccaccctggccgaggccaccggcaccggcaacaagtctggagatgctgtgcgggaggagaagaggagcaccaacctggccgccaacacccctgggaagggcggccgcctgcgctttgccagccccagcggcccccagagagctggcctgcgggagggcagcgaggagaaggtgaagccaccccggccccgggcccctgagagtgacacaggagatgaggaccaggaccaggagcgggacaccgtcttcctgaaggacaaccacctggccatcgagaggaagtgcagcagcatcaccgtgagcagcaccagcagcctggaggccgaggtggacttcaccgtcatcggggactaccacggcagcgcctttgaggacttcagccgcagcctgcctgagctggaccgggacaagagtgacagcgacacagagggcctgctcttcagccgggacctgaacaagggggcccccagccaggactag

SEQ ID NO: 151409 - DNA, 2643 bp, synthetic construct
  misc_feature 1..2643: note = Description of Artificial Sequence: Synthetic coding sequence
  source 1..2643: mol_type = other DNA
atgaccacagaaacaggcccagattctgaggtgaagaaggcccaggaggaggccccccagcagcctgaggccgctgctgctgtgaccacccctgtgaccccagctggccacggccaccctgaggccaacagcaatgagaagcaccccagccagcaggacaccaggcctgctgagcagagcctggacatggaggagaaggactacagcgaggctgatggcctgtctgagaggaccacccccagcaaggcccagaagagcccccagaagatcgccaagaagtacaagagcgccatctgccgggtgaccctgctggatgcctctgaatatgaatgtgaggtggagaagcacggccggggccaggtgctgtttgacctggtgtgtgagcacctgaacctgctggagaaggactacttcggcctgaccttctgtgatgctgacagccagaagaactggctggaccccagcaaggagatcaagaagcagatccgcagcagcccctggaactttgccttcaccgtgaagttctaccccccagaccctgcccagctgacagaggacatcacccgctactacctgtgcctgcagctgcgggctgacatcatcaccggccgcctgccctgcagctttgtgacccacgccctgctgggcagctatgctgtgcaggccgagctgggggactatgatgctgaggagcacgtgggcaactacgtgtctgagctgcgctttgcccccaaccagacccgggagctggaggagcgcatcatggagctgcacaagacctaccggggcatgaccccaggagaggccgagatccacttcctggagaatgccaagaagctgtccatgtatggagtggacctgcaccacgccaaggacagcgagggcatcgacatcatgctgggcgtgtgtgccaacggcctgctgatctacagagaccggctgcgcatcaacagatttgcctggcccaagatcctgaagatctcctacaagaggagcaacttctacatcaagatccggcctggagaatatgagcagtttgagagcaccatcggcttcaagctgcccaaccacaggtctgccaagaggctgtggaaggtgtgcatcgagcaccacaccttcttccggctggtgtccccagagcccccacccaagggcttcctggtgatgggcagcaagttccgctacagcggccgcacccaggcccagacccggcaggccagcgccctgattgacaggcctgcccccttctttgagaggagcagcagcaagcgctacaccatgagccgcagcctggatggagctgagttcagcaggcctgcctctgtgtctgagaaccatgatgctggcccagatggagacaagagagatgaagatggagagagcggcggccagaggtctgaggccgaggagggggaggtgaggacccccaccaagatcaaggagctgaagccagagcaggagaccacccccaggcacaagcaggagttcctggacaagccagaagatgtgctgctgaagcaccaggccagcatcaatgagctgaagaggaccctgaaggagcccaacagcaagctgatccaccgggaccgggactgggagcgggagcggcggctgcccagcagccctgccagccccagccccaagggcaccccagagaaggccaatgaaagagctggcctgcgggagggcagcgaggagaaggtgaagccaccccggccccgggcccctgagagtgacacaggagatgaggaccaggaccaggagcgggacacagtgttcctgaaggacaaccacctggccattgaaaggaagtgcagcagcatcaccgtgagcagcaccagcagcctggaggccgaggtggacttcaccgtgattggagactaccacggcagcgcctttgaggacttcagccgcagcctgcctgagctggaccgggacaagagtgacagcgacacagagggcctgctcttcagccgggacctgaacaagggggcccccagccaggatgatgagagcggcggcatcgaggacagcccagacagaggagcctgcagcaccccagacatgccccagtttgagcctgtgaagacagagaccatgacagtgagcagcctggccatcaggaagaagattgagcctgaggccgtgctgcagaccagggtgtctgccatggacaacacccaggtggatggcagcgcctctgtgggccgggagttcatcgccaccacccccagcatcaccacagagaccatcagcaccaccatggagaacagcctgaagtctggaaaaggagctgctgccatgatccctggcccccagacagtggccacagagatccgcagcctgagccccatcatcggcaaggatgtgctgaccagcacctatggagccacagctgagaccctgagcaccagcaccaccacccacgtgaccaagacagtgaagggcggcttcagcgagaccagaattgagaagaggatcatcatcactggagatgaagatgtggaccaggaccaggccctggccctggccatcaaggaggccaagctgcagcacccagacatgctggtgaccaaggctgtggtgtaccgggagacagaccccagccctgaggagcgggacaagaagccccaggagagctag

SEQ ID NO: 151410 - DNA, 600 bp, synthetic construct
  misc_feature 1..600: note = Description of Artificial Sequence: Synthetic coding sequence
  source 1..600: mol_type = other DNA
atggaggagaaggactacagcgaggctgatggcctgtctgagaggaccacccccagcaaggcccagaagagcccccagaagatcgccaagaagtacaagagcgccatctgccgggtgaccctgctggatgcctctgaatatgaatgtgaggtggagaagcacggccggggccaggtgctgtttgacctggtgtgtgagcacctgaacctgctggagaaggactacttcggcctgaccttctgtgatgctgacagccagaagaactggctggaccccagcaaggagatcaagaagcagatccgcagcagcccctggaactttgccttcaccgtgaagttctaccccccagaccctgcccagctgacagaggacatcacccgctactacctgtgcctgcagctgcgggctgacatcatcaccggccgcctgccctgcagctttgtgacccacgccctgctgggcagctatgctgtgcaggccgagctgggggactatgatgctgaggagcacgtgggcaactacgtgtctgagctgcgctttgcccccaaccagacccgggagctggaggagcgcatcatggagctgcacaagacctactag

SEQ ID NO: 151411 - DNA, 2106 bp, synthetic construct
  misc_feature 1..2106: note = Description of Artificial Sequence: Synthetic coding sequence
  source 1..2106: mol_type = other DNA
atggtgttcctgggccgcatcaatgaggtggagcccgccaagggcctggccgagagcctggcccccacagagaggtctgtgaagagcctggacatggaggagaaggactacagcgaggctgatggcctgtctgagaggaccacccccagcaaggcccagaagagcccccagaagatcgccaagaagtacaagagcgccatctgccgggtgaccctgctggatgcctctgaatatgaatgtgaggtggagaagcacggccggggccaggtgctgtttgacctggtgtgtgagcacctgaacctgctggagaaggactacttcggcctgaccttctgtgatgctgacagccagaagaactggctggaccccagcaaggagatcaagaagcagatccgcagcagcccctggaactttgccttcaccgtgaagttctaccccccagaccctgcccagctgacagaggacatcacccgctactacctgtgcctgcagctgcgggctgacatcatcaccggccgcctgccctgcagctttgtgacccacgccctgctgggcagctatgctgtgcaggccgagctgggggactatgatgctgaggagcacgtgggcaactacgtgtctgagctgcgctttgcccccaaccagacccgggagctggaggagcgcatcatggagctgcacaagacctaccggggcatgaccccaggagaggccgagatccacttcctggagaatgccaagaagctgtccatgtatggagtggacctgcaccacgccaaggacagcgagggcatcgacatcatgctgggcgtgtgtgccaacggcctgctgatctacagagaccggctgcgcatcaacagatttgcctggcccaagatcctgaagatctcctacaagaggagcaacttctacatcaagatccggcctggagaatatgagcagtttgagagcaccatcggcttcaagctgcccaaccacaggtctgccaagaggctgtggaaggtgtgcatcgagcaccacaccttcttccggctggtgtccccagagcccccacccaagggcttcctggtgatgggcagcaagttccgctacagcggccgcacccaggcccagacccggcaggccagcgccctgattgacaggcctgcccccttctttgagaggagcagcagcaagcgctacaccatgagccgcagcctggatggagctgagttcagcaggcctgcctctgtgtctgaaaatcatgatgctggcccagatggagacaagagagatgaagatggagagagcggcggccagaggtctgaggccgaggagggggaggtgaggacccccaccaagatcaaggagctgaagttcctggacaagccagaagatgtgctgctgaagcaccaggccagcatcaatgagctgaagaggaccctgaaggagcccaacagcaagctgatccaccgggaccgggactgggagcgggagcggcggctgcccagcagccctgccagccccagccccaagggcaccccagagaaggccaatgaacctgtgaagacagagaccatgacagtgagcagcctggccatcaggaagaagattgagcctgaggccgtgctgcagaccagggtgtctgccatggacaacacccagcaggtggatggcagcgcctctgtgggccgggagttcatcgccaccacccccagcatcaccacagagaccatcagcaccaccatggagaacagcctgaagagcgggaaaggagctgctgccatgatccctggcccccagacagtggccacagagatccgcagcctgagccccatcatcggcaaggatgtgctgaccagcacctacggggccacagctgagaccctgagcaccagcaccaccacccacgtgaccaagacagtgaagggcggcttcagcgagacccgcatcgagaagaggatcatcatcactggagatgaagatgtggaccaggaccaggccctggccctggccatcaaggaggccaagctgcagcacccagacatgctggtgaccaaggctgtggtgtaccgggagacagaccccagccctgaggagcgggacaagaagccccaggagagctag

SEQ ID NO: 151412 - DNA, 2319 bp, synthetic construct
  misc_feature 1..2319: note = Description of Artificial Sequence: Synthetic coding sequence
  source 1..2319: mol_type = other DNA
atggaggagaaggactacagcgaggctgatggcctgtctgagaggaccacccccagcaaggcccagaagagcccccagaagatcgccaagaagtacaagagcgccatctgccgggtgaccctgctggatgcctctgaatatgaatgtgaggtggagaactggctggaccccagcaaggagatcaagaagcagatccgcagcagcccctggaactttgccttcaccgtgaagttctaccccccagaccctgcccagctgacagaggacatcacccgctactacctgtgcctgcagctgcgggctgacatcatcaccggccgcctgccctgcagctttgtgacccacgccctgctgggcagctatgctgtgcaggccgagctgggggactatgatgctgaggagcacgtgggcaactacgtgtctgagctgcgctttgcccccaaccagacccgggagctggaggagcgcatcatggagctgcacaagacctaccggggcatgaccccaggagaggccgagatccacttcctggagaatgccaagaagctgtccatgtatggagtggacctgcaccacgccaaggacagcgagggcatcgacatcatgctgggcgtgtgtgccaacggcctgctgatctacagagaccggctgcgcatcaacagatttgcctggcccaagatcctgaagatctcctacaagaggagcaacttctacatcaagatccggcctggagaatatgagcagtttgagagcaccatcggcttcaagctgcccaaccacaggtctgccaagaggctgtggaaggtgtgcatcgagcaccacaccttcttccggctggtgtccccagagcccccacccaagggcttcctggtgatgggcagcaagttccgctacagcggccgcacccaggcccagacccggcaggccagcgccctgattgacaggcctgcccccttctttgagaggagcagcagcaagcgctacaccatgagccgcagcctggatggagctgagttcagcaggcctgcctctgtgtctgaaaatcatgatgctggcccagatggagacaagagagatgaagatggagagagcggcggccagaggtctgaggccgaggagggggaggtgaggacccccaccaagatcaaggagctgaagttcctggacaagccagaagatgtgctgctgaagcaccaggccagcatcaatgagctgaagaggaccctgaaggagcccaacagcaagctgatccaccgggaccgggactgggagcgggagcggcggctgcccagcagccctgccagccccagccccaagggcaccccagagaaggccaatgaaagagctggcctgcgggagggcagcgaggagaaggtgaagccaccccggccccgggcccctgagagtgacacaggagatgaggaccaggaccaggagcgggacaccgtcttcctgaaggacaaccacctggccatcgagaggaagtgcagcagcatcaccgtgagcagcaccagcagcctggaggccgaggtggacttcaccgtcatcggggactaccacggcagcgcctttgaggacttcagccgcagcctgcctgagctggaccgggacaagagtgacagcgacacagagggcctgctcttcagccgggacctgaacaagggggcccccagccaggatgatgaaagtggcggcatcgaggacagcccagacagaggagcctgcagcaccccagacatgccccagtttgagcctgtgaagacagagaccatgacagtgagcagcctggccatcaggaagaagattgagcctgaggccgtgctgcagaccagggtgtctgccatggacaacacccagcaggtggatggcagcgcctctgtgggccgggagttcatcgccaccacccccagcatcaccacagagaccatcagcaccaccatggagaacagcctgaagtctggaaaaggagctgctgccatgatccctggcccccagacagtggccacagagatccgcagcctgagccccatcatcggcaaggatgtgctgaccagcacctatggagccacagctgagaccctgagcaccagcaccaccacccacgtgaccaagacagtgaagggcggcttcagcgagaccagaattgagaagaggatcatcatcactggagatgaagatgtggaccaggaccaggccctggccctggccatcaaggaggccaagctgcagcacccagacatgctggtgaccaaggctgtggtgtaccgggagacagaccccagccctgaggagcgggacaagaagccccaggagagctag

SEQ ID NO: 151413 - DNA, 2319 bp, synthetic construct; identical to SEQ ID NO: 151412
  misc_feature 1..2319: note = Description of Artificial Sequence: Synthetic coding sequence
  source 1..2319: mol_type = other DNA

SEQ ID NO: 151414 - DNA, 600 bp, synthetic construct; identical to SEQ ID NO: 151410
  misc_feature 1..600: note = Description of Artificial Sequence: Synthetic coding sequence
  source 1..600: mol_type = other DNA

SEQ ID NO: 151415 - DNA, 2385 bp, synthetic construct
  misc_feature 1..2385: note = Description of Artificial Sequence: Synthetic coding sequence
  source 1..2385: mol_type = other DNA
atgaccacagaaacaggcccagattctgaggtgaagaaggcccaggaggaggccccccagcagcctgaggccgctgctgctgtgaccacccctgtgaccccagctggccacggccaccctgaggccaacagcaatgagaagcaccccagccagcaggacaccaggcctgctgagcagagcctggacatggaggagaaggactacagcgaggctgatggcctgtctgagaggaccacccccagcaaggcccagaagagcccccagaagatcgccaagaagtacaagagcgccatctgccgggtgaccctgctggatgcctctgaatatgaatgtgaggtggagaagcacggccggggccaggtgctgtttgacctggtgtgtgagcacctgaacctgctggagaaggactacttcggcctgaccttctgtgatgctgacagccagaagaactggctggaccccagcaaggagatcaagaagcagatccgcagcagcccctggaactttgccttcaccgtgaagttctaccccccagaccctgcccagctgacagaggacatcacccgctactacctgtgcctgcagctgcgggctgacatcatcaccggccgcctgccctgcagctttgtgacccacgccctgctgggcagctatgctgtgcaggccgagctgggggactatgatgctgaggagcacgtgggcaactacgtgtctgagctgcgctttgcccccaaccagacccgggagctggaggagcgcatcatggagctgcacaagacctaccggggcatgaccccaggagaggccgagatccacttcctggagaatgccaagaagctgtccatgtatggagtggacctgcaccacgccaaggacagcgagggcatcgacatcatgctgggcgtgtgtgccaacggcctgctgatctacagagaccggctgcgcatcaacagatttgcctggcccaagatcctgaagatctcctacaagaggagcaacttctacatcaagatccggcctggagaatatgagcagtttgagagcaccatcggcttcaagctgcccaaccacaggtctgccaagaggctgtggaaggtgtgcatcgagcaccacaccttcttccggctggtgtccccagagcccccacccaagggcttcctggtgatgggcagcaagttccgctacagcggccgcacccaggcccagacccggcaggccagcgccctgattgacaggcctgcccccttctttgagaggagcagcagcaagcgctacaccatgagccgcagcctggatggagctgagttcagcaggcctgcctctgtgtctgagaaccatgatgctggcccagatggagacaagagagatgaagatggagagagcggcggccagaggtctgaggccgaggagggggaggtgaggacccccaccaagatcaaggagctgaagccagagcaggagaccacccccaggcacaagcaggagttcctggacaagccagaagatgtgctgctgaagcaccaggccagcatcaatgagctgaagaggaccctgaaggagcccaacagcaagctgatccaccgggaccgggactgggagcgggagcggcggctgcccagcagccctgccagccccagccccaagggcaccccagagaaggccaatgaaagagctggcctgcgggagggcagcgaggagaaggtgaagccaccccggccccgggcccctgagagtgacacaggagatgaggaccaggaccaggagcgggacacagtgttcctgaaggacaaccacctggccattgaaaggaagtgcagcagcatcaccgtgagcagcaccagcagcctggaggccgaggtggacttcaccgtgattggagactaccacggcagcgcctttgaggacttcagccgcagcctgcctgagctggaccgggacaagagtgacagcgacacagagggcctgctcttcagccgggacctgaacaagggggcccccagccaggatgatgagagcggcggcatcgaggacagcccagacagaggagcctgcagcaccccagacatgccccagtttgagcctgtgaagacagagaccatgacagtgagcagcctggccatcaggaagaagattgagcctgaggccgtgctgcagaccagggtgtctgccatggacaacacccaggagaacagcctgaagagcgggaaaggagctgctgccatgatccctggcccccagacagtggccacagagatccgcagcctgagccccagcgctgaccaccgggagcgctgcccccaccagcacctgcggcggcactgcggcaaccccctgaacctgcaccaccacccctgccaccagaactgtgaaagaagagtcttctag

SEQ ID NO: 151416 - DNA, 507 bp, synthetic construct
  misc_feature 1..507: note = Description of Artificial Sequence: Synthetic coding sequence
  source 1..507: mol_type = other DNA
atgaccacagaaacaggcccagattctgaggtgaagaaggcccaggaggaggccccccagcagcctgaggccgctgctgctgtgaccacccctgtgaccccagctggccacggccaccctgaggccaacagcaatgagaagcaccccagccagcaggacaccaggcctgctgagcagagcctggacatggaggagaaggactacagcgaggctgatggcctgtctgagaggaccacccccagcaaggcccagaagagcccccagaagatcgccaagaagtacaagagcgccatctgccgggtgaccctgctggatgcctctgaatatgaatgtgaggtggagaagcacggccggggccaggtgctgtttgacctggtgtgtgagcacctgaacctgctggagaaggactacttcggcctgaccttctgtgatgctgacagccagaagaactggctggaccccagcaaggagatcaagaagcagatccgcagcagcccctggaactag

SEQ ID NO: 151417 - DNA, 180 bp, synthetic construct
  misc_feature 1..180: note = Description of Artificial Sequence: Synthetic coding sequence
  source 1..180: mol_type = other DNA
atgaccacagaaacaggcccagattctgaggtgaagaaggcccaggaggaggccccccagcagcctgaggccgctgctgctgtgaccacccctgtgaccccagctggccacggccaccctgaggccaacagcaatgagaagcaccccagccagcaggacaccaggcctgctgagcagtag

SEQ ID NO: 151418 - DNA, 774 bp, synthetic construct
  misc_feature 1..774: note = Description of Artificial Sequence: Synthetic coding sequence
  source 1..774: mol_type = other DNA
atggaggagaaggactacagcgaggctgatggcctgtctgagaggaccacccccagcaaggcccagaagagcccccagaagatcgccaagaagtacaagagcgccatctgccgggtgaccctgctggatgcctctgaatatgaatgtgaggtggagaagcacggccggggccaggtgctgtttgacctggtgtgtgagcacctgaacctgctggagaaggactacttcggcctgaccttctgtgatgctgacagccagaagaactggctggaccccagcaaggagatcaagaagcagatccgcagcagcccctggaactttgccttcaccgtgaagttctaccccccagaccctgcccagctgacagaggacatcacccgctactacctgtgcctgcagctgcgggctgacatcatcaccggccgcctgccctgcagctttgtgacccacgccctgctgggcagctatgctgtgcaggccgagctgggggactatgatgctgaggagcacgtgggcaactacgtgtctgagctgcgctttgcccccaaccagacccgggagctggaggagcgcatcatggagctgcacaagacctaccggggcatgaccccaggagaggccgagatccacttcctggagaatgccaagaagctgtccatgtatggagtggacctgcaccacgccaaggacagcgagggcatcgacatcatgctgggcgtgtgtgccaacggcctgctgatctacagagaccggctgcgcatcaaccgcttctag

SEQ ID NO: 151419 - DNA, 114 bp, synthetic construct
  misc_feature 1..114: note = Description of Artificial Sequence: Synthetic coding sequence
  source 1..114: mol_type = other DNA
atggaggagaaggactacagcgaggctgatggcctgtctgagaggaccacccccagcaaggcccagaagagcccccagaagatcgccaagaagtacaagagcgccatctgctag

SEQ ID NO: 151420 - DNA, 360 bp, synthetic construct
  misc_feature 1..360: note = Description of Artificial Sequence: Synthetic coding sequence
  source 1..360: mol_type = other DNA
tgaagcgtgggccgggagttcatcgccaccacccccagcatcaccacagagaccatcagcaccaccatgatcatcggcaaggatgtgctgaccagcacctacggggccacagctgagaccctgagcaccagcaccaccacccacgtgaccaagacagtgaagggcggcttcagcgagacccgcatcgagaagaggatcatcatcactggagatgaagatgtggaccaggaccaggccctggccctggccatcaaggaggccaagctgcagcacccagacatgctggtgaccaaggctgtggtgtaccgggagacagaccccagccctgaggagcgggacaagaagccccaggagagctag

SEQ ID NO: 151421 - DNA, 2340 bp, synthetic construct; identical to SEQ ID NO: 151406
  misc_feature 1..2340: note = Description of Artificial Sequence: Synthetic coding sequence
  source 1..2340: mol_type = other DNA

SEQ ID NO: 151422 - DNA, 345 bp, synthetic construct
  misc_feature 1..345: note = Description of Artificial Sequence: Synthetic coding sequence
  source 1..345: mol_type = other DNA
atgaccacagaaacaggcccagattctgaggtgaagaaggcccaggaggaggccccccagcagcctgaggccgctgctgctgtgaccacccctgtgaccccagctggccacggccaccctgaggccaacagcaatgagaagcaccccagccagcaggacaccaggcctgctgagcagagcctggacatggaggagaaggactacagcgaggctgatggcctgtctgagaggaccacccccagcaaggcccagaagagcccccagaagatcgccaagaagtacaagagcgccatctgccgggtgaccctgctggatgcctctgaatatgaatgtgaggtggagtag

SEQ ID NO: 151423 - DNA, 567 bp, synthetic construct
  misc_feature 1..567: note = Description of Artificial Sequence: Synthetic coding sequence
  source 1..567: mol_type = other DNA
atgaccacagaaacaggcccagattctgaggtgaagaaggcccaggaggaggccccccagcagcctgaggccgctgctgctgtgaccacccctgtgaccccagctggccacggccaccctgaggccaacagcaatgagaagcaccccagccagcaggacaccaggcctgctgagcagagcctggacatggaggagaaggactacagcgaggctgatggcctgtctgagaggaccacccccagcaaggcccagaagagcccccagaagatcgccaagaagtacaagagcgccatctgccgggtgaccctgctggatgcctctgaatatgaatgtgaggtggagaagcacggccggggccaggtgctgtttgacctggtgtgtgagcacctgaacctgctggagaaggactacttcggcctgaccttctgtgatgctgacagccagaagaactggctggaccccagcaaggagatcaagaagcagatccgcagcagcccctggaactttgccttcaccgtgaagttctaccccccagaccctgcccagctgacagaggacatcacctag

SEQ ID NO: 151424 - DNA, 705 bp, synthetic construct
  misc_feature 1..705: note = Description of Artificial Sequence: Synthetic coding sequence
  source 1..705: mol_type = other DNA
atggagagcaccccagagccccggcccaatgagtgggagaagaggcgcatcacccccctgagcctgcagacccagggcaggaagggggaccacctgttcaaggacatcctgtctgtgaaggagaagtacctgatgcccaccatctggacagtggaggagaaggcccaggagacagacaagacccgggcccctgagagcgagggcccctgcacaggagccagagatgctgtgaagagcagccatgagaccctgaacatcgtggaggagaagaagagagctgaggtgggcaaggatgagagggtcatcacagaggagatgaatggcaaggagatcagccctggcagcggccctggagagatcaggaaggtggagcctgtgacccagaaggacagcaccagcctgagcagcgagagcagcagcagcagcagcgagagcgaggaggaggatgtgggggagtaccggccccaccaccgggtgacagagggcaccatccgggaggagcaggagtatgaggaggaggtggaggaggagcccaggcctgctgccaaggtggtggagcgggaggaggccgtgcctgaggccagccctgtgacccaggccggggccagcgtcatcaccgtggagaccgtcatccaggagaatgtgggcgcccagaagatccctggagagaagtctgtgcatgaaggagccctgaagcaggactag

SEQ ID NO: 151425 - DNA, 3018 bp, synthetic construct
  misc_feature 1..3018: note = Description of Artificial Sequence: Synthetic coding sequence
  source 1..3018: mol_type = other DNA
atgaccacagaggtgggctctgtgtctgaggtgaagaaggacagcagccagctgggcacagatgccaccaaggagaagcccaaggaggtggccgagaaccagcagaaccagagcagtgaccctgaggaggagaagggcagccagcccccacctgctgctgagagccagagcagcctgcggcggcagaagcgggagaaggagaccagcgagagccggggcatcagccgcttcatccccccctggctgaagaagcagaagagctacaccctggtggtggccaaggatggaggagacaagaaggagcccacccaggccgtggtggaggagcaggtgctggacaaggaggagcccctgcctgaggagcagaggcaggccaagggagatgctgaggagatggcccagaagaagcaggagatcaaggtggaggtgaaggaggagaagcccagcgtgtccaaggaggagaagcccagcgtgtccaaggtggagatgcagcccacagagctggtgtccaaggagcgggaggagaaggtgaaggagacccaggaggacaagctggagggcggggccgccaagcgggagaccaaggaggtgcagaccaatgagctgaaggccgagaaggccagccagaaggtgaccaagaagaccaagacagtgcagtgcaaggtgaccctgctggatggaacagagtacagctgtgacctggagaagcacgccaagggccaggtgctgtttgacaaggtgtgtgagcacctgaacctgctggagaaggactacttcggcctgctcttccaggagagccctgagcagaagaactggctggaccctgccaaggagatcaagaggcagctgaggaacctgccctggctgttcaccttcaacgtgaagttctaccccccagaccccagccagctgacagaggacatcacccgctacttcctgtgcctgcagctgcggcaggacatcgccagcggccgcctgccctgcagctttgtgacccacgccctgctgggcagctacaccctgcaggccgagctgggggactatgaccctgaggagcacggcagcattgacctgtctgagttccagtttgcccccacccagaccaaggagctggaggagaaggtggccgagctgcacaagacccaccggggcctgagccctgcccaggccgacagccagttcctggagaatgccaagaggctgtccatgtatggagtggacctgcaccacgccaaggacagcgagggcgtggacatcaagctgggcgtgtgtgccaacggcctgctgatctacaaggaccggctgcgcatcaacagatttgcctggcccaagatcctgaagatctcctacaagaggagcaacttctacatcaaggtgcggcctgctgagctggagcagtttgagagcaccatcggcttcaagctgcccaaccaccgggccgccaagaggctgtggaaggtgtgtgtggagcaccacaccttctaccgcctggtgtccccagagcagccccccaaggccaagttcctgaccctgggcagcaagttccgctacagcggccgcacccaggcccagacccggcaggccagcaccctgattgacaggcctgccccccactttgagaggaccagcagcaagagggtgagccgcagcctggatggagcccccatcggcgtgatggaccagagcctgatgaaggacttccctggagctgctggggagatcagcgcctacggccctggcctggtgtccattgctgtggtgcaggatggagatggaagaagagaggtgcgcagccccaccaaggccccccacctgcagctgattgagggcaagaagaacagcctgcgggtggagggggacaacatctacgtgcgccacagcaacctgatgctggaggagctggacaaggcccaggaggacatcctgaagcaccaggccagcatcagcgagctgaagaggaacttcatggagagcaccccagagccccggcccaatgagtgggagaagaggcgcatcacccccctgagcctgcagacccagggcagcagccatgagaccctgaacatcgtggaggagaagaagagagctgaggtgggcaaggatgagagggtcatcacagaggagatgaatggcaaggagatcagccctggcagcggccctggagagatcaggaaggtggagcctgtgacccagaaggacagcaccagcctgagcagcgagagcagcagcagcagcagcgagagcgaggaggaggatgtgggggagtaccggccccaccaccgggtgacagagggcaccatccgggaggagcaggagtatgaggaggaggtggaggaggagcccaggcctgctgccaaggtggtggagcgggaggaggccgtgcctgaggccagccctgtgacccaggccggggccagcgtcatcaccgtggagaccgtcatccaggagaatgtgggcgcccagaagatccctggagagaagtctgtgcatgagggcgccctgaagcaggacatgggagaggaggccgaggaggagccccagaaggtgaatggagaggtgagccacgtggacattgatgtgctgccccagatcatctgctgcagcgagccccctgtggtgaagacagagatggtgaccatcagtgatgccagccagaggacagagatcagcaccaaggaggtgcccatcgtgcagacagagaccaagaccatcacctatgagagcccccagattgatggaggagctggaggagacagcggcaccctgctgacagcccagaccatcaccagcgagagcgtgtccaccaccaccaccacccacatcaccaagacagtgaagggcggcatcagcgagacccgcatcgagaagagaattgtcatcactggagatggagacatcgaccatgaccaggccctggcccaggccatccgggaggcccgggagcagcacccagacatgtctgtgaccagggtggtggtgcacaaggagacagagctggccgaggagggggaggactag

SEQ ID NO: 151426 - DNA, 3018 bp, synthetic construct; identical to SEQ ID NO: 151425
  misc_feature 1..3018: note = Description of Artificial Sequence: Synthetic coding sequence
  source 1..3018: mol_type = other DNA

SEQ ID NO: 151427 - DNA, 2022 bp, synthetic construct
  misc_feature 1..2022: note = Description of Artificial Sequence: Synthetic coding sequence
  source 1..2022: mol_type = other DNA
atgaccacagaggtgggctctgtgtctgaggtgaagaaggacagcagccagctgggcacagatgccaccaaggagaagcccaaggaggtggccgagaaccagcagaaccagagcagtgaccctgaggaggagaagggcagccagcccccacctgctgctgagagccagagcagcctgcggcggcagaagcgggagaaggagaccagcgagagccggggcatcagccgcttcatccccccctggctgaagaagcagaagagctacaccctggtggtggccaaggatggaggagacaagaaggagcccacccaggccgtggtggaggagcaggtgctggacaaggaggagcccctgcctgaggagcagaggcaggccaagggagatgctgaggagatggcccagaagaagcaggagatcaaggtggaggtgaaggaggagaagcccagcgtgtccaaggaggagaagcccagcgtgtccaaggtggagatgcagcccacagagctggtgtccaaggagcgggaggagaaggtgaaggagacccaggaggacaagctggagggcggggccgccaagcgggagaccaaggaggtgcagaccaatgagctgaaggccgagaaggccagccagaaggtgaccaagaagaccaagacagtgcagtgcaaggtgaccctgctggatggaacagagtacagctgtgacctggagaagcacgccaagggccaggtgctgtttgacaaggtgtgtgagcacctgaacctgctggagaaggactacttcggcctgctcttccaggagagccctgagcagaagaactggctggaccctgccaaggagatcaagaggcagctgaggaacctgccctggctgttcaccttcaacgtgaagttctaccccccagaccccagccagctgacagaggacatcacccgctacttcctgtgcctgcagctgcggcaggacatcgccagcggccgcctgccctgcagctttgtgacccacgccctgctgggcagctacaccctgcaggccgagctgggggactatgaccctgaggagcacggcagcattgacctgtctgagttccagtttgcccccacccagaccaaggagctggaggagaaggtggccgagctgcacaagacccaccggggcctgagccctgcccaggccgacagccagttcctggagaatgccaagaggctgtccatgtatggagtggacctgcaccacgccaaggacagcgagggcgtggacatcaagctgggcgtgtgtgccaacggcctgctgatctacaaggaccggctgcgcatcaacagatttgcctggcccaagatcctgaagatctcctacaagaggagcaacttctacatcaaggtgcggcctgctgagctggagcagtttgagagcaccatcggcttcaagctgcccaaccaccgggccgccaagaggctgtggaaggtgtgtgtggagcaccacaccttctaccgcctggtgtccccagagcagccccccaaggccaagttcctgaccctgggcagcaagttccgctacagcggccgcacccaggcccagacccggcaggccagcaccctgattgacaggcctgccccccactttgagaggaccagcagcaagagggtgagccgcagcctggatggagcccccatcggcgtgatggaccagagcctgatgaaggacttccctggagctgctggggagatcagcgcctacggccctggcctggtgtccattgctgtggtgcaggatggagatggaagaagagaggtgcgcagccccaccaaggccccccacctgcagctgattgagggcaagacagtgaagggcggcatcagcgagacccgcatcgagaagagaattgtcatcactggagatggagacatcgaccatgaccaggccctggcccaggccatccgggaggcccgggagcagcacccagacatgtctgtgaccagggtggtggtgcacaaggagacagagctggccgaggagggggaggactag

SEQ ID NO: 151428 - DNA, 1902 bp, synthetic construct
  misc_feature 1..1902: note = Description of Artificial Sequence: Synthetic coding sequence
  source 1..1902: mol_type = other DNA
atgaccacagaggtgggctctgtgtctgaggtgaagaaggacagcagccagctgggcacagatgccaccaaggagaagcccaaggaggtggccgagaaccagcagaaccagagcagtgaccctgaggaggagaagggcagccagcccccacctgctgctgagagccagagcagcctgcggcggcagaagcgggagaaggagaccagcgagagccggggcatcagccgcttcatccccccctggctgaagaagcagaagagctacaccctggtggtggccaaggatggaggagacaagaaggagcccacccaggccgtggtggaggagcaggtgctggacaaggaggagcccctgcctgaggagcagaggcaggccaagggagatgctgaggagatggcccagaagaagcaggagatcaaggtggaggtgaaggaggagaagcccagcgtgtccaaggaggagaagcccagcgtgtccaaggtggagatgcagcccacagagctggtgtccaaggagcgggaggagaaggtgaaggagacccaggaggacaagctggagggcggggccgccaagcgggagaccaaggaggtgcagaccaatgagctgaaggccgagaaggccagccagaaggtgaccaagaagaccaagacagtgcagtgcaaggtgaccctgctggatggaacagagtacagctgtgacctggagaagcacgccaagggccaggtgctgtttgacaaggtgtgtgagcacctgaacctgctggagaaggactacttcggcctgctcttccaggagagccctgagcagaagaactggctggaccctgccaaggagatcaagaggcagctgaggaacctgccctggctgttcaccttcaacgtgaagttctaccccccagaccccagccagctgacagaggacatcacccgctacttcctgtgcctgcagctgcggcaggacatcgccagcggccgcctgccctgcagctttgtgacccacgccctgctgggcagctacaccctgcaggccgagctgggggactatgaccctgaggagcacggcagcattgacctgtctgagttccagtttgcccccacccagaccaaggagctggaggagaaggtggccgagctgcacaagacccaccggggcctgagccctgcccaggccgacagccagttcctggagaatgccaagaggctgtccatgtatggagtggacctgcaccacgccaaggacagcgagggcgtggacatcaagctgggcgtgtgtgccaacggcctgctgatctacaaggaccggctgcgcatcaacagatttgcctggcccaagatcctgaagatctcctacaagaggagcaacttctacatcaaggtgcggcctgctgagctggagcagtttgagagcaccatcggcttcaagctgcccaaccaccgggccgccaagaggctgtggaaggtgtgtgtggagcaccacaccttctaccgcctggtgtccccagagcagccccccaaggccaagttcctgaccctgggcagcaagttccgctacagcggccgcacccaggcccagacccggcaggccagcaccctgattgacaggcctgccccccactttgagaggaccagcagcaagagggtgagccgcagcctggatggagcccccatcggcgtgatggaccagagcctgatgaaggacttccctggagctgctggggagatcagcgcctacggccctggcctggtgtccattgctgtggtgcaggatggagatggaagaagagaggtgcgcagccccaccaaggccccccacctgcagctgattgagggcaagagcagccatgagaccctgaacatcgtggaggagaagagcggccagaggctgggcaagaccaaggagtag

SEQ ID NO: 151429 - DNA, 2244 bp, synthetic construct
  misc_feature 1..2244: note = Description of Artificial Sequence: Synthetic coding sequence
  source 1..2244: mol_type = other DNA
atgaccacagaggtgggctctgtgtctgaggtgaagaaggacagcagccagctgggcacagatgccaccaaggagaagcccaaggaggtggccgagaaccagcagaaccagagcagtgaccctgaggaggagaagggcagccagcccccacctgctgctgagagccagagcagcctgcggcggcagaagcgggagaaggagaccagcgagagccggggcatcagccgcttcatccccccctggctgaagaagcagaagagctacaccctggtggtggccaaggatggaggagacaagaaggagcccacccaggccgtggtggaggagcaggtgctggacaaggaggagcccctgcctgaggagcagaggcaggccaagggagatgctgaggagatggcccagaagaagcaggagatcaaggtggaggtgaaggaggagaagcccagcgtgtccaaggaggagaagcccagcgtgtccaaggtggagatgcagcccacagagctggtgtccaaggagcgggaggagaaggtgaaggagacccaggaggacaagctggagggcggggccgccaagcgggagaccaaggaggtgcagaccaatgagctgaaggccgagaaggccagccagaaggtgaccaagaagaccaagacagtgcagtgcaaggtgaccctgctggatggaacagagtacagctgtgacctggagaagcacgccaagggccaggtgctgtttgacaaggtgtgtgagcacctgaacctgctggagaaggactacttcggcctgctcttccaggagagccctgagcagaagaactggctggaccctgccaaggagatcaagaggcagctgaggaacctgccctggctgttcaccttcaacgtgaagttctaccccccagaccccagccagctgacagaggacatcacccgctacttcctgtgcctgcagctgcggcaggacatcgccagcggccgcctgccctgcagctttgtgacccacgccctgctgggcagctacaccctgcaggccgagctgggggactatgaccctgaggagcacggcagcattgacctgtctgagttccagtttgcccccacccagaccaaggagctggaggagaaggtggccgagctgcacaagacccaccggggcctgagccctgcccaggccgacagccagttcctggagaatgccaagaggctgtccatgtatggagtggacctgcaccacgccaaggacagcgagggcgtggacatcaagctgggcgtgtgtgccaacggcctgctgatctacaaggaccggctgcgcatcaacagatttgcctggcccaagatcctgaagatctcctacaagaggagcaacttctacatcaaggtgcggcctgctgagctggagcagtttgagagcaccatcggcttcaagctgcccaaccaccgggccgccaagaggctgtggaaggtgtgtgtggagcaccacaccttctaccgcctggtgtccccagagcagccccccaaggccaagttcctgaccctgggcagcaagttccgctacagcggccgcacccaggcccagacccggcaggccagcaccctgattgacaggcctgccccccactttgagaggaccagcagcaagagggtgagccgcagcctggatggagcccccatcggcgtgatggaccagagcctgatgaaggacttccctggagctgctggggagatcagcgcctacggccctggcctggtgtccattgctgtggtgcaggatggagatggaagaagagaggtgcgcagccccaccaaggccccccacctgcagctgattgagggcaagccccctgtggtgaagacagagatggtgaccatcagtgatgccagccagaggacagagatcagcaccaaggaggtgcccatcgtgcagacagagaccaagaccatcacctatgagagcccccagattgatggaggagctggaggagacagcggcaccctgctgacagcccagaccatcaccagcgagagcgtgtccaccaccaccaccacccacatcaccaagacagtgaagggcggcatcagcgagacccgcatcgagaagagaattgtcatcactggagatggagacatcgaccatgaccaggccctggcccaggccatccgggaggcccgggagcagcacccagacatgtctgtgaccagggtggtggtgcacaaggagacagagctggccgaggagggggaggactag

SEQ ID NO: 151430 - DNA, 1143 bp, synthetic construct
  misc_feature 1..1143: note = Description of Artificial Sequence: Synthetic coding sequence
  source 1..1143: mol_type = other DNA
tgactgggcagcaagttccgctacagcggccgcacccaggcccagacccggcaggccagcaccctgattgacaggcctgccccccactttgagaggaccagcagcaagagggtgagccgcagcctggatggagcccccatcggcgtgatggaccagagcctgatgaaggacttccctggagctgctggggagatcagcgcctacggccctggcctggtgtccattgctgtggtgcaggatggagatggccggcgggaggtgcgcagccccaccaaggccccccacctgcagctgattgagggcaagaagaacagcctgcgggtggagggggacaacatctacgtgcgccacagcaacctgatgctggaggagctggacaaggcccaggaggacatcctgaagcaccaggccagcatcagcgagctgaagaggaacttcatggagagcaccccagagccccggcccaatgagtgggagaagaggcgcatcacccccctgagcctgcagacccagggcaggaagggggaccacctgttcaaggacatcctgtctgtgaaggagaagtacctgatgcccaccatctggacagtggaggagaaggcccaggagacagacaagacccgggcccctgagagcgagggcccctgcacaggagccagagatgctgtgaagagcagccatgagaccctgaacatcgtggaggagaagaagagagctgaggtgggcaaggatgagagggtcatcacagaggagatgaatggcaaggagatcagccctggcagcggccctggagagatcaggaaggtggagcctgtgacccagaaggacagcaccagcctgagcagcgagagcagcagcagcagcagcgagagcgaggaggaggatgtgggggagtaccggccccaccaccgggtgacagagggcaccatccgggaggagcaggagtatgaggaggaggtggaggaggagcccaggcctgctgccaaggtggtggagcgggaggaggccgtgcctgaggccagccctgtgacccaggccggggccagcgtcatcaccgtggagaccgtcatccaggagaatgtgggcgcccagaagatccctggagagaagtctgtgcatgaaggagccctgaagcaggactag

SEQ ID NO: 151431 - DNA, 1152 bp, synthetic construct
  misc_feature 1..1152: note = Description of Artificial Sequence: Synthetic coding sequence
  source 1..1152: mol_type = other DNA
atggaggaggaggagacccagctggaggaggagctggacaaggcccaggaggacatcctgaagcaccaggccagcatcagcgagctgaagaggaacttcatggagagcaccccagagccccggcccaatgagtgggagaagaggcgcatcacccccctgagcctgcagacccagggcagcagccatgagaccctgaacatcgtggaggagaagaagagagctgaggtgggcaaggatgagagggtcatcacagaggagatgaatggcaaggagatcagccctggcagcggccctggagagatcaggaaggtggagcctgtgacccagaaggacagcaccagcctgagcagcgagagcagcagcagcagcagcgagagcgaggaggaggatgtgggggagtaccggccccaccaccgggtgacagagggcaccatccgggaggagcaggagtatgaggaggaggtggaggaggagcccaggcctgctgccaaggtggtggagcgggaggaggccgtgcctgaggccagccctgtgacccaggccggggccagcgtcatcaccgtggagaccgtcatccaggagaatgtgggcgcccagaagatccctggagagaagtctgtgcatgagggcgccctgaagcaggacatgggagaggaggccgaggaggagccccagaaggtgaatggagaggtgagccacgtggacattgatgtgctgccccagatcatctgctgcagcgagccccctgtggtgaagacagagatggtgaccatcagtgatgccagccagaggacagagatcagcaccaaggaggtgcccatcgtgcagacagagaccaagaccatcacctatgagagcccccagattgatggaggagctggaggagacagcggcaccctgctgacagcccagaccatcaccagcgagagcgtgtccaccaccaccaccacccacatcaccaagacagtgaagggcggcatcagcgagacccgcatcgagaagagaattgtcatcactggagatggagacatcgaccatgaccaggccctggcccaggccatccgggaggcccgggagcagcacccagacatgtctgtgaccagggtggtggtgcacaaggagacagagctggccgaggagggggaggactag

SEQ ID NO: 151432 - DNA, 2022 bp, synthetic construct; identical to SEQ ID NO: 151427
  misc_feature 1..2022: note = Description of Artificial Sequence: Synthetic coding sequence
  source 1..2022: mol_type = other DNA

SEQ ID NO: 151433 - DNA, 462 bp, synthetic construct
  misc_feature 1..462: note = Description of Artificial Sequence: Synthetic coding sequence
  source 1..462: mol_type = other DNA
atgaccacagaggtgggctctgtgtctgaggtgaagaaggacagcagccagctgggcacagatgccaccaaggagaagcccaaggaggtggccgagaaccagcagaaccagagcagtgaccctgaggaggagaagggcagccagcccccacctgctgctgagagccagagcagcctgcggcggcagaagcgggagaaggagaccagcgagagccggggcatcagccgcttcatccccccctggctgaagaagcagaagagctacaccctggtggtggccaaggatggaggagacaagaaggagcccacccaggccgtggtggaggagcaggtgctggacaaggaggagcccctgcctgaggagcagaggcaggccaagggagatgctgaggagatggcccagaagaagcaggagatcaaggtggaggtgaaggaggagaagcccagcgtgtccaaggagtag

SEQ ID NO: 151434 - DNA, 2244 bp, synthetic construct; identical to SEQ ID NO: 151429
  misc_feature 1..2244: note = Description of Artificial Sequence: Synthetic coding sequence
  source 1..2244: mol_type = other DNA

SEQ ID NO: 151435 - DNA, 540 bp, synthetic construct
  misc_feature 1..540: note = Description of Artificial Sequence: Synthetic coding sequence
  source 1..540: mol_type = other DNA
atgaccacagaggtgggctctgtgtctgaggtgaagaaggacagcagccagctgggcacagatgccaccaaggagaagcccaaggaggtggccgagaaccagcagaaccagagcagtgaccctgaggaggagaagggcagccagcccccacctgctgctgagagccagagcagcctgcggcggcagaagcgggagaaggagaccagcgagagccggggcatcagccgcttcatccccccctggctgaagaagcagaagagctacaccctggtggtggccaaggatggaggagacaagaaggagcccacccaggccgtggtggaggagcaggtgctggacaaggaggagcccctgcctgaggagcagaggcaggccaagggagatgctgaggagatggcccagaagaagcaggagatcaaggtggaggtgaaggaggagaagcccagcgtgtccaaggaggagaagcccagcgtgtccaaggtggagatgcagcccacagagctggtgtccaaggagcgggaggagaaggtgaaggagtag

SEQ ID NO: 151436 - DNA, 2559 bp, synthetic construct
  misc_feature 1..2559: note = Description of Artificial Sequence: Synthetic coding sequence
  source 1..2559: mol_type = other DNA
atgaccacagaggtgggctctgtgtctgaggtgaagaaggacagcagccagctgggcacagatgccaccaaggagaagcccaaggaggtggccgagaaccagcagaaccagagcagtgaccctgaggaggagaagggcagccagcccccacctgctgctgagagccagagcagcctgcggcggcagaagcgggagaaggagaccagcgagagccggggcatcagccgcttcatccccccctggctgaagaagcagaagagctacaccctggtggtggccaaggatggaggagacaagaaggagcccacccaggccgtggtggaggagcaggtgctggacaaggaggagcccctgcctgaggagcagaggcaggccaagggagatgctgaggagatggcccagaagaagcaggagatcaaggtggaggtgaaggaggagaagcccagcgtgtccaaggaggagaagcccagcgtgtccaaggtggagatgcagcccacagagctggtgtccaaggagcgggaggagaaggtgaaggagacccaggaggacaagctggagggcggggccgccaagcgggagaccaaggaggtgcagaccaatgagctgaaggccgagaaggccagccagaaggtgaccaagaagaccaagacagtgcagtgcaaggtgaccctgctggatggaacagagtacagctgtgacctggagaagcacgccaagggccaggtgctgtttgacaaggtgtgtgagcacctgaacctgctggagaaggactacttcggcctgctcttccaggagagccctgagcagaagaactggctggaccctgccaaggagatcaagaggcagctgaggaacctgccctggctgttcaccttcaacgtgaagttctaccccccagaccccagccagctgacagaggacatcacccgctacttcctgtgcctgcagctgcggcaggacatcgccagcggccgcctgccctgcagctttgtgacccacgccctgctgggcagctacaccctgcaggccgagctgggggactatgaccctgaggagcacggcagcattgacctgtctgagttccagtttgcccccacccagaccaaggagctggaggagaaggtggccgagctgcacaagacccaccggggcctgagccctgcccaggccgacagccagttcctggagaatgccaagaggctgtccatgtatggagtggacctgcaccacgccaaggacagcgagggcgtggacatcaagctgggcgtgtgtgccaacggcctgctgatctacaaggaccggctgcgcatcaacagatttgcctggcccaagatcctgaagatctcctacaagaggagcaacttctacatcaaggtgcggcctgctgagctggagcagtttgagagcaccatcggcttcaagctgcccaaccaccgggccgccaagaggctgtggaaggtgtgtgtggagcaccacaccttctaccgcctggtgtccccagagcagccccccaaggccaagttcctgaccctgggcagcaagttccgctacagcggccgcacccaggcccagacccggcaggccagcaccctgattgacaggcctgccccccactttgagaggaccagcagcaagagggtgagccgcagcctggatggagcccccatcggcgtgatggaccagagcctgatgaaggacttccctggagctgctggggagatcagcgcctacggccctggcctggtgtccattgctgtggtgcaggatggagatggaagaagagaggtgcgcagccccaccaaggccccccacctgcagctgattgagggcaagagcagccatgagaccctgaacatcgtggaggagaagaagagagctgaggtgggcaaggatgagagggtcatcacagaggagatgaatggcaaggagatcagccctggcagcggccctggagagatcaggaaggtggagcctgtgacccagaaggacagcaccagcctgagcagcgagagcagcagcagcagcagcgagagcgaggaggaggatgtgggggagtaccggccccaccaccgggtgacagagggcaccatccgggaggagcaggagtatgaggaggaggtggaggaggagcccaggcctgctgccaagccccctgtggtgaagacagagatggtgaccatcagtgatgccagccagaggacagagatcagcaccaaggaggtgcccatcgtgcagacagagaccaagaccatcacctatgagagcccccagattgatggaggagctggaggagacagcggcaccctgctgacagcccagaccatcaccagcgagagcgtgtccaccaccaccaccacccacatcaccaagacagtgaagggcggcatcagcgagaccagaattgagaagagaattgtcatcactggagatggagacatcgaccatgaccaggccctggcccaggccatccgggaggcccgggagcagcacccagacatgtctgtgaccagggtggtggtgcacaaggagacagagctggccgaggagggagaagattag

SEQ ID NO: 151437 - DNA, 357 bp, synthetic construct
  misc_feature 1..357: note = Description of Artificial Sequence: Synthetic coding sequence
  source 1..357: mol_type = other DNA
atgaccacagaggtgggctctgtgtctgaggtgaagaaggacagcagccagctgggcacagatgccaccaaggagaagcccaaggaggtggccgagaaccagcagaaccagagcagtgaccctgaggaggagaagggcagccagcccccacctgctgctgagagccagagcagcctgcggcggcagaagcgggagaaggagaccagcgagagccggggcatcagccgcttcatccccccctggctgaagaagcagaagagctacaccctggtggtggccaaggatggaggagacaagaaggagcccacccaggccgtggtggaggagcaggtgctggacaaggaggagcccctgtag

SEQ ID NO: 151438 - DNA, 606 bp, synthetic construct
  misc_feature 1..606: note = Description of Artificial Sequence: Synthetic coding sequence
  source 1..606: mol_type = other DNA
atggaggaggaggagacccagctggaggagaagaacagcctgcgggtggagggggacaacatctacgtgcgccacagcaacctgatgctggaggagctggacaaggcccaggaggacatcctgaagcaccaggccagcatcagcgagctgaagaggaacttcatggagagcaccccagagccccggcccaatgagtgggagaagaggcgcatcacccccctgagcctgcagacccagggcacccgggcccctgagagcgagggcccctgcacaggagccagagatgctgtgaagccccctgtggtgaagacagagatggtgaccatcagtgatgccagccagaggacagagatcagcaccaaggaggtgcccatcgtgcagacagagaccaagaccatcacctatgagagcccccagacagtgaagggcggcatcagcgagacccgcatcgagaagagaattgtcatcactggagatggagacatcgaccatgaccaggccctggcccaggccatccgggaggcccgggagcagcacccagacatgtctgtgaccagggtggtggtgcacaaggagacagagctggccgaggagggggaggactag

SEQ ID NO: 151439 - DNA, 384 bp, synthetic construct
  misc_feature 1..384: note = Description of Artificial Sequence: Synthetic coding sequence
  source 1..384: mol_type = other DNA
atgaccacagaggtgggctctgtgtctgaggtgaagaaggacagcagccagctgggcacagatgccaccaaggagaagcccaaggaggtggccgagaaccagcagaaccagagcagtgaccctgaggaggagaagggcagccagcccccacctgctgctgagagccagagcagcctgcggcggcagaagcgggagaaggagaccagcgagagccggggcatcagccgcttcatccccccctggctgaagaagcagaagagctacaccctggtggtggccaaggatggaggagacaagaaggagcccacccaggccgtggtggaggagcaggtgctggacaaggaggagcccctgcctgaggagcagaggcaggccaagggctag

SEQ ID NO: 151440 - DNA, 489 bp, synthetic construct
  misc_feature 1..489: note = Description of Artificial Sequence: Synthetic coding sequence
  source 1..489: mol_type = other DNA
atgaccacagaggtgggctctgtgtctgaggtgaagaaggacagcagccagctgggcacagatgccaccaaggagaagcccaaggaggtggccgagaaccagcagaaccagagcagtgaccctgaggaggagaagggcagccagcccccacctgctgctgagagccagagcagcctgcggcggcagaagcgggagaaggagaccagcgagagccggggcatcagccgcttcatccccccctggctgaagaagcagaagagctacaccctggtggtggccaaggatggaggagacaagaaggagcccacccaggccgtggtggaggagcaggtgctggacaaggaggagcccctgcctgaggagcagaggcaggccaagggagatgctgaggagatggcccagaagaagcaggagatcaaggtggaggtgaaggaggagaagcccagcgtgtccaaggaggagaagcccagcgtgtccaaggtggagtag

SEQ ID NO: 151441 - DNA, 3264 bp, synthetic construct
  misc_feature 1..3264: note = Description of Artificial Sequence: Synthetic coding sequence
  source 1..3264: mol_type = other DNA
atgaccacagaaagtggcagtgacagcgagagcaagccagaccaggaggccgagccccaggaggccgccggggcccagggccgggccggggcccctgtgcctgagccccccaaggaggagcagcagcaggccctggagcagtttgctgctgctgctgcccacagcacccctgtgagaagagaggtgacagacaaggagcaggagtttgctgcccgggccgccaagcagctggagtaccagcagctggaggatgacaagctgagccagaagagcagcagcagcaagctgagccgcagccccctgaagatcgtgaagaagcccaagtccatgcagtgcaaggtgatcctgctggatggcagcgagtacacctgtgatgtggagaagaggagccggggccaggtgctgtttgacaaggtgtgtgagcacctgaacctgctggagaaggactacttcggcctgacctacagagatgctgagaaccagaagaactggctggaccctgccaaggagatcaagaagcaggtgcgcagcggggcctggcacttctccttcaacgtgaagttctaccccccagaccctgcccagctgtctgaggacatcacccgctactacctgtgcctgcagctgagagatgacatcgtgtctggccgcctgccctgcagctttgtgaccctggccctgctgggcagctacacagtgcagagcgagctgggggactatgaccctgatgaatgtggcagtgactacatcagcgagttccgctttgcccccaaccacaccaaggagctggaggacaaggtgattgagctgcacaagagccaccggggcatgaccccagctgaggccgagatgcacttcctggagaatgccaagaagctgtccatgtatggagtggacctgcaccacgccaaggacagcgagggcgtggagatcatgctgggcgtgtgtgccagcggcctgctgatctacagagaccggctgcgcatcaacagatttgcctggcccaaggtgctgaagatctcctacaagaggaacaacttctacatcaagatccggcctggagaatttgagcagtttgagagcaccatcggcttcaagctgcccaaccaccgggccgccaagaggctgtggaaggtgtgtgtggagcaccacaccttcttccggctgctgctgcctgaggccccacccaagaagttcctgaccctgggcagcaagttccgctacagcggccgcacccaggcccagacccggcgggccagcgccctgattgacaggcctgccccctactttgagaggagcagcagcaagcgctacaccatgagccgcagcctggatggagaggtgggcaccggccagtatgccaccaccaagggcatcagccagaccaacctgatcaccaccgtgaccccagagaagaaggccgaggaggagagagatgaggaggaggacaagagaagaaaaggagaggaggtgacccccatcagcgccatcagacatgagggcaagagccctggcctgggcacagacagctgccccctgagcccccccagcacccactgtgcccccaccagccccacagagctgcggcggcgctgcaaggaaaatgactgcaagctgcccggctatgagcccagcagagctgagcacctgcctggagagcccgccctggacagtgatggccctggccggccctacctgggggaccaggatgtggccttctcctaccggcagcagacaggcaagggcaccaccctcttctccttcagcctgcagctgcctgagagcttccccagcctgctggatgatgatggctacctgtccttccccaacctgtctgagaccaacctgctgccccagagcctgcagcactacctgcccatccgcagccccagcctggtgccctgcttcctgttcatcttcttcttcctgctgagcgccagcttctctgtgccctatgccctgaccctgtccttccccctggccctgtgcctgtgctacctggagcccaaggccgccagcctgagcgccagcctggacaatgaccccagcgacagcagcgaggaggagacagacagcgagaggacagacacagctgctgatggagagaccacagccacagaaagtgaccaggaggaggatgctgagctgaaggcccaggagctggagaagacccaggatgacctgatgaagcaccagaccaacatcagcgagctgaagaggaccttcctggagaccagcacagacacagctgtgaccaatgagtgggagaagaggctgagcaccagccctgtgcggctggccgcccggcaggaggatgcccccatgattgagcccctggtgcctgaggagaccaagcagagcagcggggagaagctgatggatggcagcgagatcttcagcctgctggagagcgccaggaagcccacagagttcatcggcggcgtgaccagcaccagccagagctgggtgcagaagatggagaccaagacagagagcagcggcattgaaacagagcccaccgtgcaccacctgcccctgagcacagagaaggtggtgcaggagaccgtgctggtggaggagaggagagtggtgcacgccagcggagatgccagctacagcgctggggacagcggagatgctgctgcccagcctgccttcaccggcatcaagggcaaggagggcagcgccctgacagagggcgccaaggaggagggcggggaggaggtggccaaggctgtgctggagcaggaggagacagctgctgccagccgggagcggcaggaggagcagagcgctgccatccacatcagcgagaccctggagcagaagccccactttgagagcagcacagtgaagacagagaccatcagctttggatctgtgtccccaggaggagtgaagctggagatcagcaccaaggaggtgcctgtggtgcacacagagaccaagaccatcacctatgagagcagccaggtggaccccggcacagacctggagcccggggtgctgatgtctgcccagaccatcaccagcgagaccaccagcaccaccaccaccacccacatcaccaagacagtgaagggcggcatcagcgagaccagaattgagaagagaattgtcatcactggagatgctgacatcgaccatgaccaggccctggcccaggccatcaaggaggccaaggagcagcacccagacatgtctgtgaccaaggtggtggtgcacaaggagacagagatcaccccagaagatggagaggactag

SEQ ID NO: 151442 - DNA, 3264 bp, synthetic construct; identical to SEQ ID NO: 151441
  misc_feature 1..3264: note = Description of Artificial Sequence: Synthetic coding sequence
  source 1..3264: mol_type = other DNA

SEQ ID NO: 151443 - DNA, 2598 bp, synthetic construct
  misc_feature 1..2598: note = Description of Artificial Sequence: Synthetic coding sequence
  source 1..2598: mol_type = other DNA
atgaccacagaaagtggcagtgacagcgagagcaagccagaccaggaggccgagccccaggaggccgccggggcccagggccgggccggggcccctgtgcctgagccccccaaggaggagcagcagcaggccctggagcagtttgctgctgctgctgcccacagcacccctgtgagaagagaggtgacagacaaggagcaggagtttgctgcccgggccgccaagcagctggagtaccagcagctggaggatgacaagctgagccagaagagcagcagcagcaagctgagccgcagccccctgaagatcgtgaagaagcccaagtccatgcagtgcaaggtgatcctgctggatggcagcgagtacacctgtgatgtggagaagaggagccggggccaggtgctgtttgacaaggtgtgtgagcacctgaacctgctggagaaggactacttcggcctgacctacagagatgctgagaaccagaagaactggctggaccctgccaaggagatcaagaagcaggtgcgcagcggggcctggcacttctccttcaacgtgaagttctaccccccagaccctgcccagctgtctgaggacatcacccgctactacctgtgcctgcagctgagagatgacatcgtgtctggccgcctgccctgcagctttgtgaccctggccctgctgggcagctacacagtgcagagcgagctgggggactatgaccctgatgaatgtggcagtgactacatcagcgagttccgctttgcccccaaccacaccaaggagctggaggacaaggtgattgagctgcacaagagccaccggggcatgaccccagctgaggccgagatgcacttcctggagaatgccaagaagctgtccatgtatggagtggacctgcaccacgccaaggacagcgagggcgtggagatcatgctgggcgtgtgtgccagcggcctgctgatctacagagaccggctgcgcatcaacagatttgcctggcccaaggtgctgaagatctcctacaagaggaacaacttctacatcaagatccggcctggagaatttgagcagtttgagagcaccatcggcttcaagctgcccaaccaccgggccgccaagaggctgtggaaggtgtgtgtggagcaccacaccttcttccggctgctgctgcctgaggccccacccaagaagttcctgaccctgggcagcaagttccgctacagcggccgcacccaggcccagacccggcgggccagcgccctgattgacaggcctgccccctactttgagaggagcagcagcaagcgctacaccatgagccgcagcctggatggagcctctgtgaatgaaaatcatgagatctacatgaaggacagcatgtctgctgctgaggtgggcaccggccagtatgccaccaccaagggcatcagccagaccaacctgatcaccaccgtgaccccagagaagaaggccgaggaggagagagatgaggaggaggacaagagaagaaaaggagaggaggtgacccccatcagcgccatcagacatgagggcaagacagattctgagaggacagacacagctgctgatggagagaccacagccacagaggagctggagaagacccaggatgacctgatgaagcaccagaccaacatcagcgagctgaagaggaccttcctggagaccagcacagacacagctgtgaccaatgagtgggagaagaggctgagcaccagccctgtgcggctggccgcccggcaggaggatgcccccatgattgagcccctggtgcctgaggagaagatggagaccaagacagagagcagcggcattgaaacagagcccaccgtgcaccacctgcccctgagcacagagaaggtggtgcaggagaccgtgctggtggaggagaggagagtggtgcacgccagcggagatgccagctacagcgctggggacagcggagatgctgctgcccagcctgccttcaccggcatcaagggcaaggagggcagcgccctgacagagggcgccaaggaggagggcggggaggaggtggccaaggctgtgctggagcaggaggagacagctgctgccagccgggagcggcaggaggagcagagcgctgccatccacatcagcgagaccctggagcagaagccccactttgagagcagcacagtgaagacagagaccatcagctttggatctgtgtccccaggaggagtgaagctggagatcagcaccaaggaggtgcctgtggtgcacacagagaccaagaccatcacctatgagagcagccaggtggaccccggcacagacctggagcccggggtgctgatgtctgcccagaccatcaccagcgagaccaccagcaccaccaccaccacccacatcaccaagacagtgaagggcggcatcagcgagaccagaattgagaagagaattgtcatcactggagatgctgacatcgaccatgaccaggccctggcccaggccatcaaggaggccaaggagcagcacccagacatgtctgtgaccaaggtggtggtgcacaaggagacagagatcaccccagaagatggagaggactag

SEQ ID NO: 151444 - DNA, 1155 bp, synthetic construct
  misc_feature 1..1155: note = Description of Artificial Sequence: Synthetic coding sequence
  source 1..1155: mol_type = other DNA
atgaagcaccagaccaacatcagcgagctgaagaggaccttcctggagaccagcacagacacagctgtgaccaatgagtgggagaagaggctgagcaccagccctgtgcggctggccgcccggcaggaggatgcccccatgattgagcccctggtgcctgaggagaccaaggaggagacagagatcagcgagaaggtgatcttcctgcagcagggcagcgcccccttcctggagagccagaccaagcagagcagtggagagaagctgatggatggcagcgagatcttcagcctgctggagagcgccaggaagcccacagagttcatcggcggcgtgaccagcaccagccagagctgggtgcagaagatggagaccaagacagagagcagcggcatcgagacagagcccaccgtgcaccacctgcccctgagcacagagaaggtggtgcaggagaccgtgctggtggaggagcggcgggtggtgcacgccagcggagatgccagctacagcgctggggacagcggagatgctgctgcccagcctgccttcaccggcatcaagggcaaggagggcagcgccctgacagaaggagccaaggaggagggcggggaggaggtggccaaggctgtgctggagcaggaggagacagctgctgccagccgggagcggcaggaggagcagagcgctgccatccacatcagcgagaccctggagcagaagccccactttgagagcagcacagtgaagacagagaccatcagctttggatctgtgtcccctgggggcgtgaagctggagatcagcaccaaggaggtgcctgtggtgcacacagagaccaagaccatcacctatgagagcagccaggtggaccctggaacagacctggagcccggggtgctgatgtctgcccagaccatcaccagcgagaccaccagcaccaccaccaccacccacatcaccaagacagtgaagggcggcatcagcgagacccgcatcgagaagagaattgtcatcactggagatgctgacatcgaccatgaccaggccctggcccaggccatcaaggaggccaaggagcagcacccagacatgtctgtgaccaaggtggtggtgcacaaggagacagagatcaccccagaagatggagaagattag

SEQ ID NO: 151445 - DNA, 2271 bp, synthetic construct
  misc_feature 1..2271: note = Description of Artificial Sequence: Synthetic coding sequence
  source 1..2271: mol_type = other DNA
atgcagtgcaaggtgatcctgctggatggcagcgagtacacctgtgatgtggagaagaggagccggggccaggtgctgtttgacaaggtgtgtgagcacctgaacctgctggagaaggactacttcggcctgacctacagagatgctgagaaccagaagaactggctggaccctgccaaggagatcaagaagcaggtgcgcagcggggcctggcacttctccttcaacgtgaagttctaccccccagaccctgcccagctgtctgaggacatcacccgctactacctgtgcctgcagctgagagatgacatcgtgtctggccgcctgccctgcagctttgtgaccctggccctgctgggcagctacacagtgcagagcgagctgggggactatgaccctgatgaatgtggcagtgactacatcagcgagttccgctttgcccccaaccacaccaaggagctggaggacaaggtgattgagctgcacaagagccaccggggcatgaccccagctgaggccgagatgcacttcctggagaatgccaagaagctgtccatgtatggagtggacctgcaccacgccaaggacagcgagggcgtggagatcatgctgggcgtgtgtgccagcggcctgctgatctacagagaccggctgcgcatcaacagatttgcctggcccaaggtgctgaagatctcctacaagaggaacaacttctacatcaagatccggcctggagaatttgagcagtttgagagcaccatcggcttcaagctgcccaaccacagagctgccaagaggctgtggaaggtgtgtgtggagcaccacaccttcttccggctgctgctgcctgaggccccacccaagaagttcctgaccctgggcagcaagttccgctacagcggccgcacccaggcccagacccggcgggccagcgccctgattgacaggcctgccccctactttgagaggagcagcagcaagcgctacaccatgagccgcagcctggatggagcctctgtgaatgaaaaccacgagatctacatgaaggacagcatgtctgctgctgaggtgggcaccggccagtatgccaccaccaagggcatcagccagaccaacctgatcaccaccgtgaccccagagaagaaggccgaggaggagagagatgaggaggaggacaagaggaggaagggggaggaggtgacccccatcagcgccatcagacatgagggcaagacagacagcgagaggacagacacagctgctgatggagagaccacagccacagaggagctggagaagacccaggatgacctgatgaagcaccagaccaacatcagcgagctgaagaggaccttcctggagaccagcacagacacagctgtgaccaatgagtgggagaagaggctgagcaccagccctgtgcggctggccgcccggcaggaggatgcccccatgattgagcccctggtgcctgaggagaagatggagaccaagacagagagcagcggcatcgagacagagcccaccgtgcaccacctgcccctgagcacagagaaggtggtgcaggagaccgtgctggtggaggagcggcgggtggtgcacgccagcggagatgccagctacagcgctggggacagcggagatgctgctgcccagcctgccttcaccggcatcaagggcaaggagggcagcgccctgacagaaggagccaaggaggagggcggggaggaggtggccaaggctgtgctggagcaggaggagacagctgctgccagccgggagcggcaggaggagcagagcgctgccatccacatcagcgagaccctggagcagaagccccactttgagagcagcacagtgaagacagagaccatcagctttggatctgtgtcccctgggggcgtgaagctggagatcagcaccaaggaggtgcctgtggtgcacacagagaccaagaccatcacctatgagagcagccaggtggaccctggaacagacctggagcccggggtgctgatgtctgcccagaccatcaccagcgagaccaccagcaccaccaccaccacccacatcaccaagacagtgaagggcggcatcagcgagacccgcatcgagaagagaattgtcatcactggagatgctgacatcgaccatgaccaggccctggcccaggccatcaaggaggccaaggagcagcacccagacatgtctgtgaccaaggtggtggtgcacaaggagacagagatcaccccagaagatggagaagattag

SEQ ID NO: 151446 - DNA, 1179 bp, synthetic construct
  misc_feature 1..1179: note = Description of Artificial Sequence: Synthetic coding sequence
  source 1..1179: mol_type = other DNA
atgaagcaccagaccaacatcagcgagctgaagaggaccttcctggagaccagcacagacacagctgtgaccaatgagtgggagaagaggctgagcaccagccctgtgcggctggccgcccggcaggaggatgcccccatgattgagcccctggtgcctgaggagcccagcgtcatcaagaagatgcaggagggggacagcgctgacagcgtggtgaccagccggcagatcatcttccagaagacagtgcccagcaccctggagaccaagcagagcagtggagagaagctgatggatggcagcgagatcttcagcctgctggagagcgccaggaagcccacagagttcatcggcggcgtgaccagcaccagccagagctgggtgcagaagatggagaccaagacagagagcagcggcatcgagacagagcccaccgtgcaccacctgcccctgagcacagagaaggtggtgcaggagaccgtgctggtggaggagcggcgggtggtgcacgccagcggagatgccagctacagcgctggggacagcggagatgctgctgcccagcctgccttcaccggcatcaagggcaaggagggcagcgccctgacagaaggagccaaggaggagggcggggaggaggtggccaaggctgtgctggagcaggaggagacagctgctgccagccgggagcggcaggaggagcagagcgctgccatccacatcagcgagaccctggagcagaagccccactttgagagcagcacagtgaagacagagaccatcagctttggatctgtgtcccctgggggcgtgaagctggagatcagcaccaaggaggtgcctgtggtgcacacagagaccaagaccatcacctatgagagcagccaggtggaccctggaacagacctggagcccggggtgctgatgtctgcccagaccatcaccagcgagaccaccagcaccaccaccaccacccacatcaccaagacagtgaagggcggcatcagcgagacccgcatcgagaagagaattgtcatcactggagatgctgacatcgaccatgaccaggccctggcccaggccatcaaggaggccaaggagcagcacccagacatgtctgtgaccaaggtggtggtgcacaaggagacagagatcaccccagaagatggagaagattag

SEQ ID NO: 151447 - DNA, 936 bp, synthetic construct
  misc_feature 1..936: note = Description of Artificial Sequence: Synthetic coding sequence
  source 1..936: mol_type = other DNA
cgctggcagctgggcggggccgccacagctgctgctgggggcgcccgggtgtggaggcccctgcctgccagccgcagcagcttccccccacccagcccccggctggaccctggagaatttgagggcaagagcccctgtggcggcacctgtgagcagccctacctgagcctgcccctgcgctacttcttcagccccaggaaggtggtgcctgctggctgtgagcaggcccctggaggagcccccaaggagggctttggagacagcgacagcgagagcaagccagaccaggaggccgagccccaggaggccgccggggcccagggccgggccggggcccctgtgcctgagccccccaaggaggagcagcagcaggccctggagcagtttgctgctgctgctgcccacagcacccctgtgcggcgggaggtgacagacaaggagcaggagtttgctgcccgggccgccaagcagctggagtaccagcagctggaggatgacaagctgagccagaagagcagcagcagcaagctgagccgcagccccctgaagatcgtgaagaagcccaagtccatgcagtgcaaggtgatcctgctggatggcagcgagtacacctgtgatgtggagaagaggagccggggccaggtgctgtttgacaaggtgtgtgagcacctgaacctgctggagaaggactacttcggcctgacctacagagatgctgagaaccagaagaactggctggaccctgccaaggagatcaagaagcaggtgcgcagcggggcctggcacttctccttcaacgtgaagttctaccccccagaccctgcccagctgtctgaggacatcacccgctactacctgtgcctgcagctgagagatgacatcgtgtctggccgcctgccctgcagctttgtgaccctggccctgctgggcagctag

SEQ ID NO: 151448 - DNA, 2652 bp, synthetic construct
  misc_feature 1..2652: note = Description of Artificial Sequence: Synthetic coding sequence
  source 1..2652: mol_type = other DNA
atgaccacagaaagtggcagtgacagcgagagcaagccagaccaggaggccgagccccaggaggccgccggggcccagggccgggccggggcccctgtgcctgagccccccaaggaggagcagcagcaggccctggagcagtttgctgctgctgctgcccacagcacccctgtgagaagagaggtgacagacaaggagcaggagtttgctgcccgggccgccaagcagctggagtaccagcagctggaggatgacaagctgagccagaagagcagcagcagcaagctgagccgcagccccctgaagatcgtgaagaagcccaagtccatgcagtgcaaggtgatcctgctggatggcagcgagtacacctgtgatgtggagaagaggagccggggccaggtgctgtttgacaaggtgtgtgagcacctgaacctgctggagaaggactacttcggcctgacctacagagatgctgagaaccagaagaactggctggaccctgccaaggagatcaagaagcaggtgcgcagcggggcctggcacttctccttcaacgtgaagttctaccccccagaccctgcccagctgtctgaggacatcacccgctactacctgtgcctgcagctgagagatgacatcgtgtctggccgcctgccctgcagctttgtgaccctggccctgctgggcagctacacagtgcagagcgagctgggggactatgaccctgatgaatgtggcagtgactacatcagcgagttccgctttgcccccaaccacaccaaggagctggaggacaaggtgattgagctgcacaagagccaccggggcatgaccccagctgaggccgagatgcacttcctggagaatgccaagaagctgtccatgtatggagtggacctgcaccacgccaaggacagcgagggcgtggagatcatgctgggcgtgtgtgccagcggcctgctgatctacagagaccggctgcgcatcaacagatttgcctggcccaaggtgctgaagatctcctacaagaggaacaacttctacatcaagatccggcctggagaatttgagcagtttgagagcaccatcggcttcaagctgcccaaccaccgggccgccaagaggctgtggaaggtgtgtgtggagcaccacaccttcttccggctgctgctgcctgaggccccacccaagaagttcctgaccctgggcagcaagttccgctacagcggccgcacccaggcccagacccggcgggccagcgccctgattgacaggcctgccccctactttgagaggagcagcagcaagcgctacaccatgagccgcagcctggatggagcctctgtgaatgaaaatcatgagatctacatgaaggacagcatgtctgctgctgaggtgggcaccggccagtatgccaccaccaagggcatcagccagaccaacctgatcaccaccgtgaccccagagaagaaggccgaggaggagagagatgaggaggaggacaagagaagaaaaggagaggaggtgacccccatcagcgccatcagacatgagggcaagacagattctgagaggacagacacagctgctgatggagagaccacagccacagaaagtgaccaggaggaggatgctgagctgaaggcccaggagctggagaagacccaggatgacctgatgaagcaccagaccaacatcagcgagctgaagaggaccttcctggagaccagcacagacacagctgtgaccaatgagtgggagaagaggctgagcaccagccctgtgcggctggccgcccggcaggaggatgcccccatgattgagcccctggtgcctgaggagaccaagcagagcagtggagagaagctgatggatggcagcgagatcttcagcctgctggagagcgccaggaagcccacagagttcatcggcggcgtgaccagcaccagccagagctgggtgcagaagatggagaccaagacagagagcagcggcatcgagacagagcccaccgtgcaccacctgcccctgagcacagagaaggtggtgcaggagaccgtgctggtggaggagcggcgggtggtgcacgccagcggagatgccagctacagcgctggggacagcggagatgctgctgcccagcctgccttcaccggcatcaagggcaaggagggcagcgccctgacagaaggagccaaggaggagggcggggaggaggtggccaaggctgtgctggagcaggaggagacagctgctgccagccgggagcggcaggaggagcagagcgctgccatccacatcagcgagaccctggagcagaagccccactttgagagcagcacagtgaagacagagaccatcagctttggatctgtgtcccctgggggcgtgaagctggagatcagcaccaaggaggtgcctgtggtgcacacagagaccaagaccatcacctatgagagcagccaggtggaccctggaacagacctggagcccggggtgctgatgtctgcccagaccatcaccagcgagaccaccagcaccaccaccaccacccacatcaccaagacagtgaagggcggcatcagcgagacccgcatcgagaagagaattgtcatcactggagatgctgacatcgaccatgaccaggagtag

SEQ ID NO: 151449 - DNA, 2271 bp, synthetic construct; identical to SEQ ID NO: 151445
  misc_feature 1..2271: note = Description of Artificial Sequence: Synthetic coding sequence
  source 1..2271: mol_type = other DNA

SEQ ID NO: 151450 - DNA, 2166 bp, synthetic construct
  misc_feature 1..2166: note = Description of Artificial Sequence: Synthetic coding sequence
  source 1..2166: mol_type = other DNA
atgggccagggcgagcccagccagaggagcacaggcctggccggcctgtatgctgccccagctgccagccctgtgttcatcaagggcagcggcatggatgccctgggcatcaagagctgtgacttccaggccgccaggaacaatgaggagcaccacaccaaggccctgagcagcagaagactctttgtgcggcggggccagcccttcaccatcatcctgtacttccgggcccctgtgcgggccttcctgcctgccctgaagaaggtggccctgacagcccagacaggagagcagcccagcaagatcaacagaacccaggccaccttccccatcagcagcctgggggacaggaagtggtggagcgctgtggtggaggagagagatgcccagagctggaccatctctgtgaccaccccagcagatgctgtgattggccactacagcctgctgctgcaggtgtctggcaggaagcagctgctgctgggccagttcaccctgctcttcaacccctggaaccgggaggatgctgtgttcctgaagaatgaggcccagaggatggagtacctgctgaaccagaatggcctcatctacctgggcacagctgactgcatccaggccgagagctgggactttggccagtttgaaggagatgtgattgacctgagcctgcggctgctgagcaaggacaagcaggtggagaagtggagccagcctgtgcacgtggcccgggtgctgggcgccctgctgcacttcctgaaggagcagagggtgctgcccaccccccagacccaggccacccaggagggcgccctgctgaacaagagaagaggctctgtgcccatcctgcggcagtggctgaccggccggggccggcctgtgtatgatggccaggcctgggtgctggccgctgtggcctgcaccgtgctgcgctgcctgggcatcccagcccgggtggtgaccacctttgccagcgcccagggcaccggcggccgcctgctgattgatgagtactacaatgaggagggcctgcagaatggagagggccagaggggccgcatctggatcttccagaccagcacagagtgctggatgaccaggcctgccctgccccagggctatgatggctggcagatcctgcaccccagcgccccaaatggaggcggcgtgctgggcagctgtgacctggtgcctgtgcgggctgtgaaggagggcaccctgggcctgaccccagctgtgtctgacctgtttgctgccatcaatgccagctgtgtggtgtggaagtgctgtgaagatggcaccctggagctgacagacagcaacaccaagtatgtgggcaacaacatcagcaccaagggcgtgggcagtgacagatgtgaggacatcacccagaactacaagtacccagagggcagcctgcaggagaaggaggtgctggagcgggtggagaaggagaagatggagcgggagaaggacaatggcatccggccccccagcctggagacagccagccccctgtacctgctgctgaaggcccccagcagcctgcccctgcggggagatgcccagatctctgtgaccctggtgaaccacagcgagcaggagaaggctgtgcagctggccatcggcgtgcaggccgtgcactacaatggagtgctggccgccaagctgtggaggaagaagctgcacctgaccctgagcgccaacctggagaagatcatcaccatcggcctcttcttcagcaactttgagaggaaccccccagagaacaccttcctgcggctgacagccatggccacccacagcgagagcaacctgagctgctttgcccaggaggacatcgccatctgccggccccacctggccatcaagatgcctgagaaggccgagcagtaccagcccctgacagcctctgtgtccctgcagaacagcctggatgcccccatggaggactgtgtgatcagcatcctgggccggggcctcatccaccgggagaggagctaccgcttccgctctgtgtggccagagaacaccatgtgtgccaagttccagttcacccccacccacgtgggcctgcagaggctgactgtggaggtggactgcaacatgttccagaacctgaccaactacaagtctgtgacagtggtggcccctgagctgagcgcctag

SEQ ID NO: 151451 - DNA, 1860 bp, synthetic construct
  misc_feature 1..1860: note = Description of Artificial Sequence: Synthetic coding sequence
  source 1..1860: mol_type = other DNA
atgggccaggccctgggcatcaagagctgtgacttccaggccgccaggaacaatgaggagcaccacaccaaggccctgagcagcagaagactctttgtgcggcggggccagcccttcaccatcatcctgtacttccgggcccctgtgcgggccttcctgcctgccctgaagaaggtggccctgacagcccagacaggagagcagcccagcaagatcaacagaacccaggccaccttccccatcagcagcctgggggacaggaagtggtggagcgctgtggtggaggagagagatgcccagagctggaccatctctgtgaccaccccagcagatgctgtgattggccactacagcctgctgctgcaggtgtctggcaggaagcagctgctgctgggccagttcaccctgctcttcaacccctggaaccgggaggatgctgtgttcctgaagaatgaggcccagaggatggagtacctgctgaaccagaatggcctcatctacctgggcacagctgactgcatccaggccgagagctgggactttggccagtttgaaggagatgtgattgacctgagcctgcggctgctgagcaaggacaagcaggtggagaagtggagccagcctgtgcacgtggcccgggtgctgggcgccctgctgcacttcctgaaggagcagagggtgctgcccaccccccagacccaggccacccaggagggcgccctgctgaacaagagaagaggctctgtgcccatcctgcggcagtggctgaccggccggggccggcctgtgtatgatggccaggcctgggtgctggccgctgtggcctgcaccgtgctgcgctgcctgggcatcccagcccgggtggtgaccacctttgccagcgcccagggcaccggcggccgcctgctgattgatgagtactacaatgaggagggcctgcagaatggagagggccagaggggccgcatctggaagtgctgtgaagatggcaccctggagctgacagacagcaacaccaagtatgtgggcaacaacatcagcaccaagggcgtgggcagtgacagatgtgaggacatcacccagaactacaagtacccagagggcagcctgcaggagaaggaggtgctggagcgggtggagaaggagaagatggagcgggagaaggacaatggcatccggccccccagcctggagacagccagccccctgtacctgctgctgaaggcccccagcagcctgcccctgcggggagatgcccagatctctgtgaccctggtgaaccacagcgagcaggagaaggctgtgcagctggccatcggcgtgcaggccgtgcactacaatggagtgctggccgccaagctgtggaggaagaagctgcacctgaccctgagcgccaacctggagaagatcatcaccatcggcctcttcttcagcaactttgagaggaaccccccagagaacaccttcctgcggctgacagccatggccacccacagcgagagcaacctgagctgctttgcccaggaggacatcgccatctgccggccccacctggccatcaagatgcctgagaaggccgagcagtaccagcccctgacagcctctgtgtccctgcagaacagcctggatgcccccatggaggactgtgtgatcagcatcctgggccggggcctcatccaccgggagaggagctaccgcttccgctctgtgtggccagagaacaccatgtgtgccaagttccagttcacccccacccacgtgggcctgcagaggctgactgtggaggtggactgcaacatgttccagaacctgaccaactacaagtctgtgacagtggtggcccctgagctgagcgcctag

SEQ ID NO: 151452 - DNA, 2076 bp, synthetic construct
  misc_feature 1..2076: note = Description of Artificial Sequence: Synthetic coding sequence
  source 1..2076: mol_type = other DNA
atgggccaggccctgggcatcaagagctgtgacttccaggccgccaggaacaatgaggagcaccacaccaaggccctgagcagcagaagactctttgtgcggcggggccagcccttcaccatcatcctgtacttccgggcccctgtgcgggccttcctgcctgccctgaagaaggtggccctgacagcccagacaggagagcagcccagcaagatcaacagaacccaggccaccttccccatcagcagcctgggggacaggaagtggtggagcgctgtggtggaggagagagatgcccagagctggaccatctctgtgaccaccccagcagatgctgtgattggccactacagcctgctgctgcaggtgtctggcaggaagcagctgctgctgggccagttcaccctgctcttcaacccctggaaccgggaggatgctgtgttcctgaagaatgaggcccagaggatggagtacctgctgaaccagaatggcctcatctacctgggcacagctgactgcatccaggccgagagctgggactttggccagtttgaaggagatgtgattgacctgagcctgcggctgctgagcaaggacaagcaggtggagaagtggagccagcctgtgcacgtggcccgggtgctgggcgccctgctgcacttcctgaaggagcagagggtgctgcccaccccccagacccaggccacccaggagggcgccctgctgaacaagagaagaggctctgtgcccatcctgcggcagtggctgaccggccggggccggcctgtgtatgatggccaggcctgggtgctggccgctgtggcctgcaccgtgctgcgctgcctgggcatcccagcccgggtggtgaccacctttgccagcgcccagggcaccggcggccgcctgctgattgatgagtactacaatgaggagggcctgcagaatggagagggccagaggggccgcatctggatcttccagaccagcacagagtgctggatgaccaggcctgccctgccccagggctatgatggctggcagatcctgcaccccagcgccccaaatggaggcggcgtgctgggcagctgtgacctggtgcctgtgcgggctgtgaaggagggcaccctgggcctgaccccagctgtgtctgacctgtttgctgccatcaatgccagctgtgtggtgtggaagtgctgtgaagatggcaccctggagctgacagacagcaacaccaagtatgtgggcaacaacatcagcaccaagggcgtgggcagtgacagatgtgaggacatcacccagaactacaagtacccagagggcagcctgcaggagaaggaggtgctggagcgggtggagaaggagaagatggagcgggagaaggacaatggcatccggccccccagcctggagacagccagccccctgtacctgctgctgaaggcccccagcagcctgcccctgcggggagatgcccagatctctgtgaccctggtgaaccacagcgagcaggagaaggctgtgcagctggccatcggcgtgcaggccgtgcactacaatggagtgctggccgccaagctgtggaggaagaagctgcacctgaccctgagcgccaacctggagaagatcatcaccatcggcctcttcttcagcaactttgagaggaaccccccagagaacaccttcctgcggctgacagccatggccacccacagcgagagcaacctgagctgctttgcccaggaggacatcgccatctgccggccccacctggccatcaagatgcctgagaaggccgagcagtaccagcccctgacagcctctgtgtccctgcagaacagcctggatgcccccatggaggactgtgtgatcagcatcctgggccggggcctcatccaccgggagaggagctaccgcttccgctctgtgtggccagagaacaccatgtgtgccaagttccagttcacccccacccacgtgggcctgcagaggctgactgtggaggtggactgcaacatgttccagaacctgaccaactacaagtctgtgacagtggtggcccctgagctgagcgcctag

SEQ ID NO: 151453 - DNA, 1842 bp, synthetic construct
  misc_feature 1..1842: note = Description of Artificial Sequence: Synthetic coding sequence
  source 1..1842: mol_type = other DNA
atgggccaggccctgggcatcaagagctgtgacttccaggccgccaggaacaatgaggagcaccacaccaaggccctgagcagcagaagactctttgtgcggcggggccagcccttcaccatcatcctgtacttccgggcccctgtgcgggccttcctgcctgccctgaagaaggtggccctgacagcccagacagaagatgctgtgttcctgaagaatgaggcccagaggatggagtacctgctgaaccagaatggcctcatctacctgggcacagctgactgcatccaggccgagagctgggactttggccagtttgaaggagatgtgattgacctgagcctgcggctgctgagcaaggacaagcaggtggagaagtggagccagcctgtgcacgtggcccgggtgctgggcgccctgctgcacttcctgaaggagcagagggtgctgcccaccccccagacccaggccacccaggagggcgccctgctgaacaagagaagaggctctgtgcccatcctgcggcagtggctgaccggccggggccggcctgtgtatgatggccaggcctgggtgctggccgctgtggcctgcaccgtgctgcgctgcctgggcatcccagcccgggtggtgaccacctttgccagcgcccagggcaccggcggccgcctgctgattgatgagtactacaatgaggagggcctgcagaatggagagggccagaggggccgcatctggatcttccagaccagcacagagtgctggatgaccaggcctgccctgccccagggctatgatggctggcagatcctgcaccccagcgccccaaatggaggcggcgtgctgggcagctgtgacctggtgcctgtgcgggctgtgaaggagggcaccctgggcctgaccccagctgtgtctgacctgtttgctgccatcaatgccagctgtgtggtgtggaagtgctgtgaagatggcaccctggagctgacagacagcaacaccaagtatgtgggcaacaacatcagcaccaagggcgtgggcagtgacagatgtgaggacatcacccagaactacaagtacccagagggcagcctgcaggagaaggaggtgctggagcgggtggagaaggagaagatggagcgggagaaggacaatggcatccggccccccagcctggagacagccagccccctgtacctgctgctgaaggcccccagcagcctgcccctgcggggagatgcccagatctctgtgaccctggtgaaccacagcgagcaggagaaggctgtgcagctggccatcggcgtgcaggccgtgcactacaatggagtgctggccgccaagctgtggaggaagaagctgcacctgaccctgagcgccaacctggagaagatcatcaccatcggcctcttcttcagcaactttgagaggaaccccccagagaacaccttcctgcggctgacagccatggccacccacagcgagagcaacctgagctgctttgcccaggaggacatcgccatctgccggccccacctggccatcaagatgcctgagaaggccgagcagtaccagcccctgacagcctctgtgtccctgcagaacagcctggatgcccccatggaggactgtgtgatcagcatcctgggccggggcctcatccaccgggagaggagctaccgcttccgctctgtgtggccagagaacaccatgtgtgccaagttccagttcacccccacccacgtgggcctgcagaggctgactgtggaggtggactgcaacatgttccagaacctgaccaactacaagtctgtgacagtggtggcccctgagctgagcgcctag

SEQ ID NO: 151454 - DNA, 1218 bp, synthetic construct
  misc_feature 1..1218: note = Description of Artificial Sequence: Synthetic coding sequence
  source 1..1218: mol_type = other DNA
atggagcggctgcagaagcagcccctgaccagccctggctctgtgagccccagccgggacagctctgtgcccggcagccccagcagcatcgtggccaagatggacaaccaggtgctgggctacaaggacctggccgccatccccaaggacaaggccatcctggacatcgagaggccagacctgatgatctatgagccccacttcacctacagcctgctggagcacgtggagctgcccaggagccgggagaggagcctgagccccaagagcaccagccccccacccagccctgaggtgtgggccgacagccgcagccctggcatcatcagccaggccagcgcccccaggaccaccggcacccccaggaccagcctgccccacttccaccaccctgagaccagcaggccagacagcaacatctacaagaagccacccatctacaagcagcgggagagcgtgggcggcagcccccagaccaagcacctgattgaggacctgatcatcgagagcagcaagtttcctgctgcccagcccccagaccccaaccagcctgccaagattgaaacagactactggccctgcccccccagcctggccgtggtggagacagagtggaggaagaggaaggccagcagaagaggagctgaggaggaggaggaggaggaggatgatgacagcggggaggagatgaaggccctgcgggagcggcagcgggaggagctgagcaaggtgaccagcaacctgggcaagatgatcctgaaggaggagatggagaagagcctgcccatccggaggaagaccaggagcctgcctgacaggacccccttccacaccagcctgcaccagggcaccagcaagagcagcagcctgcctgcctacggccgcaccaccctgagccggctgcagagcacagagttcagccccagcggcagcgagaccggcagccctggcctgcagaatggagagggccagaggggccgcatggaccggggcaacagcctgccctgtgtgctggagcagaagatctacccctatgagatgctggtggtgaccaacaagggccgcaccaagctgcccccaggagtggacaggatgaggctggagcggcacctgtctgctgaggacttcagccgggtgtttgccatgagccctgaggagtttgggaagctggccctgtggaagagaaatgagctgaagaagaaggccagcctcttctag

SEQ ID NO: 151455 - DNA, 1218 bp, synthetic construct; identical to SEQ ID NO: 151454
  misc_feature 1..1218: note = Description of Artificial Sequence: Synthetic coding sequence
  source 1..1218: mol_type = other DNA

SEQ ID NO: 151456 - DNA, 1626 bp, synthetic construct
  misc_feature 1..1626: note = Description of Artificial Sequence: Synthetic coding sequence
  source 1..1626: mol_type = other DNA
atgatctatgagccccacttcacctacagcctgctggagcacgtggagctgcccaggagccgggagaggagcctgagccccaagagcaccagccccccacccagccctgaggtgtgggccgacagccgcagccctggcatcatcagccaggccagcgcccccaggaccaccggcacccccaggaccagcctgccccacttccaccaccctgagaccagcaggccagacagcaacatctacaagaagccacccatctacaagcagcgggagagcgtgggcggcagcccccagaccaagcacctgattgaagatctcatcatcgagagcagcaagtttcctgctgcccagcccccagaccccaaccagcctgccaagattgaaacagactactggccctgcccccccagcctggccgtggtggagacagagtggaggaagaggaaggccagcagaagaggagctgaggaggaggaggaggaggaggatgatgattctggagaggagatgaaggccctgcgggagcggcagcgggaggagctgagcaaggtgaccagcaacctgggcaagatgatcctgaaggaggagatggagaagagcctgcccatccggaggaagaccaggagcctgcctgacaggacccccttccacaccagcctgcaccagggcaccagcaagagcagcagcctgcctgcctacggccgcaccaccctgagccggctgcagagcacagagttcagccccagcggcagcgagaccggcagccctggcctgcagaatggagagggccagaggggccgcatggaccggggcaacagcctgccctgtgtgctggagcagaagatctacccctatgagatgctggtggtgaccaacaagggccgcaccaagctgcccccaggagtggacaggatgaggctggagcggcacctgtctgctgaggacttcagccgggtgtttgccatgagccctgaggagtttgggaagctggccctgtggaagagaaatgagctgaagaagaaggccagcctgtttggagccctggtggtgcggcctgtgggctgcctggagcagctggagggccgctgccggggcggcaagaggcctggcaggaagagcagccggctgctgtgcaggcctcccagcccccccatcctgaccccagacagcttccctgccctgcagcccccagcccccctgaccctggtgggcaccggccccagcagcgccagcggccgggaggtgaccccacccctgcagctggccctgaccagcgccaggaagccccgggccagcaagccctttgccccagccctgcggctgccccagaagccaggcctgcgggtggagatgccacccacccatgaccccggccccccaccagccagccggcccagaaatggaaacagcagcaccaagccaggcaccggccagaagctgggcctgcccccacccctggatggagtgaagaggcctggcctggcccactttggagtgtcctggctgcctgccctgacctacacccacgccccaccccacaccctgtgcagcctgaagaatgtcatctactggggcccccccagctgcttcccccacctgcccctgccctacctgaccccaccagcctag

SEQ ID NO: 151457 - DNA, 1152 bp, synthetic construct
  misc_feature 1..1152: note = Description of Artificial Sequence: Synthetic coding sequence
  source 1..1152: mol_type = other DNA
atggagcggctgcagaagcagcccctgaccagccctggctctgtgagccccagccgggacagctctgtgcccggcagccccagcagcatcgtggccaagatggacaaccaggtgctgggctacaaggacctggccgccatccccaaggacaaggccatcctggacatcgagaggccagacctgatgatctatgagccccacttcacctacagcctgctggagcacgtggagctgcccaggagccgggagaggagcctgagccccaagagcaccagccccccacccagccctgaggtgtgggccgacagccgcagccctggcatcatcagccaggccagcgcccccaggaccaccggcacccccaggaccagcctgccccacttccaccaccctgagaccagcaggccagacagcaacatctacaagaagccacccatctacaagcagcgggagagcgtgggcggcagcccccagaccaagcacctgattgaggacctgatcatcgagagcagcaagtttcctgctgcccagcccccagaccccaaccagcctgccaagattgaaacagactactggccctgcccccccagcctggccgtggtggagacagagtggaggaagaggaaggccagcagaagaggagctgaggaggaggaggaggaggaggatgatgacagcggggaggagatgaaggccctgcgggagcggcagcgggaggagctgagcaaggtgaccagcaacctgggcaagatgatcctgaaggaggagatggagaagagcctgcccatccggaggaagaccaggagcctgcctgacaggacccccttccacaccagcctgcaccagggcaccagcaagagcagcagcctgcctgcctacggccgcaccaccctgagccggctgcagagcacagagttcagccccagcggcagcgagaccggcagccctggcctgcagatctacccctatgagatgctggtggtgaccaacaagggccgcaccaagctgcccccaggagtggacaggatgaggctggagcggcacctgtctgctgaggacttcagccgggtgtttgccatgagccctgaggagtttgggaagctggccctgtggaagagaaatgagctgaagaagaaggccagcctcttctag

SEQ ID NO: 151458 - DNA, 1152 bp, synthetic construct; identical to SEQ ID NO: 151457
  misc_feature 1..1152: note = Description of Artificial Sequence: Synthetic coding sequence
  source 1..1152: mol_type = other DNA

SEQ ID NO: 151459 - DNA, 1218 bp, synthetic construct; identical to SEQ ID NO: 151454
  misc_feature 1..1218: note = Description of Artificial Sequence: Synthetic coding sequence
  source 1..1218: mol_type = other DNA

SEQ ID NO: 151460 - DNA, 1077 bp, synthetic construct
  misc_feature 1..1077: note = Description of Artificial Sequence: Synthetic coding sequence
  source 1..1077: mol_type = other DNA
atggagcggctgcagaaggccaagatggacaaccaggtgctgggctacaaggacctggccgccatccccaaggacaaggccatcctggacatcgagaggccagacctgatgatctatgagccccacttcacctacagcctgctggagcacgtggagctgcccaggagccgggagaggagcctgagccccaagagcaccagccccccacccagccctgaggtgtgggccgacagccgcagccctggcatcatcagccaggccagcgcccccaggaccaccggcacccccaggaccagcctgccccacttccaccaccctgagaccagcaggccagacagcaacatctacaagaagccacccatctacaagcagcgggagagcgtgggcggcagcccccagaccaagcacctgattgaagatctcatcatcgagagcagcaagtttcctgctgcccagcccccagaccccaaccagcctgccaagattgaaacagactactggccctgcccccccagcctggccgtggtggagacagagtggaggaagaggaaggccagcagaagaggagctgaggaggaggaggaggaggaggatgatgattctggagaggagatgaaggccctgcgggagcggcagcgggaggagctgagcaaggtgaccagcaacctgggcaagatgatcctgaaggaggagatggagaagagcctgcccatccggaggaagaccaggagcctgcctgacaggacccccttccacaccagcctgcaccagggcaccagcaagagcagcagcctgcctgcctacggccgcaccaccctgagccggctgcagagcacagagttcagccccagcggcagcgagaccggcagccctggcctgcagatctacccctatgagatgctggtggtgaccaacaagggccgcaccaagctgcccccaggagtggacaggatgaggctggagcggcacctgtctgctgaggacttcagccgggtgtttgccatgagccctgaggagtttgggaagctggccctgtggaagagaaatgagctgaagaagaaggccagcctcttctag

SEQ ID NO: 151461 - DNA, 1152 bp, synthetic construct; identical to SEQ ID NO: 151457
  misc_feature 1..1152: note = Description of Artificial Sequence: Synthetic coding sequence
  source 1..1152: mol_type = other DNA

SEQ ID NO: 151462 - DNA, 1218 bp, synthetic construct; identical to SEQ ID NO: 151454
  misc_feature 1..1218: note = Description of Artificial Sequence: Synthetic coding sequence
  source 1..1218: mol_type = other DNA

SEQ ID NO: 151463 - DNA, 1098 bp, synthetic construct
  misc_feature 1..1098: note = Description of Artificial Sequence: Synthetic coding sequence
  source 1..1098: mol_type = other DNA
atggagcggctgcagaaggccaagatggacaaccaggtgctgggctacaaggacctggccgccatccccaaggacaaggccatcctggacatcgagaggccagacctgatgatctatgagccccacttcacctacagcctgctggagcacgtggagctgcccaggagccgggaggtgtgggccgacagccgcagccctggcatcatcagccaggccagcgcccccaggaccaccggcacccccaggaccagcctgccccacttccaccaccctgagaccagcaggccagacagcaacatctacaagaagccacccatctacaagcagcgggagagcgtgggcggcagcccccagaccaagcacctgattgaggacctgatcatcgagagcagcaagtttcctgctgcccagcccccagaccccaaccagcctgccaagattgaaacagactactggccctgcccccccagcctggccgtggtggagacagagtggaggaagaggaaggccagcagaagaggagctgaggaggaggaggaggaggaggatgatgacagcggggaggagatgaaggccctgcgggagcggcagcgggaggagctgagcaaggtgaccagcaacctgggcaagatgatcctgaaggaggagatggagaagagcctgcccatccggaggaagaccaggagcctgcctgacaggacccccttccacaccagcctgcaccagggcaccagcaagagcagcagcctgcctgcctacggccgcaccaccctgagccggctgcagagcacagagttcagccccagcggcagcgagaccggcagccctggcctgcagaatggagagggccagaggggccgcatggaccggggcaacagcctgccctgtgtgctggagcagaagatctacccctatgagatgctggtggtgaccaacaagggccgcaccaagctgcccccaggagtggacaggatgaggctggagcggcacctgtctgctgaggacttcagccgggtgtttgccatgagccctgaggagtttgggaagctggccctgtggaagagaaatgagctgaagaagaaggccagcctcttctag

SEQ ID NO: 151464 - DNA, 570 bp, synthetic construct
  misc_feature 1..570: note = Description of Artificial Sequence: Synthetic coding sequence
  source 1..570: mol_type = other DNA
atggatgctgtggatgccaccatggagaagctgcgggcccagtgcctgagcagaggagccagcggcatccagggcctggcccgcttcttccggcagctggacagagatggcagccgcagcctggatgctgatgagttccggcagggcctggccaagctgggcctggtgctggaccaggccgaggccgagggcgtgtgcaggaagtgggacagaaatggcagcggcaccctggacctggaggagttcctgcgggccctgcggccccccatgagccaggcccgggaggccgtgattgctgctgcctttgccaagctggacagaagtggagatggagtggtgacagtggatgacctgcggggcgtgtacagcggccgggcccaccccaaggtgcgcagcggggagtggacagaagatgaggtgctgcggcgcttcctggacaactttgacagcagcgagaaggatggccaggtgaccctggccgagttccaggactactacagcggcgtgtctgcctccatgaacacagatgaggagtttgtggccatgatgaccagcgcctggcagctgtag

SEQ ID NO: 151465 - DNA, 2565 bp, synthetic construct
  misc_feature 1..2565: note = Description of Artificial Sequence: Synthetic coding sequence
  source 1..2565: mol_type = other DNA
atggccctggagcaggccctgcaggccgcccggcagggcgagctggatgtgctgcggagcctgcatgctgctggcctgctgggccccagcctgcgggaccccctggatgccctgcctgtgcaccacgccgcccgggccggcaagctgcactgcctgcgcttcctggtggaggaggccgccctgcctgctgctgcccgggccagaaatggagccaccccagcccatgatgccagcgccaccggccacctggcctgcctgcagtggctgctgagccagggcggctgccgggtgcaggacaaggacaacagcggggccaccgtgctgcacctggccgcccgcttcggccaccctgaggtggtgaactggctgctgcaccacggcggcggggaccccacagctgccacagacatgggcgccctgcccatccactatgctgctgccaagggggacttccccagcctgcggctgctggtggagcactacccagagggcgtgaatgcccagaccaagaatggagccacccccctgtacctggcctgccaggagggccacctggaggtgacccagtacctggtgcaggagtgtggggctgacccccacgcccgggcccatgatggcatgacccccctgcacgccgccgcccagatgggccacagccctgtgattgtgtggctggtgtcctgcacagatgtgtccctgtctgagcaggacaaggatggagccacagccatgcactttgctgccagccggggccacaccaaggtgctgtcctggctgctgctgcacggcggggagatctctgctgacctgtggggcggcacccccctgcatgatgctgctgaaaatggagagctggagtgctgccagatcctggtggtgaatggagctgagctggatgtgcgggacagagatggctacacagctgctgacctgagtgacttcaacggccacagccactgcacccgctacctgaggacagtggagaacctgtctgtggagcaccgggtgctgagccgggaccccagcgctgagctggaggccaagcagcctgacagcggcatgagcagccccaacaccaccgtgtctgtgcagcccctgaactttgacctgagcagccccaccagcaccctgagcaactatgacagctgcagcagcagccacagcagcatcaagggccagcaccccccctgtggcctgagcagcgcccgggctgctgacatccagagctacatggacatgctgaaccctgagctgggcctgccccggggcaccatcggcaagcccaccccacctcctcctccacccagcttccccccacctcctcctcctcctggcacccagctgcccccacctcctcctggctacccagcccccaagccccctgtgggcccccaggccgctgacatctacatgcagaccaagaacaagctgcggcacgtggagacagaggccctgaagaaggagctgagcagctgtgatggccatgatggcctgcggcggcaggacagcagcaggaagccccgggccttcagcaagcagcccagcactggagactactaccggcagctgggccgctgccctggagagaccctggccgcccggcccggcatggcccacagcgaggaggtgcgggcccggcagcctgcccgggccggctgcccccggctgggccctgctgcccggggcagcctggagggccccagcgccccaccccaggccgccctgctgcccggcaaccacgtgcccaacggctgtgccgctgaccccaaggccagccgggagctgcccccacctcctcctcctcctcctccacccctgcctgaggccgccagcagccccccaccagccccacccctgcccctggagagcgctggccctggctgcggccagaggaggagcagcagcagcacaggcagcaccaagagcttcaacatgatgagccccactggagacaacagcgagctgctggccgagatcaaggccggcaagagcctgaagcccaccccccagagcaagggcctgaccaccgtcttctctggaattggccagcctgccttccagcctgacagccccctgcccagcgtgtccccagccctgagccctgtgcgcagccccaccccacctgctgctggcttccagcccctgctgaatggcagcctggtgcctgtgccccccaccaccccagcccctggggtgcagctggatgtggaggccctgatccccacccatgatgagcagggccggcccatccctgagtggaagaggcaggtgatggtgaggaagatgcagctgaagatgcaggaggaggaggagcagaggaggaaggaggaggaggaggaggcccggctggcctccatgcctgcctggaggcgggacctgctgaggaagaagctggaggaggagcgggagcagaagaggaaggaggaggagcggcagaagcaggaggagctgcggcgggagaaggagcagagcgagaagctgcggaccctgggctatgatgagagcaagctggccccctggcagaggcaggtgatcctgaagaagggggacatcgccaagtactag

SEQ ID NO: 151466 - DNA, 867 bp, synthetic construct
  misc_feature 1..867: note = Description of Artificial Sequence: Synthetic coding sequence
  source 1..867: mol_type = other DNA
atggcccacagcgaggaggccgccctgctgcccggcaaccacgtgcccaacggctgtgccgctgaccccaaggccagccgggagctgcccccacctcctcctcctcctcctccacccctgcctgaggccgccagcagccccccaccagccccacccctgcccctggagagcgctggccctggctgcggccagaggaggagcagcagcagcacaggcagcaccaagagcttcaacatgatgagccccactggagacaacagcgagctgctggccgagatcaaggccggcaagagcctgaagcccaccccccagagcaagggcctgaccaccgtcttctctggaattggccagcctgccttccagcctgacagccccctgcccagcgtgtccccagccctgagccctgtgcgcagccccaccccacctgctgctggcttccagcccctgctgaatggcagcctggtgcctgtgccccccaccaccccagcccctggggtgcagctggatgtggaggccctgatccccacccatgatgagcagggccggcccatccctgagtggaagaggcaggtgatggtgaggaagatgcagctgaagatgcaggaggaggaggagcagaggaggaaggaggaggaggaggaggcccggctggcctccatgcctgcctggaggcgggacctgctgaggaagaagctggaggaggagcgggagcagaagaggaaggaggaggagcggcagaagcaggaggagctgcggcgggagaaggagcagagcgagaagctgcggaccctgggctatgatgagagcaagctggccccctggcagaggcaggtgatcctgaagaagggggacatcgccaagtactag

SEQ ID NO: 151467 - DNA, 645 bp, synthetic construct
  misc_feature 1..645: note = Description of Artificial Sequence: Synthetic coding sequence
  source 1..645: mol_type = other DNA
gatggcatgacccccctgcacgccgccgcccagatgggccacagccctgtgattgtgtggctggacaaggatggagccacagccatgcactttgctgccagccggggccacaccaaggtgctgtcctggctgctgctgcatggaggagagatctctgctgacctgtggggcggcacccccctgcatgatgctgctgaaaatggagagctggagtgctgccagatcctggtggtgaatggagctgagctggatgtgcgggacagagatggctacacagctgctgacctgagtgacttcaacggccacagccactgcacccgctacctgaggacagtggagaacctgtctgtggagcaccgggtgctgagccgggaccccagcgctgagctggaggccaagcagccagattctggcatgagcagccccaacaccaccgtgtctgtgcagcccctgaactttgacctgagcagccccaccagcaccctgagcaactatgacagctgcagcagcagccacagcagcatcaagggccagcaccccccctgtggcctgagcagcgcccgggctgctgacatccagagctacatggacatgctgaaccctgagctgggcctgccccggggcaccatcggcaagcccacctag

SEQ ID NO: 151468 - DNA, 567 bp, synthetic construct
  misc_feature 1..567: note = Description of Artificial Sequence: Synthetic coding sequence
  source 1..567: mol_type = other DNA
tgagaaatcaaggccggcaagagcctgaagcccaccccccagagcaagggcctgaccaccgtcttctctggaattggccagcctgccttccagcctgacagccccctgcccagcgtgtccccagccctgagccctgtgcgcagccccaccccacctgctgctggcttccagcccctgctgaatggcagcctggtgcctgtgccccccaccaccccagcccctggggtgcagctggatgtggaggccctgatccccacccatgatgagcagggccggcccatccctgagtggaagaggcaggtgatggtgaggaagatgcagctgaagatgcaggaggaggaggagcagaggaggaaggaggaggaggaggaggcccggctggcctccatgcctgcctggaggcgggacctgctgaggaagaagctggaggaggagcgggagcagaagaggaaggaggaggagcggcagaagcaggaggagctgcggcgggagaaggagcagagcgagaagctgcggaccctgggctatgatgagagcaagctggccccctggcagaggcagatctag

SEQ ID NO: 151469 - DNA, 1335 bp, synthetic construct
  misc_feature 1..1335: note = Description of Artificial Sequence: Synthetic coding sequence
  source 1..1335: mol_type = other DNA
atggcccgggtgggccctggccgggccggcgtgtcctgccagggccggggccggggccggggcggcagcggccagaggcggccccccacctgggagatcagtgacagtgatgctgaagattctgctggcagcgaggccgccgcccgggcccgggaccctgctggggagaggagagctgctgctgaggccctgcggctgctgcggcctgagcaggtgctgaagaggctggccgtgtgtgtggacacagccatcctggaggatgctggagcagatgtgctgatggaggccctggaggccctgggctgtgaatgtcgcatcgagccccagaggcctgcccggagcctgcgctggacccgggccagcccagacccctgccccaggagcctgcccccagaggtgtgggccgccggggagcaggagctgctgctgctgctggagcctgaggagttcctgcagggcgtggccaccctgacccagatcagcggccccacccactgggtgccctggatcagccctgagaccacagcccggccccacctggccgtgattggcctggatgcctacctgtggtaccgcagcctgagctgcccccagcagggctggctgggccggggcttccggggcggcggcctgtggcagaggcccagcagcggccgggccggccccatgggcagcggggaggagtggagccccctgctgcggagccggcagcacgtgtcccggggcacccagcagcctgagagccccaaggtggccggggctgaggtggccgtgtcctggccagaggtggaggaggtgcgggcctgcctgtcctgggccctggtgctgctgcagctgtgggccaacctggatgtgctgctggtggcctcctggcaggagctgagcagacatgtgtgtgctgtgaccaaggccctggcccagtaccccctgaagtgtgtgatgccccggctgaagggcggccgcatcaccagccggcagtaccgggagagccaggccttctccttctgcacagctggccgctgggccgccggggagcctgtggccagagatggagctggcctgcaggccgcctggaggcggcagatccggcagttcagccgggtgtccccagctgtggctgatgctgtggtgacagccttccccagcccccggctgctgcagcaggccctggaggcctgcagcacagagcgggagaggatgggcctgctggccgacctgcctgtgcccccatctgagggcggccggcccaggagagtgggccctgacctgagccgccgcatctgcctcttcctgaccacagccaacccagacctgctgctggacctgggcagctag

SEQ ID NO: 151470 - DNA, 1161 bp, synthetic construct
  misc_feature 1..1161: note = Description of Artificial Sequence: Synthetic coding sequence
  source 1..1161: mol_type = other DNA
atggcccgggtgggccctggccgggccggcgtgtcctgccagggccggggccggggccggggcggcagcggccagaggcggccccccacctgggagatcagtgacagtgatgctgaagattctgctggcagcgaggccgccgcccgggcccgggaccctgctggggagaggagagctgctgctgaggccctgcggctgctgcggcctgagcaggtgctgaagaggctggccgtgtgtgtggacacagccatcctggaggatgctggagcagatgtgctgatggaggccctggaggccctgggctgtgaatgtcgcatcgagccccagaggcctgcccggagcctgcgctggacccgggccagcccagacccctgccccaggagcctgcccccagaggtgtgggccgccggggagcaggagctgctgctgctgctggagcctgaggagttcctgcagggcgtggccaccctgacccagatcagcggccccacccactgggtgccctggatcagccctgagaccacagcccggccccacctggccgtgattggcctggatgcctacctgtggagccggcagcacgtgtcccggggcacccagcagcctgagagccccaaggtggccggggctgaggtggccgtgtcctggccagaggtggaggaggtgcgggcctgcctgtcctgggccctggtgctgctgcagctgtgggccaacctggatgtgctgctggtggcctcctggcaggagctgagcagacatgtgtgtgctgtgaccaaggccctggcccagtaccccctgaagtgtgtgatgccccggctgaagggcggccgcatcaccagccggcagtaccgggagagccaggccttctccttctgcacagctggccgctgggccgccggggagcctgtggccagagatggagctggcctgcaggccgcctggaggcggcagatccggcagttcagccgggtgtccccagctgtggctgatgctgtggtgacagccttccccagcccccggctgctgcagcaggccctggaggcctgcagcacagagcgggagaggatgggcctgctggccgtgggccctgacctgagccgccgcatctgcctcttcctgaccacagccaacccagacctgctgctggacctgggcagctag

SEQ ID NO: 151471 - DNA, 2523 bp, synthetic construct
  misc_feature 1..2523: note = Description of Artificial Sequence: Synthetic coding sequence
  source 1..2523: mol_type = other DNA
atgatgagcatccaggagaagagcaaggagaacagcagcaaggtgaccaagaagagtgatgacaagaacagcgagacagagatccaggacagccagaagaacctggccaagaagagcggccccaaggagaccatcaagagccaggccaagagcagcagcgagagcaagatcaaccagcctgagctggagaccaggatgagcaccaggagcagcaaggccgccagcaatgacaaggccaccaagagcatcaacaagaacacagtgacagtgcggggctacagccaggagagcaccaagaagaagctgagccagaagaagctggtgcatgagaaccccaaggccaatgagcagctgaacagaagaagccagaggctgcagcagctgacagaggtgtccagaagaagcctgcggagccgggagatccagggccaggtgcaggccgtgaagcagagcctgccccccaccaagaaggagcagtgcagcagcacccagagcaagagcaacaagaccagccagaagcacgtgaagaggaaggtgctggaggtgaagagtgacagcaaggaggatgagaacctggtgatcaatgaagtcatcaacagccccaagggcaagaagaggaaggtggagcaccagacagcctgtgcctgcagcagccagtgcacccagggcagcgagaagtgcccccagaagaccaccaggagagatgagaccaagcctgtgcctgtgaccagcgaggtgaagaggagcaagatggccacctctgtggtgcccaagaagaatgagatgaagaagtctgtgcacacccaggtgaacaccaacaccaccctgcccaagagcccccagcccagcgtgcctgagcagagcgacaatgagctggagcaggccggcaagagcaagaggggcagcatcctgcagctgtgtgaggagattgctggggagattgaaagtgacaacgtggaggtgaagaaggagagcagccagatggagagcgtgaaggaggagaagcccacagagatcaagctggaggagacctctgtggagcggcagatcctgcaccagaaggagaccaaccaggatgtgcagtgcaaccgcttcttccccagcaggaagaccaagcctgtgaagtgcatcctgaatggcatcaacagcagcgccaagaagaacagcaactggaccaagatcaagctgagcaagttcaacagcgtgcagcacaacaagctggacagccaggtgagccccaagctgggcctgctgcggaccagcttcagccccccagccctggagatgcaccaccctgtgacccagagcaccttcctgggcaccaagctgcatgacaggaacatcacctgccagcaggagaagatgaaggagatcaacagcgaggaggtgaagatcaatgacatcaccgtggagatcaacaagaccacagagcgggcccctgagaactgccacctggccaatgagatcaagcccagcgacccccccctggacaaccagatgaagcacagctttgacagcgccagcaacaagaacttcagccagtgcctggagagcaagctggagaacagccctgtggagaatgtgacagctgccagcaccctgctgagccaggccaagattgacaccggggagaacaagtttcctggcagcgccccccagcagcacagcatcctgagcaaccagaccagcaagagcagtgacaaccgggagaccccaagaaaccacagcctgcccaagtgcaacagccacctggagatcaccatccccaaggacctgaagctgaaggaggccgagaagacagatgagaagcagctgatcattgatgctggccagaagagatttggagctgtgtcctgcaatgtgtgtggcatgctgtacacagccagcaacccagaagatgagacccagcacctgctcttccacaaccagttcatctctgctgtgaagtatgtgggctggaagaaggagcgcatcctggccgagtacccagatggccgcatcatcatggtgctgcctgaggaccccaagtatgccctgaagaaggtggatgagatccgggagatggtggacaatgacctgggcttccagcaggcccccctgatgtgctacagcaggaccaagaccctgctcttcatcagcaatgacaagaaggtggtgggctgcctgattgctgagcacatccagtggggctacagagtcatcgaggagaagctgcctgtgatccgctctgaggaggagaaggtgcgctttgagcggcagaaggcctggtgctgcagcaccctgcctgagcccgccatctgtggcatcagccgcatctgggtgttctccatgatgaggaggaagaagatcgccagcaggatgattgaatgtctgcggagcaacttcatctacggcagctacctgagcaaggaggagatcgccttcagtgaccccaccccagatggcaagctgtttgccacccagtactgcggcaccggccagttcctggtgtacaacttcatcaatggccagaacagcacctag

SEQ ID NO: 151472 - DNA, 2106 bp, synthetic construct
  misc_feature 1..2106: note = Description of Artificial Sequence: Synthetic coding sequence
  source 1..2106: mol_type = other DNA
atgatgagcatccaggagaagagcaaggagaacagcagcaaggtgaccaagaagagtgatgacaagaacagcgagacagagatccaggacagccagaagaacctggccaagaagagcggccccaaggagaccatcaagagccaggccaagagcagcagcgagagcaagatcaaccagcctgagctggagaccaggatgagcaccaggagcagcaaggccgccagcaatgacaaggccaccaagagcatcaacaagaacacagtgacagtgcggggctacagccaggagagcaccaagaagaagctgagccagaagaagctggtgcatgagaaccccaaggccaatgagcagctgaacagaagaagccagaggctgcagcagctgacagaggtgtccagaagaagcctgcggagccgggagatccagggccaggtgcaggccgtgaagcagagcctgccccccaccaagaaggagcagtgcagcagcacccagagcaagagcaacaagaccagccagaagcacgtgaagaggaaggtgctggaggtgaagagtgacagcaaggaggatgagaacctggtgatcaatgaagtcatcaacagccccaagggcaagaagaggaaggtggagcaccagacagcctgtgcctgcagcagccagtgcacccagggcagcgagaagtgcccccagaagaccaccaggagagatgagaccaagcctgtgcctgtgaccagcgaggtgaagaggagcaagatggccacctctgtggtgcccaagaagaatgagatgaagaagtctgtgcacacccaggtgaacaccaacaccaccctgcccaagagcccccagcccagcgtgcctgagcagagcgacaatgagctggagcaggccggcaagagcaagaggggcagcatcctgcagctgtgtgaggagattgctggggagattgaaagtgacaacgtggaggtgaagaaggagagcagccagatggagagcgtgaaggaggagaagcccacagagatcaagctggaggagacctctgtggagcggcagatcctgcaccagaaggagaccaaccaggatgtgcagtgcaaccgcttcttccccagcaggaagaccaagcctgtgaagtgcatcctgaatggcatcaacagcagcgccaagaagaacagcaactggaccaagatcaagctgagcaagttcaacagcgtgcagcacaacaagctggacagccaggtgagccccaagctgggcctgctgcggaccagcttcagccccccagccctggagatgcaccaccctgtgacccagagcaccttcctgggcaccaagctgcatgacaggaacatcacctgccagcaggagaagatgaaggagatcaacagcgaggaggtgaagatcaatgacatcaccgtggagatcaacaagaccacagagcgggcccctgagaactgccacctggccaatgagatcaagcccagcgacccccccctggacaaccagatgaagcacagctttgacagcgccagcaacaagaacttcagccagtgcctggagagcaagctggagaacagccctgtggagaatgtgacagctgccagcaccctgctgagccaggccaagattgacaccggggagaacaagtttcctggcagcgccccccagcagcacagcatcctgagcaaccagaccagcaagagcagtgacaaccgggagaccccaagaaaccacagcctgcccaagtgcaacagccacctggagatcaccatccccaaggacctgaagctgaaggaggccgagaagacagatgagaagcagctgatcattgatgctggccagaagagatttggagctgtgtcctgcaatgtgtgtggcatgctgtacacagccagcaacccagaagatgagacccagcacctgctcttccacaaccagttcatctctgctgtgaagtatgtggtgctgctgatcaaccaccatgaatgtggcagcgaggaggagttcatcaccagcctcttcctgtccatgttcaacttccgctacacccagaggagcttctccttccccatccgcttcctggagggcctggaggagaggaagaacagcggctag

SEQ ID NO: 151473 - DNA, 1806 bp, synthetic construct
  misc_feature 1..1806: note = Description of Artificial Sequence: Synthetic coding sequence
  source 1..1806: mol_type = other DNA
atggccgccctgacccccaggaagaggaagcaggacagcctgaagtgtgacagcctgctgcacttcacagagaacctcttccccagccccaacaagaagcactgcttctaccagaacagcgacaagaatgaggagaacctgcactgcagccagcaggagcactttgtgctgagcgccctgaagaccacagagatcaaccggctgcccagcgccaaccagggcagccccttcaagagcgccctgagcacagtgtccttctacaaccagaacaagtggtacctgaaccccctggagaggaagctgatcaaggagagccgcagcacctgcctgaagaccaatgatgaggacaagagcttccccatcgtgacagagaagatgcagggcaagcctgtgtgcagcaagaagaacaacaagaagccccagaagagcctgacagccaagtaccagcccaagtaccgccacatcaagcctgtgtccaggaacagcaggaacagcaagcagaacagagtcatctacaagcccatcgtggagaaggagaacaactgccacagcgctgagaacaacagcaatgccccccgggtgctgagccagaagatcaagccccaggtgaccctgcagggcggggccgccttctttgtgaggaagaagagcagcctgaggaagagcagcctggagaatgagcccagcctgggccgcacccagaagagcaagtctgaggtgattgaggacagtgatgtggagaccgtgtctgagaagaagacctttgccacccggcaggtgcccaagtgcctggtgctggaggagaagctgaagattggcctgctgagcgccagcagcaagaacaaggagaagctgatcaaggacagcagtgatgacagagtgagcagcaaggagcacaaggtggacaagaatgaggccttcagcagcgaggacagcctgggggagaacaagaccatcagccccaagagcacagtgtaccccatcttcagcgccagctctgtgaacagcaagaggagcctgggggaggagcagttctctgtgggctctgtgaacttcatgaagcagaccaacatccagaagaacaccaacacccgggacaccagcaagaagaccaaggaccagctgatcattgatgctggccagaagcactttggagccaccgtgtgcaagagctgtggcatgatctacacagccagcaacccagaagatgagatgcagcacgtgcagcaccaccaccgcttcctggagggcatcaagtatgtgggctggaagaaggagcgggtggtggccgagttctgggatggcaagatcgtgctggtgctgccccatgaccccagctttgccatcaagaaggtggaggatgtgcaggagctggtggacaatgagctgggcttccagcaggtggtgcccaagtgccccaacaagatcaagaccttcctgttcatcagtgatgagaagagggtggtgggctgcctgattgctgagcccatcaagcaggccttccgggtgctgtctgagcccatcggccctgagagccccagcagcacagaatgtccccgggcctggcagtgcagtgatgtgcctgagcctgctgtgtgtggcatcagccgcatctgggtgttccggctgaagaggaggaagagaattgcccggcggctggtggacaccctgaggaactgcttcatgtttggctgcttcctgagcacagatgagatcgccttcagtgaccccaccccagatggcaagctgtttgccaccaagtactgcaacacccccaacttcctggtgtacaacttcaacagctag

SEQ ID NO: 151474 - DNA, 720 bp, synthetic construct
  misc_feature 1..720: note = Description of Artificial Sequence: Synthetic coding sequence
  source 1..720: mol_type = other DNA
atgaagcagaccaacatccagaagaacaccaacacccgggacaccagcaagaagaccaaggaccagctgatcattgatgctggccagaagcactttggagccaccgtgtgcaagagctgtggcatgatctacacagccagcaacccagaagatgagatgcagcacgtgcagcaccaccaccgcttcctggagggcatcaagtatgtgggctggaagaaggagcgggtggtggccgagttctgggatggcaagatcgtgctggtgctgccccatgaccccagctttgccatcaagaaggtggaggatgtgcaggagctggtggacaatgagctgggcttccagcaggtggtgcccaagtgccccaacaagatcaagaccttcctgttcatcagtgatgagaagagggtggtgggctgcctgattgctgagcccatcaagcaggccttccgggtgctgtctgagcccatcggccctgagagccccagcagcacagaatgtccccgggcctggcagtgcagtgatgtgcctgagcctgctgtgtgtggcatcagccgcatctgggtgttccggctgaagaggaggaagagaattgcccggcggctggtggacaccctgaggaactgcttcatgtttggctgcttcctgagcacagatgagatcgccttcagtgaccccaccccagatgactgccggcggctgaaccgctaccaggagacctag

SEQ ID NO: 151475 - DNA, 849 bp, synthetic construct
  misc_feature 1..849: note = Description of Artificial Sequence: Synthetic coding sequence
  source 1..849: mol_type = other DNA
atggccctgaagcagatcagcagcaacaagtgcttcggcggcctgcagaaggtgtttgaacatgattctgtggagctgaactgcaagatgaagtttgctgtgtacctgccccccaaggccgagaccgggaagtgcccagccctgtactggctgagcggcctgacctgcacagagcagaacttcatcagcaagagcggctaccaccagagcgccagcgagcacggcctggtggtgattgccccagacaccagcccccggggctgcaacatcaagggagaagatgagagctgggactttggaactggagctggcttctacgtggatgccacagaggacccctggaagaccaactacaggatgtacagctatgtgacagaggagctgccccagctgatcaatgccaacttccctgtggacccccagaggatgagcatcttcggccacagcatgggcggccatggagccctgatctgtgccctgaagaaccctgggaagtacaagtctgtgtctgcctttgcccccatctgcaaccctgtgctgtgcccctggggcaagaaggccttcagcggctacctgggcacagaccagagcaagtggaaggcctatgatgccacccacctggtgaagagctacccaggcagccagctggacatcctgattgaccagggcaaggatgaccagttcctgctggatggccagctgctgcctgacaacttcatcgccgcctgcacagagaagaagatccctgtggtgttccggctgcaggagggctatgaccacagctactacttcatcgccaccttcatcacagaccacatccgccaccacgccaagtacctgaatgcctag

SEQ ID NO: 151476 - DNA, 642 bp, synthetic construct
  misc_feature 1..642: note = Description of Artificial Sequence: Synthetic coding sequence
  source 1..642: mol_type = other DNA
atggccatcacccagttccgcctcttcaagttctgcacctgcctggccaccgtcttctccttcctgaagaggctcatctgccgcagcggccggggcaggaagctgagcggggaccagatcaccctgcccaccaccgtggactacagctctgtgcccaagcagacagatgtggaggagtggacctcctgggatgaagatgcccccacctctgtgaagattgaaggaggaaatggaaatgtggccacccagcagaacagcctggagcagctggagccagactacttcaaggacatgacccccaccatcaggaagacccagaagatcgtcatcaagaagcgggagcccctgaactttggcatcccagatggcagcacaggcttcagcagccggctggccgccacccaggacctgcccttcatccaccagagcagcgagctgggggacctggacacctggcaggagaacaccaatgcctgggaggaggaggaggatgctgcctggcaggccgaggaggtgctgcggcagcagaagctggccgaccgggagaagagagctgctgagcagcagaggaagaagatggagaaggaggcccagaggctgatgaagaaggagcagaacaagattggagtgaagctgtcctag

SEQ ID NO: 151477 - DNA, 642 bp, synthetic construct; identical to SEQ ID NO: 151476
  misc_feature 1..642: note = Description of Artificial Sequence: Synthetic coding sequence
  source 1..642: mol_type = other DNA

SEQ ID NO: 151478 - DNA, 594 bp, synthetic construct
  misc_feature 1..594: note = Description of Artificial Sequence: Synthetic coding sequence
  source 1..594: mol_type = other DNA
atggccatcacccagttccgcctcttcaagttctgcacctgcctggccaccgtcttctccttcctgaagaggctcatctgccgcagcggccggggcaggaagctgagcggggaccagatcaccctgcccaccaccgtggactacagctctgtgcccaagcagacagatgtggaggagtggacctcctgggatgaagatgcccccacctctgtgaagattgaaggaggaaatggaaatgtggccacccagcagaacagcctggagcagctggagccagactacttcaaggacatgacccccaccatcaggaagacccagaagatcgtcatcaagaagcgggagcccctgaactttggcatcccagatggcagcacaggcttcagcagccggctggccgccacccaggacctgcccttcatccaccagagcagcgagctgggggacctggacacctggcaggagaacaccaatgcctgggaggaggaggaggatgctgcctggcaggccgaggaggtgctgcggcagcagaagctggccgaccgggagaagagagctgctgagcagcagaggaagaagatggagaaggaggcctag

SEQ ID NO: 151479 - DNA, 777 bp, synthetic construct
  misc_feature 1..777: note = Description of Artificial Sequence: Synthetic coding sequence
  source 1..777: mol_type = other DNA
atggccatcacccagttccgcctcttcaagttctgcacctgcctggccaccgtcttctccttcctgaagaggctcatctgccgcagcggccggggcaggaagctgagcggggaccagatcaccctgcccaccaccgtggactacagctctgtgcccaagcagacagatgtggaggagtggacctcctgggatgaagatgcccccacctctgtgaagattgaaggaggaaatggaaatgtggccacccagcagaacagcctggagcagctggagccagactacttcaaggacatgacccccaccatcaggaagacccagaagatcgtcatcaagaagcgggagcccctgaactttggcatcccagatggcagcacaggcttcagcagccggctggccgccacccaggacctgcccttcatccaccagagcagcgagctgggggacctggacacctggcaggagaacaccaatgcctgggaggaggaggaggatgctgcctggcaggccgaggaggtgctgcggagcaggaccaacgtgtgcctgctgtgcagcctgctcttccaccaccccacccccaccagcaccccctacatcaaccagagcgtgaagattgaaagagtgtccctgggccagtggagctatggcaagagcaaggagcagcagaagctggccgaccgggagaagagagctgctgagcagcagaggaagaagatggagaaggaggcccagaggctgatgaagaaggagcagaacaagattggagtgaagctgtcctag

SEQ ID NO: 151480 - DNA, 237 bp, synthetic construct
  misc_feature 1..237: note = Description of Artificial Sequence: Synthetic coding sequence
  source 1..237: mol_type = other DNA
atggccatcacccagttccgcctcttcaagttctgcacctgcctggccaccgtcttctccttcctgaagaggctcatctgccgcagcggccggggcaggaagctgagcggggaccagatcaccctgcccaccaccgtggactacagctctgtgcccaagcagacagatgtggaggagtggacctcctgggatgaagatgcccccacctctgtgaagattgaaggaggaaatggatag

SEQ ID NO: 151481 - DNA, 1272 bp, synthetic construct
  misc_feature 1..1272: note = Description of Artificial Sequence: Synthetic coding sequence
  source 1..1272: mol_type = other DNA
atgagcagccaggtggtgggcatcgagcccctgtacatcaaggccgagcccgccagcccagacagccccaagggcagcagcgagacagaaacagagccccctgtggccctggcccctggccctgcccccacccgctgcctgcccggccacaaggaggaggaggatggagagggcgccggccctggagagcagggcggcggcaagctggtgctgagcagcctgcccaagaggctgtgcctggtgtgtggagatgtggccagcggctaccactatggagtggccagctgtgaggcctgcaaggccttcttcaagaggaccatccagggcagcattgagtacagctgcccagccagcaatgaatgtgagatcaccaagagaagaaggaaggcctgccaggcctgccgcttcaccaagtgcctgcgggtgggcatgctgaaggagggcgtgcggctggacagagtgcggggcggccggcagaagtacaagagaagacctgaggtggaccccctgcccttccctggccccttccctgctggccccctggccgtggccggcggccccaggaagacagctgcccctgtgaatgccctggtgagccacctgctggtggtggagcctgagaagctgtatgccatgccagaccctgctggcccagatggccacctgcctgctgtggccaccctgtgtgacctgtttgaccgggagatcgtggtgaccatctcctgggccaagagcatccctggcttcagcagcctgagcctgagtgaccagatgtctgtgctgcagagcgtgtggatggaggtgctggtgctgggcgtggcccagaggagcctgcccctgcaggatgagctggcctttgctgaggacctggtgctggatgaggagggcgcccgggccgccggcctgggggagctgggcgccgccctgctgcagctggtgcggcggctgcaggccctgcggctggagcgggaggagtatgtgctgctgaaggccctggccctggccaacagcgacagcgtgcacattgaagatgctgaggccgtggagcagctgcgggaggccctgcacgaggccctgctggagtatgaggccggccgggccggccctgggggcggcgctgagcggcggcgggccggccgcctgctgctgaccctgcccctgctgcggcagacagctgggaaggtgctggcccacttctacggcgtgaagctggagggcaaggtgcccatgcacaagctgttcctggagatgctggaggccatgatggactag

SEQ ID NO: 151482 - DNA, 1272 bp, synthetic construct; identical to SEQ ID NO: 151481
  misc_feature 1..1272: note = Description of Artificial Sequence: Synthetic coding sequence
  source 1..1272: mol_type = other DNA

SEQ ID NO: 151483 - DNA, 1269 bp, synthetic construct
  misc_feature 1..1269: note = Description of Artificial Sequence: Synthetic coding sequence
  source 1..1269: mol_type = other DNA
atgagcagccaggtggtgggcatcgagcccctgtacatcaaggccgagcccgccagcccagacagccccaagggcagcagcgagacagaaacagagccccctgtggccctggcccctggccctgcccccacccgctgcctgcccggccacaaggaggaggaggatggagagggcgccggccctggagagcagggcggcggcaagctggtgctgagcagcctgcccaagaggctgtgcctggtgtgtggagatgtggccagcggctaccactatggagtggccagctgtgaggcctgcaaggccttcttcaagaggaccatccagggcagcattgagtacagctgcccagccagcaatgaatgtgagatcaccaagagaagaaggaaggcctgccaggcctgccgcttcaccaagtgcctgcgggtgggcatgctgaaggagggcgtgcggctggacagagtgcggggcggccggcagaagtacaagagaagacctgaggtggaccccctgcccttccctggccccttccctgctggccccctggccgtggccggcggccccaggaagacagcccctgtgaatgccctggtgagccacctgctggtggtggagcctgagaagctgtatgccatgccagaccctgctggcccagatggccacctgcctgctgtggccaccctgtgtgacctgtttgaccgggagatcgtggtgaccatctcctgggccaagagcatccctggcttcagcagcctgagcctgagtgaccagatgtctgtgctgcagagcgtgtggatggaggtgctggtgctgggcgtggcccagaggagcctgcccctgcaggatgagctggcctttgctgaggacctggtgctggatgaggagggcgcccgggctgctggcctgggggagctgggcgccgccctgctgcagctggtgcggcggctgcaggccctgcggctggagcgggaggagtatgtgctgctgaaggccctggccctggccaacagcgacagcgtgcacattgaagatgctgaggccgtggagcagctgcgggaggccctgcacgaggccctgctggagtatgaagctggccgggccggccctgggggcggcgctgagaggagaagagctggccgcctgctgctgaccctgcccctgctgcggcagacagctgggaaggtgctggcccacttctatggagtgaagctggagggcaaggtgcccatgcacaagctgttcctggagatgctggaggccatgatggactag

SEQ ID NO: 151484 - DNA, 330 bp, synthetic construct
  misc_feature 1..330: note = Description of Artificial Sequence: Synthetic coding sequence
  source 1..330: mol_type = other DNA
atgagcagccaggtggtgggcatcgagcccctgtacatcaaggccgagcccgccagcccagacagccccaagggcagcagcgagacagaaacagagccccctgtggccctggcccctggccctgcccccacccgctgcctgcccggccacaaggaggaggaggatggagagggcgccggccctggagagcagggcggcggcaagctggtgctgagcagcctgcccaagaggctgtgcctggtgtgtggagatgtggccagcggctaccactatggagtggccagctgtgaggcctgcaaggccttcttcaagaggaccatccagggctag

SEQ ID NO: 151485 - DNA, 1503 bp, synthetic construct
  misc_feature 1..1503: note = Description of Artificial Sequence: Synthetic coding sequence
  source 1..1503: mol_type = other DNA
atgagcagtgatgacagacacctgggcagcagctgtggcagcttcatcaagacagagcccagcagccccagcagcggcattgatgccctgagccaccacagccccagcggcagcagtgatgccagcggcggcttcggcctggccctgggcacccacgccaacggcctggacagcccccccatgtttgctggagctggcctgggcggcaccccctgcaggaagagctatgaggactgtgccagcggcatcatggaggacagcgccatcaagtgtgagtacatgctgaatgccatccccaagaggctgtgcctggtgtgtggggacatcgccagcggctaccactatggagtggccagctgtgaggcctgcaaggccttcttcaagaggaccatccagggcaacatcgagtacagctgcccagccaccaatgaatgtgagatcaccaagagaagaaggaagagctgccaggcctgccgcttcatgaagtgcctgaaggtgggcatgctgaaggagggcgtgcggctggacagagtgcggggcggccggcagaagtacaagaggcggctggacagcgagagcagcccctacctgagcctgcagatcagccccccagccaagaagcccctgaccaagatcgtgtcctacctgctggtggccgagccagacaagctgtatgccatgcctcctcctggcatgcctgagggggacatcaaggccctgaccaccctgtgtgacctggccgaccgggagctggtggtgatcatcggctgggccaagcacatccctggcttcagcagcctgagcctgggggaccagatgagcctgctgcagagcgcctggatggagatcctgatcctgggcatcgtgtaccgcagcctgccctatgatgacaagctggtgtatgcagaggactacatcatggatgaggagcacagccggctggccggcctgctggagctgtaccgggccatcctgcagctggtgcggcgctacaagaagctgaaggtggagaaggaggagtttgtgaccctgaaggccctggccctggccaacagcgacagcatgtacatcgaggacctggaggccgtgcagaagctgcaggacctgctgcacgaggccctgcaggactatgagctgagccagagacatgaggagccctggaggacaggcaagctgctgctgaccctgcccctgctgcggcagacagctgccaaggctgtgcagcacttctacagcgtgaagctgcagggcaaggtgcccatgcacaagctgttcctggagatgctggaggccaaggcctgggcccgggctgacagcctgcaggagtggaggcccctggagcaggtgcccagccccctgcaccgggccaccaagaggcagcacgtgcacttcctgacccccctgcccccacctccttctgtggcctgggtgggcacagcccaggccggctaccacctggaggtgttcctgccccagagagctggctggcccagggctgcctag

SEQ ID NO: 151486 - DNA, 1527 bp, synthetic construct
  misc_feature 1..1527: note = Description of Artificial Sequence: Synthetic coding sequence
  source 1..1527: mol_type = other DNA
atgagcagtgatgacagacacctgggcagcagctgtggcagcttcatcaagacagagcccagcagccccagcagcggcattgatgccctgagccaccacagccccagcggcagcagtgatgccagcggcggcttcggcctggccctgggcacccacgccaacggcctggacagcccccccatgtttgctggagctggcctgggcggcaccccctgcaggaagagctatgaggactgtgccagcggcatcatggaggacagcgccatcaagtgtgagtacatgctgaatgccatccccaagaggctgtgcctggtgtgtggggacatcgccagcggctaccactatggagtggccagctgtgaggcctgcaaggccttcttcaagaggaccatccagggcaacatcgagtacagctgcccagccaccaatgaatgtgagatcaccaagagaagaaggaagagctgccaggcctgccgcttcatgaagtgcctgaaggtgggcatgctgaaggagggcgtgcggctggacagagtgcggggcggccggcagaagtacaagaggcggctggacagcgagagcagcccctacctgagcctgcagatcagccccccagccaagaagcccctgaccaagatcgtgtcctacctgctggtggccgagccagacaagctgtatgccatgcctcctcctggcatgcctgagggggacatcaaggccctgaccaccctgtgtgacctggccgaccgggagctggtggtgatcatcggctgggccaagcacatccctggcttcagcagcctgagcctgggggaccagatgagcctgctgcagagcgcctggatggagatcctgatcctgggcatcgtgtaccgcagcctgccctatgatgacaagctggtgtatgcagaggactacatcatggatgaggagcacagccggctggccggcctgctggagctgtaccgggccatcctgcagctggtgcggcgctacaagaagctgaaggtggagaaggaggagtttgtgaccctgaaggccctggccctggccaacagcgacagcatgtacatcgaggacctggaggccgtgcagaagctgcaggacctgctgcacgaggccctgcaggactatgagctgagccagagacatgaggagccctggaggacaggcaagctgctgctgaccctgcccctgctgcggcagacagctgccaaggctgtgcagcacttctacagcgtgaagctgcagggcaaggtgcccatgcacaagctgttcctggagatgctggaggccaaggtgggccaggagcagctgcggggcagccccaaggatgagaggatgagcagccatgatggaaaatgtcccttccagagcgctgccttcaccagccgggaccagagcaacagccctggcatccccaacccccggcccagcagccccacccccctgaatgaaagaggccggcagatcagccccagcaccaggaccccaggcggccagggcaagcacctgtggctgaccatgtag

SEQ ID NO: 151487 - DNA, 1503 bp, synthetic construct; identical to SEQ ID NO: 151485
  misc_feature 1..1503: note = Description of Artificial Sequence: Synthetic coding sequence
  source 1..1503: mol_type = other DNA

SEQ ID NO: 151488 - DNA, 1527 bp, synthetic construct; identical to SEQ ID NO: 151486
  misc_feature 1..1527: note = Description of Artificial Sequence: Synthetic coding sequence
  source 1..1527: mol_type = other DNA

SEQ ID NO: 151489 - DNA, 1527 bp, synthetic construct
  misc_feature 1..1527: note = Description of Artificial Sequence: Synthetic coding sequence
  source 1..1527: mol_type = other DNA
atgctgctgaacaggatgagcagtgatgacagacacctgggcagcagctgtggcagcttcatcaagacagagcccagcagccccagcagcggcattgatgccctgagccaccacagccccagcggcagcagtgatgccagcggcggcttcggcctggccctgggcacccacgccaacggcctggacagcccccccatgtttgctggggccggcctgggcggcaccccctgcaggaagagctatgaggactgtgccagcggcatcatggaggacagcgccatcaagtgtgagtacatgctgaatgccatccccaagaggctgtgcctggtgtgtggggacatcgccagcggctaccactacggcgtggccagctgtgaggcctgcaaggccttcttcaagaggaccatccagggcaacatcgagtacagctgcccagccaccaatgaatgtgagatcaccaagagaagaaggaagagctgccaggcctgccgcttcatgaagtgcctgaaggtgggcatgctgaaggagggcgtgcggctggacagagtgcggggcggccggcagaagtacaagaggcggctggacagcgagagcagcccctacctgagcctgcagatcagccccccagccaagaagcccctgaccaagatcgtgtcctacctgctggtggccgagccagacaagctgtatgccatgcctcctcctggcatgcctgagggggacatcaaggccctgaccaccctgtgtgacctggccgaccgggagctggtggtgatcatcggctgggccaagcacatccctggcttcagcagcctgagcctgggggaccagatgagcctgctgcagagcgcctggatggagatcctgatcctgggcatcgtgtaccgcagcctgccctatgatgacaagctggtgtatgcagaggactacatcatggatgaggagcacagccggctggccggcctgctggagctgtaccgggccatcctgcagctggtgcggcgctacaagaagctgaaggtggagaaggaggagtttgtgaccctgaaggccctggccctggccaacagcgacagcatgtacatcgaggacctggaggccgtgcagaagctgcaggacctgctgcacgaggccctgcaggactatgagctgagccagagacatgaggagccctggaggacaggcaagctgctgctgaccctgcccctgctgcggcagacagctgccaaggctgtgcagcacttctacagcgtgaagctgcagggcaaggtgcccatgcacaagctgttcctggagatgctggaggccaaggtgggccaggagcagctgcggggcagccccaaggatgagaggatgagcagccatgatggcaagtgccccttccagagcgctgccttcaccagccgggaccagagcaacagccctggcatccccaacccccggcccagcagccccacccccctgaatgaaagaggccggcagatcagccccagcaccaggacccctgggggccagggcaagcactag

SEQ ID NO: 151490 - DNA, 1302 bp, synthetic construct
  misc_feature 1..1302: note = Description of Artificial Sequence: Synthetic coding sequence
  source 1..1302: mol_type = other DNA
atgagcagtgatgacagacacctgggcagcagctgtggcagcttcatcaagacagagcccagcagccccagcagcggcattgatgccctgagccaccacagccccagcggcagcagtgatgccagcggcggcttcggcctggccctgggcacccacgccaacggcctggacagcccccccatgtttgctggagctggcctgggcggcaccccctgcaggaagagctatgaggactgtgccagcggcatcatggaggacagcgccatcaagtgtgagtacatgctgaatgccatccccaagaggctgtgcctggtgtgtggggacatcgccagcggctaccactatggagtggccagctgtgaggcctgcaaggccttcttcaagaggaccatccagggcaacatcgagtacagctgcccagccaccaatgaatgtgagatcaccaagagaagaaggaagagctgccaggcctgccgcttcatgaagtgcctgaaggtgggcatgctgaaggagggcgtgcggctggacagagtgcggggcggccggcagaagtacaagaggcggctggacagcgagagcagcccctacctgagcctgcagatcagccccccagccaagaagcccctgaccaagatcgtgtcctacctgctggtggccgagccagacaagctgtatgccatgcctcctcctggcatgcctgagggggacatcaaggccctgaccaccctgtgtgacctggccgaccgggagctggtggtgatcatcggctgggccaagcacatccctggcttcagcagcctgagcctgggggaccagatgagcctgctgcagagcgcctggatggagatcctgatcctgggcatcgtgtaccgcagcctgccctatgatgacaagctggtgtatgcagaggactacatcatggatgaggagcacagccggctggccggcctgctggagctgtaccgggccatcctgcagctggtgcggcgctacaagaagctgaaggtggagaaggaggagtttgtgaccctgaaggccctggccctggccaacagcgacagcatgtacatcgaggacctggaggccgtgcagaagctgcaggacctgctgcacgaggccctgcaggactatgagctgagccagagacatgaggagccctggaggacaggcaagctgctgctgaccctgcccctgctgcggcagacagctgccaaggctgtgcagcacttctacagcgtgaagctgcagggcaaggtgcccatgcacaagctgttcctggagatgctggaggccaaggtgtag

SEQ ID NO: 151491 - DNA, 1311 bp, synthetic construct
  misc_feature 1..1311: note = Description of Artificial Sequence: Synthetic coding sequence
  source 1..1311: mol_type = other DNA
atgagcaacaaggacagacacatcgacagcagctgcagcagcttcatcaagacagagcccagcagccctgccagcctgacagattctgtgaaccaccacagccctgggggcagcagtgatgccagcggcagctacagcagcaccatgaatggccaccagaatggcctggacagcccccccctgtaccccagcgcccccatcctgggcggcagcggccctgtgaggaagctgtatgatgactgcagcagcaccatcgtggaggacccccagaccaagtgtgagtacatgctgaacagcatgcccaagaggctgtgcctggtgtgtggggacatcgccagcggctaccactatggagtggccagctgtgaggcctgcaaggccttcttcaagaggaccatccagggcaacatcgagtacagctgcccagccaccaatgaatgtgagatcaccaagagaagaaggaagagctgccaggcctgccgcttcatgaagtgcctgaaggtgggcatgctgaaggagggcgtgcggctggacagagtgcggggcggccggcagaagtacaagagaagaattgatgctgagaacagcccctacctgaacccccagctggtgcagcctgccaagaagccctacaacaagatcgtgagccacctgctggtggccgagcctgagaagatctatgccatgccagaccccaccgtgcctgacagcgacatcaaggccctgaccaccctgtgtgacctggccgaccgggagctggtggtgatcatcggctgggccaagcacatccctggcttcagcaccctgagcctggccgaccagatgagcctgctgcagagcgcctggatggagatcctgatcctgggcgtggtgtaccgcagcctgagctttgaagatgagctggtgtatgcagatgactacatcatggatgaggaccagagcaagctggccggcctgctggacctgaacaatgccatcctgcagctggtgaagaagtacaagtccatgaagctggagaaggaggagtttgtgaccctgaaggccatcgccctggccaacagcgacagcatgcacattgaagatgtggaggccgtgcagaagctgcaggatgtgctgcacgaggccctgcaggactatgaagctggccagcacatggaggaccccaggagagctgggaagatgctgatgaccctgcccctgctgcggcagaccagcaccaaggctgtgcagcacttctacaacatcaagctggagggcaaggtgcccatgcacaagctgttcctggagatgctggaggccaaggtgtgctag

SEQ ID NO: 151492 - DNA, 1308 bp, synthetic construct
  misc_feature 1..1308: note = Description of Artificial Sequence: Synthetic coding sequence
  source 1..1308: mol_type = other DNA
atgagcaacaaggacagacacatcgacagcagctgcagcagcttcatcaagacagagcccagcagccctgccagcctgacagattctgtgaaccaccacagccctgggggcagcagtgatgccagcggcagctacagcagcaccatgaatggccaccagaatggcctggacagcccccccctgtaccccagcgcccccatcctgggcggcagcggccctgtgaggaagctgtatgatgactgcagcagcaccatcgtggaggacccccagaccaagtgtgagtacatgctgaacagcatgcccaagaggctgtgcctggtgtgtggggacatcgccagcggctaccactatggagtggccagctgtgaggcctgcaaggccttcttcaagaggaccatccagggcaacatcgagtacagctgcccagccaccaatgaatgtgagatcaccaagagaagaaggaagagctgccaggcctgccgcttcatgaagtgcctgaaggtgggcatgctgaaggagggcgtgcggctggacagagtgcggggcggccggcagaagtacaagagaagaattgatgctgagaacagcccctacctgaacccccagctggtgcagcctgccaagaagccctacaacaagatcgtgagccacctgctggtggccgagcctgagaagatctatgccatgccagaccccaccgtgcctgacagcgacatcaaggccctgaccaccctgtgtgacctggccgaccgggagctggtggtgatcatcggctgggccaagcacatccctggcttcagcaccctgagcctggccgaccagatgagcctgctgcagagcgcctggatggagatcctgatcctgggcgtggtgtaccgcagcctgagctttgaagatgagctggtgtatgcagatgactacatcatggatgaggaccagagcaagctggccggcctgctggacctgaacaatgccatcctgcagctggtgaagaagtacaagtccatgaagctggagaaggaggagtttgtgaccctgaaggccatcgccctggccaacagcgacagcatgcacattgaagatgtggaggccgtgcagaagctgcaggatgtgctgcacgaggccctgcaggactatgaagctggccagcacatggaggaccccaggagagctgggaagatgctgatgaccctgcccctgctgcggcagaccagcaccaaggctgtgcagcacttctacaacatcaagctggagggcaaggtgcccatgcacaagctgttcctggagatgctggaggccaaggtgtag

SEQ ID NO: 151493 - DNA, 1308 bp, synthetic construct; identical to SEQ ID NO: 151492
  misc_feature 1..1308: note = Description of Artificial Sequence: Synthetic coding sequence
  source 1..1308: mol_type = other DNA

SEQ ID NO: 151494 - DNA, 1308 bp, synthetic construct; identical to SEQ ID NO: 151492
  misc_feature 1..1308: note = Description of Artificial Sequence: Synthetic coding sequence
  source 1..1308: mol_type = other DNA

SEQ ID NO: 151495 - DNA, 1308 bp, synthetic construct; identical to SEQ ID NO: 151492
  misc_feature 1..1308: note = Description of Artificial Sequence: Synthetic coding sequence
  source 1..1308: mol_type = other DNA

SEQ ID NO: 151496 - DNA, 1308 bp, synthetic construct; identical to SEQ ID NO: 151492
  misc_feature 1..1308: note = Description of Artificial Sequence: Synthetic coding sequence
  source 1..1308: mol_type = other DNA

SEQ ID NO: 151497 - DNA, 1308 bp, synthetic construct; identical to SEQ ID NO: 151492
  misc_feature 1..1308: note = Description of Artificial Sequence: Synthetic coding sequence
  source 1..1308: mol_type = other DNA

SEQ ID NO: 151498 - DNA, 1329 bp, synthetic construct
  misc_feature 1..1329: note = Description of Artificial Sequence: Synthetic coding sequence
  source 1..1329: mol_type = other DNA
atgagcaacaaggacagacacatcgacagcagctgcagcagcttcatcaagacagagcccagcagccctgccagcctgacagattctgtgaaccaccacagccctgggggcagcagtgatgccagcggcagctacagcagcaccatgaatggccaccagaatggcctggacagcccccccctgtaccccagcgcccccatcctgggcggcagcggccctgtgaggaagctgtatgatgactgcagcagcaccatcgtggaggacccccagaccaagtgtgagtacatgctgaacagcatgcccaagaggctgtgcctggtgtgtggggacatcgccagcggctaccactatggagtggccagctgtgaggcctgcaaggccttcttcaagaggaccatccagggcaacatcgagtacagctgcccagccaccaatgaatgtgagatcaccaagagaagaaggaagagctgccaggcctgccgcttcatgaagtgcctgaaggtgggcatgctgaaggagggcgtgcggctggacagagtgcggggcggccggcagaagtacaagagaagaattgatgctgagaacagcccctacctgaacccccagctggtgcagcctgccaagaagcccctgctgtggagcgaccctgctgacaacaagatcgtgagccacctgctggtggccgagcctgagaagatctatgccatgccagaccccaccgtgcctgacagcgacatcaaggccctgaccaccctgtgtgacctggccgaccgggagctggtggtgatcatcggctgggccaagcacatccctggcttcagcaccctgagcctggccgaccagatgagcctgctgcagagcgcctggatggagatcctgatcctgggcgtggtgtaccgcagcctgagctttgaagatgagctggtgtatgcagatgactacatcatggatgaggaccagagcaagctggccggcctgctggacctgaacaatgccatcctgcagctggtgaagaagtacaagtccatgaagctggagaaggaggagtttgtgaccctgaaggccatcgccctggccaacagcgacagcatgcacattgaagatgtggaggccgtgcagaagctgcaggatgtgctgcacgaggccctgcaggactatgaggccggccagcacatggaggacccccggcgggccggcaagatgctgatgaccctgcccctgctgcggcagaccagcaccaaggctgtgcagcacttctacaacatcaagctggagggcaaggtgcccatgcacaagctgttcctggagatgctggaggccaaggtgtag

SEQ ID NO: 151499 - DNA, 1377 bp, synthetic construct
  misc_feature 1..1377: note = Description of Artificial Sequence: Synthetic coding sequence
  source 1..1377: mol_type = other DNA
atggattctgtggagctgtgcctgcctgagagcttcagcctgcactatgaggaggagctgctgtgcaggatgagcaacaaggacagacacatcgacagcagctgcagcagcttcatcaagacagagcccagcagccctgccagcctgacagacagcgtgaaccaccacagccctgggggcagcagtgatgccagcggcagctacagcagcaccatgaatggccaccagaatggcctggacagcccccccctgtaccccagcgcccccatcctgggcggcagcggccctgtgaggaagctgtatgatgactgcagcagcaccatcgtggaggacccccagaccaagtgtgagtacatgctgaacagcatgcccaagaggctgtgcctggtgtgtggggacatcgccagcggctaccactacggcgtggccagctgtgaggcctgcaaggccttcttcaagaggaccatccagggcaacatcgagtacagctgcccagccaccaatgaatgtgagatcaccaagagaagaaggaagagctgccaggcctgccgcttcatgaagtgcctgaaggtgggcatgctgaaggagggcgtgcggctggacagagtgcggggcggccggcagaagtacaagagaagaattgatgctgagaacagcccctacctgaacccccagctggtgcagcctgccaagaagccctacaacaagatcgtgagccacctgctggtggccgagcctgagaagatctatgccatgccagaccccaccgtgcctgacagcgacatcaaggccctgaccaccctgtgtgacctggccgaccgggagctggtggtgatcatcggctgggccaagcacatccctggcttcagcaccctgagcctggccgaccagatgagcctgctgcagagcgcctggatggagatcctgatcctgggcgtggtgtaccgcagcctgagctttgaagatgagctggtgtatgcagatgactacatcatggatgaggaccagagcaagctggccggcctgctggacctgaacaatgccatcctgcagctggtgaagaagtacaagtccatgaagctggagaaggaggagtttgtgaccctgaaggccatcgccctggccaacagcgacagcatgcacattgaagatgtggaggccgtgcagaagctgcaggatgtgctgcacgaggccctgcaggactatgaggccggccagcacatggaggacccccggcgggccggcaagatgctgatgaccctgcccctgctgcggcagaccagcaccaaggctgtgcagcacttctacaacatcaagctggagggcaaggtgcccatgcacaagctgttcctggagatgctggaggccaaggtgtag

SEQ ID NO: 151500 - DNA, 171 bp, synthetic construct
  misc_feature 1..171: note = Description of Artificial Sequence: Synthetic coding sequence
  source 1..171: mol_type = other DNA
atgagcaacaaggacagacacatcgacagcagctgcagcagcttcatcaagacagagcccagcagccctgccagcctgacagattctgtgaaccaccacagccctgggggcagcagtgatgccagcggcagctacagcagcaccatgaatggccaccagaatggcctgtag

SEQ ID NO: 151501 - DNA, 279 bp, synthetic construct
  misc_feature 1..279: note = Description of Artificial Sequence: Synthetic coding sequence
  source 1..279: mol_type = other DNA
atgagcaacaaggacagacacatcgacagcagctgcagcagcttcatcaagacagagcccagcagccctgccagcctgacagattctgtgaaccaccacagccctgggggcagcagtgatgccagcggcagctacagcagcaccatgaatggccaccagaatggcctggacagcccccccctgtaccccagcgcccccatcctgggcggcagcggccctgtgaggaagctgtatgatgactgcagcagcaccatcgtggaggacccccagaccaagtag

SEQ ID NO: 151502 - DNA, 1065 bp, synthetic construct
  misc_feature 1..1065: note = Description of Artificial Sequence: Synthetic coding sequence
  source 1..1065: mol_type = other DNA
atgagcaacaaggacagacacatcgacagcagctgcagcagcttcatcaagacagagcccagcagccctgccagcctgacagattctgtgaaccaccacagccctgggggcagcagtgatgccagcggcagctacagcagcaccatgaatggccaccagaatggcctggacagcccccccctgtaccccagcgcccccatcctgggcggcagcggccctgtgaggaagctgtatgatgactgcagcagcaccatcgtggaggacccccagaccaagtgtgagtacatgctgaacagcatgcccaagaggctgtgcctggtgtgtggggacatcgccagcggctaccactatggagtggccagctgtgaggcctgcaaggccttcttcaagaggaccatccagggcaacatcgagtacagctgcccagccaccaatgaatgtgagatcaccaagagaagaaggaagagctgccaggcctgccgcttcatgaagtgcctgaaggtgggcatgctgaaggagggcgtgcggctggacagagtgcggggcggccggcagaagtacaagagaagaattgatgctgagaacagcccctacctgaacccccagctggtgcagcctgccaagaagccctacaacaagatcgtgagccacctgctggtggccgagcctgagaagatctatgccatgccagaccccaccgtgcctgacagcgacatcaaggccctgaccaccctgtgtgacctggccgaccgggagctggtggtgatcatcggctgggccaagcacatccctggcttcagcaccctgagcctggccgaccagatgagcctgctgcagagcgcctggatggagatcctgatcctgggcgtggtgtaccgcagcctgagctttgaagatgagctggtgtatgcagatgactacatcatggatgaggaccagagcaagctggccggcctgctggacctgaacaatgccatcctgcagctggtgaagaagtacaagtccatgaagctggagaaggaggagtttgtgaccctgaaggccatcgccctggccaacagctag

SEQ ID NO: 151503 - DNA, 153 bp, synthetic construct
  misc_feature 1..153: note = Description of Artificial Sequence: Synthetic coding sequence
  source 1..153: mol_type = other DNA
atgagcaacaaggacagacacatcgacagcagctgcagcagcttcatcaagacagagcccagcagccctgccagcctgacagattctgtgaaccaccacagccctgggggcagcagtgatgccagcggcagctacagcagcaccatgaactag

SEQ ID NO: 151504 - DNA, 1308 bp, synthetic construct; identical to SEQ ID NO: 151492
  misc_feature 1..1308: note = Description of Artificial Sequence: Synthetic coding sequence
  source 1..1308: mol_type = other DNA

SEQ ID NO: 151505 - DNA, 1308 bp, synthetic construct; identical to SEQ ID NO: 151492
  misc_feature 1..1308: note = Description of Artificial Sequence: Synthetic coding sequence
  source 1..1308: mol_type = other DNA

SEQ ID NO: 151506 - DNA, 1308 bp, synthetic construct; identical to SEQ ID NO: 151492
  misc_feature 1..1308: note = Description of Artificial Sequence: Synthetic coding sequence
  source 1..1308: mol_type = other DNA

SEQ ID NO: 151507 - DNA, 1413 bp, synthetic construct
  misc_feature 1..1413: note = Description of Artificial Sequence: Synthetic coding sequence
  source 1..1413: mol_type = other DNA
atgtggagagaatgtgactggggcctgggcgctgtgaagagtgacctggcctgtgtgcccagcgccaagaggctgctgtgcaggatgagcaacaaggacagacacatcgacagcagctgcagcagcttcatcaagacagagcccagcagccctgccagcctgacagattctgtgaaccaccacagccctgggggcagcagtgatgccagcggcagctacagcagcaccatgaatggccaccagaatggcctggacagcccccccctgtaccccagcgcccccatcctgggcggcagcggccctgtgaggaagctgtatgatgactgcagcagcaccatcgtggaggacccccagaccaagtgtgagtacatgctgaacagcatgcccaagaggctgtgcctggtgtgtggggacatcgccagcggctaccactatggagtggccagctgtgaggcctgcaaggccttcttcaagaggaccatccagggcaacatcgagtacagctgcccagccaccaatgaatgtgagatcaccaagagaagaaggaagagctgccaggcctgccgcttcatgaagtgcctgaaggtgggcatgctgaaggagggcgtgcggctggacagagtgcggggcggccggcagaagtacaagagaagaattgatgctgagaacagcccctacctgaacccccagctggtgcagcctgccaagaagcccctgctgtggagcgaccctgctgacaacaagatcgtgagccacctgctggtggccgagcctgagaagatctatgccatgccagaccccaccgtgcctgacagcgacatcaaggccctgaccaccctgtgtgacctggccgaccgggagctggtggtgatcatcggctgggccaagcacatccctggcttcagcaccctgagcctggccgaccagatgagcctgctgcagagcgcctggatggagatcctgatcctgggcgtggtgtaccgcagcctgagctttgaagatgagctggtgtatgcagatgactacatcatggatgaggaccagagcaagctggccggcctgctggacctgaacaatgccatcctgcagctggtgaagaagtacaagtccatgaagctggagaaggaggagtttgtgaccctgaaggccatcgccctggccaacagcgacagcatgcacattgaagatgtggaggccgtgcagaagctgcaggatgtgctgcacgaggccctgcaggactatgaggccggccagcacatggaggacccccggcgggccggcaagatgctgatgaccctgcccctgctgcggcagaccagcaccaaggctgtgcagcacttctacaacatcaagctggagggcaaggtgcccatgcacaagctgttcctggagatgctggaggccaaggtgtag

SEQ ID NO: 151508 - DNA, 1359 bp, synthetic construct
  misc_feature 1..1359: note = Description of Artificial Sequence: Synthetic coding sequence
  source 1..1359: mol_type = other DNA
atgctgtgtggccggcccaggagcagcagtgacaacagaaacttcctgcgggagcgggccggcctgagcagcgctgctgtgcagaccagaattggcaacagcgctgccagccgccgcagccctgctgcccggccccctgtgcctgcccccccagccctgccccggggccggcccggcacagagggcagcaccagcctgagcgccccagctgtgctggtggtggccgtggccgtggtggtggtggtggtgtctgctgtggcctgggccatggccaactacatccacgtgcccccaggcagccctgaggtgcccaagctgaatgtgacagtgcaggaccaggaggagcaccgctgccgggagggcgccctgagcctgctgcagcacctgcggccccactgggacccccaggaggtgaccctgcagctgttcacagatggcatcaccaacaagctgattggctgctacgtgggcaacaccatggaggatgtggtgctggtgcgcatctacggcaacaagacagagctgctggtggacagagatgaggaggtgaagagcttccgggtgctgcaggcccacggctgtgccccccagctgtactgcaccttcaacaacggcctgtgctatgagttcatccagggcgaggccctggaccccaagcacgtgtgcaacccagccatcttccgcctcatcgcccggcagctggccaagatccacgccatccacgcccacaacggctggatccccaagagcaacctgtggctgaagatgggcaagtacttcagcctcatccccactggatttgctgatgaggacatcaacaagcgcttcctgagtgacatccccagcagccagatcctgcaggaggagatgacctggatgaaggagatcctgagcaacctgggcagccctgtggtgctgtgccacaatgacctgctgtgcaagaacatcatctacaatgagaagcagggagatgtgcagttcatcgactatgagtacagcggctacaactacctggcctatgacatcggcaaccacttcaatgaatttgctggggtgtctgatgtggactacagcctgtacccagaccgggagctgcagagccagtggctgcgggcctacctggaggcctacaaggagttcaagggctttggaacagaggtgacagagaaggaggtggagatcctcttcatccaggtgaaccagtttgccctggccagccacttcttctggggcctgtgggccctgatccaggccaagtacagcaccattgaatttgacttcctgggctacgccatcgtgcgcttcaaccagtacttcaagatgaagccagaggtgacagccctgaaggtgcctgagtag

SEQ ID NO: 151509 - DNA, 777 bp, synthetic construct
  misc_feature 1..777: note = Description of Artificial Sequence: Synthetic coding sequence
  source 1..777: mol_type = other DNA
atgctgtgtggccggcccaggagcagcagtgacaacagaaacttcctgcgggagcgggccggcctgagcagcgctgctgtgcagaccagaattggcaacagcgctgccagccgccgcagccctgctgcccggccccctgtgcctgcccccccagccctgccccggggccggcccggcacagagggcagcaccagcctgagcgccccagctgtgctggtggtggccgtggccgtggtggtggtggtggtgtctgctgtggcctgggccatggccaactacatccacgtgcccccaggcagccctgaggtgcccaagctgaatgtgacagtgcaggaccaggaggagcaccgctgccgggagggcgccctgagcctgctgcagcacctgcggccccactgggacccccaggaggtgaccctgcagctgttcacagatggcatcaccaacaagctgattggctgctacgtgggcaacaccatggaggatgtggtgctggtgcgcatctacggcaacaagacagagctgctggtggacagagatgaggaggtgaagagcttccgggtgctgcaggcccacggctgtgccccccagctgtactgcaccttcaacaacggcctgtgctatgagttcatccagggcgaggccctggaccccaagcacgtgtgcaacccagccatcttcagcctgagcagcctgaccctgtgcaagggcaagaccacccgctgcttcggcctgaccggctgccggggcagccggctgctgctgtccttcttctag

SEQ ID NO: 151510 - DNA, 1305 bp, synthetic construct
  misc_feature 1..1305: note = Description of Artificial Sequence: Synthetic coding sequence
  source 1..1305: mol_type = other DNA
atgctgtgtggccggcccaggagcagcagtgacaacagaaacttcctgcgggagcgggccggcctgagcagcgctgctgtgcagaccagaattggcaacagcgctgccagccgccgcagccctgctgcccggccccctgtgcctgcccccccagccctgccccggggccggcccggcacagagggcagcaccagcctgagcgccccagctgtgctggtggtggccgtggccgtggtggtggtggtggtgtctgctgtggcctgggccatggccaactacatccacgtgcccccaggcagccctgaggtgcccaagctgaatgtgacagtgcaggaccaggaggagcaccgctgccgggagggcgccctgagcctgctgcagcacctgcggccccactgggacccccaggaggtgaccctgcagctgttcacagatggcatcaccaacaagctgattggctgctacgtgggcaacaccatggaggatgtggtgctggtgcgcatctacggcaacaagacagagctgctggtggacagagatgaggaggtgaagagcttccgggtgctgcaggcccacggctgtgccccccagctgtactgcaccttcaacaacggcctgtgctatgagttcatccagggcgaggccctggaccccaagcacgtgtgcaacccagccatcttccgcctcatcgcccggcagctggccaagatccacgccatccacgcccacaacggctggatccccaagagcaacctgtggctgaagatgggcaagtacttcagcctcatccccactggatttgctgatgaggacatcaacaagcgcttcctgagtgacatccccagcagccagatcctgcaggaggagatgacctggatgaaggagatcctgagcaacctgggcagccctgtggtgctgtgccacaatgacctgctgtgcaagaacatcatctacaatgagaagcagggagatgtgcagttcatcgactatgagtacagcggctacaactacctggcctatgacatcggcaaccacttcaatgaatttgctggggtgtctgatgtggactacagcctgtacccagaccgggagctgcagagccagtggctgcgggcctacctggaggcctacaaggagttcaagggctttggaacagaggtgacagagaaggaggtggagatcctcttcatccaggtgaaccagtttgccctgggggagaacctgaacttcatcatcggcaacaagtactgccagctgttcagcctgaagtggctgctgatcagctttggagactgtggcctgtag

SEQ ID NO: 151511 - DNA, 627 bp, synthetic construct
  misc_feature 1..627: note = Description of Artificial Sequence: Synthetic coding sequence
  source 1..627: mol_type = other DNA
atggccaagatccacaccatccacgccaacggcagcctgcccaagcccatcctgtggcacaagatgcacaactacttcaccctggtgaagaatgagatcaaccccagcctgtctgcagatgtgcccaaggtggaggtgctggagcgggagctggcctggctgaaggagcacctgagccagctggagagccctgtggtgttctgccacaatgacctgctgtgcaagaacatcatctatgacagcatcaagggccacgtgcgcttcattgattatgaatatgccggctacaactaccaggcctttgatattggcaaccacttcaatgaatttgctggggtgaatgaggtggactactgcctgtacccagcccgggagacccagctgcagtggctgcactactacctgcaggcccagaagggcatggctgtgaccccccgggaggtgcagaggctgtatgtgcaggtgaacaagtttgccctggccagccacttcttctgggccctgtgggccctgatccagaaccagtacagcaccatcgactttgacttcctgcgctatgctgtgatccgcttcaaccagtacttcaaggtgaagccccaggccagcgccctggagatgcccaagtag

SEQ ID NO: 151512 - DNA, 954 bp, synthetic construct
  misc_feature 1..954: note = Description of Artificial Sequence: Synthetic coding sequence
  source 1..954: mol_type = other DNA
atggaggagaaggccgccgccagcgccagctgccgggagcccccaggcccccccagggctgctgctgtggcctacttcggcatctctgtggaccctgatgacatcctgcccggggccctgcggctcatccaggagctgcggccccactggaagccagagcaggtgaggaccaagcgcttcacagatggcatcaccaacaagctggtggcctgctacgtggaggaggacatgcaggactgtgtgctggtgcgggtgtatggagagaggacagagctgctggtggacagagaaaatgaggtgaggaacttccagctgctgcgggcccacagctgtgcccccaagctgtactgcaccttccagaatggcctgtgctatgagtacatgcagggcgtggccctggagcctgagcacatccgggagcccaggctcttcagcctgtctgcagatgtgcccaaggtggaggtgctggagcgggagctggcctggctgaaggagcacctgagccagctggagagccctgtggtgttctgccacaatgacctgctgtgcaagaacatcatctatgacagcatcaagggccacgtgcgcttcatcgactatgaatatgccggctacaactaccaggcctttgacatcggcaaccacttcaatgaatttgctggggtgaatgaggtggactactgcctgtacccagcccgggagacccagctgcagtggctgcactactacctgcaggcccagaagggcatggctgtgaccccccgggaggtgcagaggctgtatgtgcaggtgaacaagtttgccctggccagccacttcttctgggccctgtgggccctgatccagaaccagtacagcaccatcgactttgacttcctgcgctatgctgtgatccgcttcaaccagtacttcaaggtgaagccccaggccagcgccctggagatgcccaagtag

SEQ ID NO: 151513 - DNA, 1185 bp, synthetic construct
  misc_feature 1..1185: note = Description of Artificial Sequence: Synthetic coding sequence
  source 1..1185: mol_type = other DNA
atggctgtgccccccagcgccccccagccccgggccagcttccacctgcggcggcacaccccctgcccccagtgctcctggggcatggaggagaaggccgccgccagcgccagctgccgggagcccccaggcccccccagggctgctgctgtggcctacttcggcatctctgtggaccctgatgacatcctgcccggggccctgcggctcatccaggagctgcggccccactggaagccagagcaggtgaggaccaagcgcttcacagatggcatcaccaacaagctggtggcctgctacgtggaggaggacatgcaggactgtgtgctggtgcgggtgtatggagagaggacagagctgctggtggacagagaaaatgaggtgaggaacttccagctgctgcgggcccacagctgtgcccccaagctgtactgcaccttccagaatggcctgtgctatgagtacatgcagggcgtggccctggagcctgagcacatccgggagcccaggctcttccggctgattgccctggagatggccaagatccacaccatccacgccaacggcagcctgcccaagcccatcctgtggcacaagatgcacaactacttcaccctggtgaagaatgagatcaaccccagcctgtctgcagatgtgcccaaggtggaggtgctggagcgggagctggcctggctgaaggagcacctgagccagctggagagccctgtggtgttctgccacaatgacctgctgtgcaagaacatcatctatgacagcatcaagggccacgtgcgcttcattgattatgaatatgccggctacaactaccaggcctttgatattggcaaccacttcaatgaatttgctggggtgaatgaggtggactactgcctgtacccagcccgggagacccagctgcagtggctgcactactacctgcaggcccagaagggcatggctgtgaccccccgggaggtgcagaggctgtatgtgcaggtgaacaagtttgccctgggccccagctgtgtgagcagcaccatgacagccagcctgcagtgctgccgggtgggcaacagacatggagaaattgcccggctgaccctgagcggcctcttccctggggtgtccctgctgctgggcagcctgggcccccaccctgagcctgtgctgcaccaccggctgtag

SEQ ID NO: 151514 - DNA, 1161 bp, synthetic construct
  misc_feature 1..1161: note = Description of Artificial Sequence: Synthetic coding sequence
  source 1..1161: mol_type = other DNA
atggctgtgccccccagcgccccccagccccgggccagcttccacctgcggcggcacaccccctgcccccagtgctcctggggcatggaggagaaggccgccgccagcgccagctgccgggagcccccaggcccccccagggctgctgctgtggcctacttcggcatctctgtggaccctgatgacatcctgcccggggccctgcggctcatccaggagctgcggccccactggaagccagagcaggtgaggaccaagcgcttcacagatggcatcaccaacaagctggtggcctgctacgtggaggaggacatgcaggactgtgtgctggtgcgggtgtatggagagaggacagagctgctggtggacagagaaaatgaggtgaggaacttccagctgctgcgggcccacagctgtgcccccaagctgtactgcaccttccagaatggcctgtgctatgagtacatgcagggcgtggccctggagcctgagcacatccgggagcccaggctcttccggctgattgccctggagatggccaagatccacaccatccacgccaacggcagcctgcccaagcccatcctgtggcacaagatgcacaactacttcaccctggtgaagaatgagatcaaccccagcctgtctgcagatgtgcccaaggtggaggtgctggagcgggagctggcctggctgaaggagcacctgagccagctggagagccctgtggtgttctgccacaatgacctgctgtgcaagaacatcatctatgacagcatcaagggccacgtgcgcttcattgattatgaatatgccggctacaactaccaggcctttgatattggcaaccacttcaatgaatttgctggggtgaatgaggtggactactgcctgtacccagcccgggagacccagctgcagtggctgcactactacctgcaggcccagaagggcatggctgtgaccccccgggaggtgcagaggctgtatgtgcaggtgaacaagtttgccctggccagccacttcttctgggccctgtgggccctgatccagaaccagtacagcaccatcgactttgacttcctgcgctatgctgtgatccgcttcaaccagtacttcaaggtgaagccccaggccagcgccctggagatgcccaagtag

SEQ ID NO: 151515 - DNA, 759 bp, synthetic construct
  misc_feature 1..759: note = Description of Artificial Sequence: Synthetic coding sequence
  source 1..759: mol_type = other DNA
agaaggctgggcggcggcacagctgagggcaagacaggccggggcctgggcggccccagctgggacaccggcccccgggccatgggcagcctgagccggcccagcttcagtgaccggctgattgccctggagatggccaagatccacaccatccacgccaacggcagcctgcccaagcccatcctgtggcacaagatgcacaactacttcaccctggtgaagaatgagatcaaccccagcctgtctgcagatgtgcccaaggtggaggtgctggagcgggagctggcctggctgaaggagcacctgagccagctggagagccctgtggtgttctgccacaatgacctgctgtgcaagaacatcatctatgacagcatcaagggccacgtgcgcttcattgattatgaatatgccggctacaactaccaggcctttgatattggcaaccacttcaatgaatttgctggggtgaatgaggtggactactgcctgtacccagcccgggagacccagctgcagtggctgcactactacctgcaggcccagaagggcatggctgtgaccccccgggaggtgcagaggctgtatgtgcaggtgaacaagtttgccctggccagccacttcttctgggccctgtgggccctgatccagaaccagtacagcaccatcgactttgacttcctgcgctatgctgtgatccgcttcaaccagtacttcaaggtgaagccccaggccagcgccctggagatgcccaagtag

SEQ ID NO: 151516 - DNA, 765 bp, synthetic construct
  misc_feature 1..765: note = Description of Artificial Sequence: Synthetic coding sequence
  source 1..765: mol_type = other DNA
atggccgaggccgtgctgcgggtggcccggcggcagctgagccagagaggaggcagcggggcccccatcctgctgcggcagatgtttgagcctgtgtcctgcaccttcacctacctgctgggggaccgggagagccgggaggccgtgctgattgatcctgtgctggagacagcccccagagatgcccagctgatcaaggagctgggcctgcggctgctgtatgctgtgaacacccactgccacgccgaccacatcaccggcagcggcctgctgcggagcctgctgcccggctgccagagcgtcatcagccggctgagcggggcccaggccgacctgcacattgaagatggagacagcatccgcttcggccgctttgccctggagacccgggccagccctggccacaccccaggctgtgtgacctttgtgctgaatgaccacagcatggccttcaccggagatgccctgctgatccggggctgcggccgcacagacttccagcagggctgtgccaagaccctgtaccacagcgtgcatgagaagatcttcaccctgcccggggactgcctgatctacccagcccatgactaccacggcttcaccgtgtccacagtggaggaggagaggaccctgaacccccggctgaccctgagctgtgaggagtttgtgaagatcatgggcaacctgaacctgcccaagccccagcagattgactttgctgtgcctgccaacatgagatgtggggtgcagacccccacagcctag

SEQ ID NO: 151517 - DNA, 1020 bp, synthetic construct
  misc_feature 1..1020: note = Description of Artificial Sequence: Synthetic coding sequence
  source 1..1020: mol_type = other DNA
atggctgacagcgtgaagaccttcctgcaggacctggcccggggcatcaaggacagcatctggggcatctgcaccatcagcaagctggatgcccgcatccagcagaagcgggaggagcagaggagaagaagagccagctctgtgctggcccagaggcgggcccagagcattgaaaggaagcaggagagcgagcccagaattgtgagccgcatcttccagtgctgtgcctggaatggaggagtcttctggttcagcctgctgctcttctacagagtcttcatccctgtgctgcagagcgtgacagcccgcatcattggagaccccagcctgcatggagatgtgtggagctggctggagttcttcctgaccagcatcttcagcgccctgtgggtgctgcccctgtttgtgctgagcaaggtggtgaatgccatctggttccaggacattgctgacctggcctttgaggtgtctggcaggaagccccaccccttccccagcgtgtccaagatcatcgctgacatgctgttcaacctgctgctgcaggccctcttcctgatccagggcatgtttgtgtccctcttccccatccacctggtgggccagctggtgtccctgctgcacatgagcctgctgtacagcctgtactgctttgagtaccgctggttcaacaagggcatcgagatgcaccagaggctgagcaacattgaaagaaactggccctactactttggatttggcctgcccctggccttcctgacagccatgcagagcagctacatcatcagcggctgcctcttcagcatcctcttccccctcttcatcatcagcgccaatgaggccaagccaggcaaggcctacctgttccagctgcggctcttcagcctggtggtgttcctgagcaacagactcttccacaagacagtgtacctgcagagcgccctgagcagcagcaccagcgctgagaagttccccagcccccaccccagccctgccaagctgaaggccacagctggccactag

SEQ ID NO: 151518 - DNA, 786 bp, synthetic construct
  misc_feature 1..786: note = Description of Artificial Sequence: Synthetic coding sequence
  source 1..786: mol_type = other DNA
atggctgacagcgtgaagaccttcctgcaggacctggcccggggcatcaaggacagcatctggggcatctgcaccatcagcaagctggatgcccgcatccagcagaagcgggaggagcagaggagaagaagagccagctctgtgctggcccagaggcgggcccagagcattgaaaggaagcaggagagcgagcccagaattgtgagccgcatcttccagtgctgtgcctggaatggaggagtcttctggttcagcctgctgctcttctacagagtcttcatccctgtgctgcagagcgtgacagcccgcatcattggagaccccagcctgcatggagatgtgtggagctggctggagttcttcctgaccagcatcttcagcgccctgtgggtgctgcccctgtttgtgctgagcaaggtggtgaatgccatctggttccaggacattgctgacctggcctttgaggtgtctggcaggaagccccaccccttccccagcgtgtccaagatcatcgctgacatgctgttcaacctgctgctgcaggccctcttcctgatccagggcatgtttgtgtccctcttccccatccacctggtgggccagctggtgtccctgctgcacatgagcctgctgtacagcctgtactgctttgagtaccgctggttcaacaaggtggccgccttcagcctgagcagcttcctgtacagcctgagcgcccccatgaagcagaggcctgccaagcacatcagcagcagctgtgccagcagcccctggtggagcagctag

SEQ ID NO: 151519 - DNA, 903 bp, synthetic construct
  misc_feature 1..903: note = Description of Artificial Sequence: Synthetic coding sequence
  source 1..903: mol_type = other DNA
atgatcctggagggcggcggcgtgatgaacctgaaccctggcaacaacctgctgcaccagcccccagcctggacagacagctacagcacctgcaatgtgagcagcggcttcttcggcggccagtggcatgagatccacccccagtactggaccaagtaccaggtgtgggagtggctgcagcacctgctggacaccaaccagctggatgccaactgcatccccttccaggagtttgacatcaatggagagcacctgtgcagcatgagcctgcaggagttcaccagggctgctggaacagctggccagctgctgtacagcaacctgcagcacctgaagtggaatggccagtgcagcagtgacctcttccagagcacccacaacgtgattgtgaagacagagcagacagagcccagcatcatgaacacctggaaggatgagaactacctgtatgacaccaactacggcagcacagtggacctgctggacagcaagaccttctgccgggcccagatctccatgaccaccaccagccacctgcctgtggccgagagcccagacatgaagaaggagcaggaccccccagccaagtgccacaccaagaagcacaacccccggggcacccacctgtgggagttcatccgggacatcctgctgaacccagacaagaaccctggcctcatcaagtgggaggacagaagtgaaggagtcttccgcttcctgaagtctgaggccgtggcccagctgtggggcaagaagaagaacaacagctccatgacctatgagaagctgagccgggccatgagatactactacaagcgggagatcctggagcgggtggatggccggcggctggtgtacaagtttgggaagaatgcccggggctggagagaaaatgaaaattag

SEQ ID NO: 151520 - DNA, 903 bp, synthetic construct; identical to SEQ ID NO: 151519
  misc_feature 1..903: note = Description of Artificial Sequence: Synthetic coding sequence
  source 1..903: mol_type = other DNA

SEQ ID NO: 151521 - DNA, 969 bp, synthetic construct
  misc_feature 1..969: note = Description of Artificial Sequence: Synthetic coding sequence
  source 1..969: mol_type = other DNA
atgggcctgcctgagcggcggggcctggtgctgctgctgagcctggccgagatcctcttcaagatcatgatcctggagggcggcggcgtgatgaacctgaaccctggcaacaacctgctgcaccagcccccagcctggacagacagctacagcacctgcaatgtgagcagcggcttcttcggcggccagtggcatgagatccacccccagtactggaccaagtaccaggtgtgggagtggctgcagcacctgctggacaccaaccagctggatgccaactgcatccccttccaggagtttgacatcaatggagagcacctgtgcagcatgagcctgcaggagttcaccagggctgctggaacagctggccagctgctgtacagcaacctgcagcacctgaagtggaatggccagtgcagcagtgacctcttccagagcacccacaacgtgattgtgaagacagagcagacagagcccagcatcatgaacacctggaaggatgagaactacctgtatgacaccaactacggcagcacagtggacctgctggacagcaagaccttctgccgggcccagatctccatgaccaccaccagccacctgcctgtggccgagagcccagacatgaagaaggagcaggaccccccagccaagtgccacaccaagaagcacaacccccggggcacccacctgtgggagttcatccgggacatcctgctgaacccagacaagaaccctggcctcatcaagtgggaggacagaagtgaaggagtcttccgcttcctgaagtctgaggccgtggcccagctgtggggcaagaagaagaacaacagctccatgacctatgagaagctgagccgggccatgagatactactacaagcgggagatcctggagcgggtggatggccggcggctggtgtacaagtttgggaagaatgcccggggctggagagaaaatgaaaattag

SEQ ID NO: 151522 - DNA, 903 bp, synthetic construct; identical to SEQ ID NO: 151519
  misc_feature 1..903: note = Description of Artificial Sequence: Synthetic coding sequence
  source 1..903: mol_type = other DNA

SEQ ID NO: 151523 - DNA, 834 bp, synthetic construct
  misc_feature 1..834: note = Description of Artificial Sequence: Synthetic coding sequence
  source 1..834: mol_type = other DNA
atgatcctggagggcggcggcgtgatgaacctgaaccctggcaacaacctgctgcaccagcccccagcctggacagacagctacagcacctgcaatgtgagcagcggcttcttcggcggccagtggcatgagatccacccccagtactggaccaagtaccaggtgtgggagtggctgcagcacctgctggacaccaaccagctggatgccaactgcatccccttccaggagtttgacatcaatggagagcacctgtgcagcatgagcctgcaggagttcaccagggctgctggaacagctggccagctgctgtacagcaacctgcagcacctgaagtggaatggccagtgcagcagtgacctcttccagagcacccacaacgtgattgtgaagacagagcagacagagcccagcatcatgaacacctggaaggatgagaactacctgtatgacaccaactacggcagcacagtggccgagagcccagacatgaagaaggagcaggaccccccagccaagtgccacaccaagaagcacaacccccggggcacccacctgtgggagttcatccgggacatcctgctgaacccagacaagaaccctggcctcatcaagtgggaggacagaagtgagggcgtcttccgcttcctgaagtctgaggccgtggcccagctgtggggcaagaagaagaacaacagctccatgacctatgagaagctgagccgggccatgagatactactacaagcgggagatcctggagcgggtggatggaagaaggctggtgtacaagtttgggaagaatgcccggggctggagagaaaatgaaaattag

SEQ ID NO: 151524 - DNA, 555 bp, synthetic construct
  misc_feature 1..555: note = Description of Artificial Sequence: Synthetic coding sequence
  source 1..555: mol_type = other DNA
atggacctgtggaactgggatgaggccagcccccaggaggtgcccccaggcaacaagctggccggcctggagggcgccaagctgggcttctgcttcccagacctggccctgcagggcgacacccccacagccacagctgagacctgctggaagggcaccagcagcagcctggccagcttcccccagctggactggggcagcgccctgctgcaccctgaggtgccctggggcgctgagccagacagccaggccctgccctggagcggggactggacagacatggcctgcacagcctgggacagctggagcggggccagccagaccctgggccctgcccccctgggccctggccccatcccagctgctggcagcgagggcgccgccggccagaactgcagccccccagcccctggcctgtaccacctgctggagcctggagctgcctgtggctggcaccacctgtttgaagctgtgcctgagctgagcagccaccggctgctgaggacagagcctgctgtgggcccctgccagtttggctccatgccccagaactag

SEQ ID NO: 151525 - DNA, 468 bp, synthetic construct
  misc_feature 1..468: note = Description of Artificial Sequence: Synthetic coding sequence
  source 1..468: mol_type = other DNA
atggacctgtggaactgggatgaggccagcccccaggaggtgcccccaggcaacaagctggccggcctggagggcgccaagctgggcttctgcttcccagacctggccctgcagggcgacacccccacagccacagctgagacctgctggaagggccccatccagctgtggcagttcctgctggagctgctgcatgatggagcccggagcagctgcatccgctggacaggcaacagccgggagttccagctgtgtgaccccaaggaggtggcccggctgtggggcgagaggaagaggaagccaggcatgaactatgagaagctgagccggggcctgcgctactactacagaagagacatcgtgaggaagagcggcggcaggaagtacacctacagatttggaggccgggtgcccagcctggcctacccagactgtgccggcggcggccgcggggctgagacccagtag

SEQ ID NO: 151526 - DNA, 1029 bp, synthetic construct
  misc_feature 1..1029: note = Description of Artificial Sequence: Synthetic coding sequence
  source 1..1029: mol_type = other DNA
atggacctgtggaactgggatgaggccagcccccaggaggtgcccccaggcaacaagctggccggcctggagggcgccaagctgggcttctgcttcccagacctggccctgcagggcgacacccccacagccacagctgagacctgctggaagggcaccagcagcagcctggccagcttcccccagctggactggggcagcgccctgctgcaccctgaggtgccctggggcgctgagccagacagccaggccctgccctggagcggggactggacagacatggcctgcacagcctgggacagctggagcggggccagccagaccctgggccctgcccccctgggccctggccccatcccagctgctggcagcgagggcgccgccggccagaactgtgtgcctgtggccggggaggccacctcctggagccgggcccaggccgccggcagcaacacctcctgggactgcagcgtgggcccagatggagacacctactggggcagcggcctgggcggggagcccaggacagactgcaccatctcctggggcggccctgctggccctgactgcaccacctcctggaaccctggcctgcacgccggcggcaccaccagcctgaagcgctaccagagcagcgccctgactgtgtgcagcgagcccagcccccagagcgaccgggccagcctggcccgctgccccaagaccaaccaccggggccccatccagctgtggcagttcctgctggagctgctgcatgatggagcccggagcagctgcatccgctggacaggcaacagccgggagttccagctgtgtgaccccaaggaggtggcccggctgtggggcgagaggaagaggaagccaggcatgaactatgagaagctgagccggggcctgcgctactactaccgccgggacatcgtgaggaagagcggcggcaggaagtacacctacagatttggaggccgggtgcccagcctggcctacccagactgtgccggcggcggcagaggagctgagacccagtag

SEQ ID NO: 151527 - DNA, 1029 bp, synthetic construct; identical to SEQ ID NO: 151526
  misc_feature 1..1029: note = Description of Artificial Sequence: Synthetic coding sequence
  source 1..1029: mol_type = other DNA

SEQ ID NO: 151528 - DNA, 432 bp, synthetic construct
  misc_feature 1..432: note = Description of Artificial Sequence: Synthetic coding sequence
  source 1..432: mol_type = other DNA
atgaaggccggctgcagcatcgtggagaagccagagggcggcggcggctaccagttcccagactgggcctacaagacagagagcagccctggcagccggcagatccagctgtggcacttcatcctggagctgctgcagaaggaggagttccgccacgtgattgcctggcagcagggcgagtatggagaatttgtgatcaaggaccctgatgaggtggcccggctgtggggccgcaggaagtgcaagccccagatgaactatgacaagctgagccgggccctgcgctactactacaacaagaggatcctgcacaagaccaagggcaagcgcttcacctacaagttcaacttcaacaagctggtgatgcccaactaccccttcatcaacatccgcagcagcggcaagatccagaccctgctggtgggcaactag

SEQ ID NO: 151529 - DNA, 1539 bp, synthetic construct
  misc_feature 1..1539: note = Description of Artificial Sequence: Synthetic coding sequence
  source 1..1539: mol_type = other DNA
atgaaggccggctgcagcatcgtggagaagccagagggcggcggcggctaccagttcccagactgggcctacaagacagagagcagccctggcagccggcagatccagctgtggcacttcatcctggagctgctgcagaaggaggagttccgccacgtgattgcctggcagcagggcgagtatggagaatttgtgatcaaggaccctgatgaggtggcccggctgtggggccgcaggaagtgcaagccccagatgaactatgacaagctgagccgggccctgcgctactactacaacaagaggatcctgcacaagaccaagggcaagcgcttcacctacaagttcaacttcaacaagctggtgatgcccaactaccccttcatcaacatccgcagcagtggagtggtgccccagagcgcccctcctgtgcccacagccagcagccgcttccacttcccccccctggacacccacagccccaccaatgatgtgcagcccggccgcttcagcgccagcagcctgacagccagcggccaggagagcagcaatggaacagacaggaagacagagctgtctgagctggaggatggcagcgctgctgactggaggagaggagtggaccctgtgagcagcagaaatgccatcggcggcggcggcatcggccaccagaagaggaagccagacatcatgctgcccctgtttgcccggcccggcatgtacccagacccccacagcccctttgctgtgagccccatccctggccggggcggcgtgctgaatgtgcccatcagccctgccctgagcctgacccccaccatcttctcctacagccccagccctggcctgagccccttcaccagcagcagctgcttctccttcaaccctgaggagatgaagcactacctgcacagccaggcctgcagcgtcttcaactaccacctgagccccaggaccttcccccgctacccaggcctgatggtgccccccctgcagtgccagatgcaccctgaggagagcacccagttcagcatcaagctgcagcccccacctgtgggcaggaagaaccgggagcgggtggagagcagcgaggagagcgcccctgtgaccacccccaccatggccagcatccccccacgcatcaaggtggagcccgccagcgagaaggaccctgagagcctgcggcagagcgcccgggagaaggaggagcacacccaggaggagggcaccgtgcccagcaggaccatcgaggaggagaagggcaccatctttgcccggcctgctgccccacccatctggcccagcgtgcccatcagcaccccatctggagagcccctggaggtgacagaagattctgaggacaggcctgggaaggagcccagcgcccctgagaagaaggaggatgccctgatgccacccaagctgcggctgaagaggcgctggaatgatgatcctgaggcccgggagctgagcaagagcggcaagttcctgtggaatggcagcggcccccagggcctggccacagctgctgctgatgcctag

SEQ ID NO: 151530 - DNA, 1533 bp, synthetic construct
  misc_feature 1..1533: note = Description of Artificial Sequence: Synthetic coding sequence
  source 1..1533: mol_type = other DNA
atggatggcttctatgaccagcaggtgcccttcatggtgcctgggaagagccgctcagaagaatgtcggggccggcctgtgattgacaggaagaggaagttcctggacacagacctggcccatgattctgaggagctgttccaggacctgagccagctgcaggaggcctggctggccgaggcccaggtgcctgatgatgagcagtttgtgcctgacttccagagcgacaacctggtgctgcacgcccccccacccaccaagatcaagcgggagctgcacagccccagcagcgagctgagcagctgcagccatgagcaggccctgggcgccaactacggggagaagtgcctgtacaactactgtgcctatgacaggaagcccccatctggcttcaagcccctgaccccacccaccacccccctgagccccacccaccagaaccccctcttccccccaccccaggccaccctgcccaccagcggccacgccccagctgctggccctgtgcagggcgtgggccctgccccagccccccacagcctgcctgagcccggcccccagcagcagacctttgctgtgccccggcccccccaccagcccctgcagatgcccaagatgatgcctgagaaccagtaccccagcgagcagcgcttccagaggcagctgtctgagccctgccaccccttccccccccagcccggggtgcctggggacaaccggcccagctaccaccggcagatgtctgagcccatcgtgcctgctgcccctcctccaccccagggcttcaagcaggagtaccatgaccccctgtatgaacatggagtgcccggcatgcctggccccccagcccacggcttccagagccccatgggcatcaagcaggagccccgggactactgtgtggacagcgaggtgcccaactgccagagcagctacatgagaggaggctacttcagcagcagccatgagggcttctcctatgagaaggacccccggctgtactttgatgacacctgtgtggtgcctgagcggctggagggcaaggtgaagcaggagcccaccatgtaccgggagggccccccctaccagaggcggggcagcctgcagctgtggcagttcctggtgaccctgctggatgatcctgccaatgcccacttcatcgcctggacaggccggggcatggagttcaagctgattgagcctgaggaggtggcccggcgctggggcatccagaagaacagacctgccatgaactatgacaagctgagccgcagcctgcgctactactatgagaagggcatcatgcagaaggtggccggggagagatatgtgtacaagtttgtgtgtgaccctgatgccctcttctccatggccttcccagacaaccagaggcccttcctgaaggccgagagcgagtgccacctgtctgaggaggacaccctgcccctgacccactttgaggacagccctgcctacctgctggacatggaccgctgcagcagcctgccctatgcagagggctttgcctactag

SEQ ID NO: 151531 - DNA, 399 bp, synthetic construct
  misc_feature 1..399: note = Description of Artificial Sequence: Synthetic coding sequence
  source 1..399: mol_type = other DNA
atggatggcttctatgaccagcaggtgcccttcatggtgcctgggaagagccgctcagaagaatgtcggggccggcctgtgattgacaggaagaggaagttcctggacacagacctggcccatgattctgaggagctgttccaggacctgagccagctgcaggaggcctggctggccgaggcccaggtgcctgatgatgagcagtttgtgcctgacttccagagcgacaacctggtgctgcacgcccccccacccaccaagatcaagcgggagctgcacagccccagcagcgagctgagcagctgcagccatgagcaggccctgggcgccaactacggggagaagtgcctgtacaactactgtgcctatgacaggaagcccccatctggcttcaagtag

SEQ ID NO: 151532 - DNA, 423 bp, synthetic construct
  misc_feature 1..423: note = Description of Artificial Sequence: Synthetic coding sequence
  source 1..423: mol_type = other DNA
atggatggcttctatgaccagcaggtgcccttcatggtgcctgggaagagccgctcagaagaatgtcggggccggcctgtgattgacaggaagaggaagttcctggacacagacctggcccatgattctgaggagctgttccaggacctgagccagctgcaggaggcctggctggccgaggcccaggtgcctgatgatgagcagtttgtgcctgacttccagagcgacaacctggtgctgcacgcccccccacccaccaagatcaagcgggagctgcacagccccagcagcgagctgagcagctgcagccatgagcaggccctgggcgccaactacggggagaagtgcctgtacaactactgtgcctatgacaggaagcccccatctggcttcaagcccctgaccccacccaccaccccctag

SEQ ID NO: 151533 - DNA, 1533 bp, synthetic construct; identical to SEQ ID NO: 151530
  misc_feature 1..1533: note = Description of Artificial Sequence: Synthetic coding sequence
  source 1..1533: mol_type = other DNA

SEQ ID NO: 151534 - DNA, 453 bp, synthetic construct
  misc_feature 1..453: note = Description of Artificial Sequence: Synthetic coding sequence
  source 1..453: mol_type = other DNA
atggatggcttctatgaccagcaggtgcccttcatggtgcctgggaagagccgctcagaagaatgtcggggccggcctgtgattgacaggaagaggaagttcctggacacagacctggcccatgattctgaggagctgttccaggacctgagccagctgcaggaggcctggctggccgaggcccaggtgcctgatgatgagcagtttgtgcctgacttccagagcgacaacctggtgctgcacgcccccccacccaccaagatcaagcgggagctgcacagccccagcagcgagctgagcagctgcagccatgagcaggccctgggcgccaactacggggagaagtgcctgtacaactactgtgcctatgacaggaagcccccatctggcttcaagcccctgaccccacccaccacccccctgagccccacccaccagaaccccctcttctag

SEQ ID NO: 151535 - DNA, 1659 bp, synthetic construct
  misc_feature 1..1659: note = Description of Artificial Sequence: Synthetic coding sequence
  source 1..1659: mol_type = other DNA
atgtctgagcggcgctgccccccagagcaccgggagggcgtgaatgacacaggaggcagcctcttcccccagaagctgctgaatgctgagaccagccagagcggcatcagagatgctgagagcaccatggatggcttctatgaccagcaggtgcccttcatggtgcctgggaagagccgctcagaagaatgtcggggccggcctgtgattgacaggaagaggaagttcctggacacagacctggcccatgattctgaggagctgttccaggacctgagccagctgcaggaggcctggctggccgaggcccaggtgcctgatgatgagcagtttgtgcctgacttccagagcgacaacctggtgctgcacgcccccccacccaccaagatcaagcgggagctgcacagccccagcagcgagctgagcagctgcagccatgagcaggccctgggcgccaactacggggagaagtgcctgtacaactactgtgcctatgacaggaagcccccatctggcttcaagcccctgaccccacccaccacccccctgagccccacccaccagaaccccctcttccccccaccccaggccaccctgcccaccagcggccacgccccagctgctggccctgtgcagggcgtgggccctgccccagccccccacagcctgcctgagcccggcccccagcagcagacctttgctgtgccccggcccccccaccagcccctgcagatgcccaagatgatgcctgagaaccagtaccccagcgagcagcgcttccagaggcagctgtctgagccctgccaccccttccccccccagcccggggtgcctggggacaaccggcccagctaccaccggcagatgtctgagcccatcgtgcctgctgcccctcctccaccccagggcttcaagcaggagtaccatgaccccctgtatgaacatggagtgcccggcatgcctggccccccagcccacggcttccagagccccatgggcatcaagcaggagccccgggactactgtgtggacagcgaggtgcccaactgccagagcagctacatgagaggaggctacttcagcagcagccatgagggcttctcctatgagaaggacccccggctgtactttgatgacacctgtgtggtgcctgagcggctggagggcaaggtgaagcaggagcccaccatgtaccgggagggccccccctaccagaggcggggcagcctgcagctgtggcagttcctggtgaccctgctggatgatcctgccaatgcccacttcatcgcctggacaggccggggcatggagttcaagctgattgagcctgaggaggtggcccggcgctggggcatccagaagaacagacctgccatgaactatgacaagctgagccgcagcctgcgctactactatgagaagggcatcatgcagaaggtggccggggagagatatgtgtacaagtttgtgtgtgaccctgatgccctcttctccatggccttcccagacaaccagaggcccttcctgaaggccgagagcgagtgccacctgtctgaggaggacaccctgcccctgacccactttgaggacagccctgcctacctgctggacatggaccgctgcagcagcctgccctatgcagagggctttgcctactag

SEQ ID NO: 151536 - DNA, 1359 bp, synthetic construct
  misc_feature 1..1359: note = Description of Artificial Sequence: Synthetic coding sequence
  source 1..1359: mol_type = other DNA
atgtctgagaccccagcccagtgcagcatcaagcaggagcgcatctcctacaccccacctgagagccctgtgcccagctatgccagcagcacccccctgcacgtgcctgtgccccgggccctgaggatggaggaggacagcatccggctgcctgcccacctgcggctgcagcccatctactggagcagagatgatgtggcccagtggctgaagtgggccgagaatgagttcagcctgcggcccatcgacagcaacacctttgagatgaatggcaaggccctgctgctgctgaccaaggaggacttccgctaccgcagcccccacagcggagatgtgctgtatgagctgctgcagcacatcctgaagcagaggaagccccgcatcctcttcagccccttcttccaccctggcaacagcatccacacccagcctgaggtgatcctgcaccagaaccacgaggaggacaactgtgtgcagaggaccccccggcccagcgtggacaacgtgcaccacaacccccccaccatcgagctgctgcacaggagccgcagccccatcaccaccaaccaccggcccagcccagaccctgagcagaggcccctgcggagccccctggacaacatgatccggcggctgagccctgctgagcgggcccagggcccccggccccaccaggagaacaaccaccaggagagctaccccctgtctgtgagccccatggagaacaaccactgcccagccagcagcgagagccaccccaagcccagcagcccccggcaggagagcaccagggtcatccagctgatgcccagccccatcatgcaccccctcatcctgaaccccaggcacagcgtggacttcaagcagagccggctgtctgaagatggcctgcaccgggagggcaagcccatcaacctgagccaccgggaggacctggcctacatgaaccacatcatggtgtctgtgagccccccagaggagcacgccatgcccatcggcagaattgctgactgccgcctgctgtgggactatgtgtaccagctgctgagtgacagccgctatgagaacttcatccgctgggaggacaaggagagcaagatcttccgcatcgtggaccccaacggcctggcccggctgtggggcaaccacaagaacagaaccaacatgacctatgagaagatgagccgggccctgcggcactactacaagctgaacatcatcaggaaggagcccggccagaggctgctcttccgcttcatgaagaccccagatgagatcatgagcggccgcacagaccggctggagcacctggagagccaggagctggatgagcagatctaccaggaggatgaatgttag

SEQ ID NO: 151537 - DNA, 954 bp, synthetic construct
  misc_feature 1..954: note = Description of Artificial Sequence: Synthetic coding sequence
  source 1..954: mol_type = other DNA
atgcaggagggggagctggccatcagccccatcagccctgtggccgccatgccacccctgggcacccacgtgcaggcccgctgtgaggcccagatcaacctgctgggggagggcggcatctgcaagctgcccggccgcctgcgcatccagcctgccctgtggagcagagaagatgtgctgcactggctgcgctgggccgagcaggagtacagcctgccctgcacagctgagcacggctttgagatgaatggccgggccctgtgcatcctgaccaaggatgacttccgccaccgggcccccagcagtggagatgtgctgtatgagctgctgcagtacatcaagacccagaggcgggccctggtgtgtggccccttcttcggcggcatcttccggctgaagacccccacccagcacagccctgtgcccccagaggaggtgacaggccccagccagatggacacccggcggggccacctgctgcagcccccagaccccggcctgaccagcaactttggccacctggatgatcctggcctggcccgctggacccctgggaaggaggagagcctgaacctgtgccactgtgccgagctgggctgcaggacccagggcgtgtgcagcttccctgccatgccccaggcccccattgatggaagaattgctgactgccgcctgctgtgggactatgtgtaccagctgctgctggacaccaggtatgagccctacatcaagtgggaggacaaggatgccaagatcttccgggtggtggaccccaacggcctggcccggctgtggggcaaccacaagaacagagtgaacatgacctatgagaagatgagccgggccctgcggcactactacaagctgaacatcatcaagaaggagcccggccagaagctgctcttcagaaatggcctgcagctgatcttcatcttcatctggagcttccagtag

SEQ ID NO: 151538 - DNA, 1026 bp, synthetic construct
  misc_feature 1..1026: note = Description of Artificial Sequence: Synthetic coding sequence
  source 1..1026: mol_type = other DNA
atgcaggagggggagctggccatcagccccatcagccctgtggccgccatgccacccctgggcacccacgtgcaggcccgctgtgaggcccagatcaacctgctgggggagggcggcatctgcaagctgcccggccgcctgcgcatccagcctgccctgtggagcagagaagatgtgctgcactggctgcgctgggccgagcaggagtacagcctgccctgcacagctgagcacggctttgagatgaatggccgggccctgtgcatcctgaccaaggatgacttccgccaccgggcccccagcagtggagatgtgctgtatgagctgctgcagtacatcaagacccagaggcgggccctggtgtgtggccccttcttcggcggcatcttccggctgaagacccccacccagcacagccctgtgcccccagaggaggtgacaggccccagccagatggacacccggcggggccacctgctgcagcccccagaccccggcctgaccagcaactttggccacctggatgatcctggcctggcccgctggacccctgggaaggaggagagcctgaacctgtgccactgtgccgagctgggctgcaggacccagggcgtgtgcagcttccctgccatgccccaggcccccattgatggaagaattgctgactgccgcctgctgtgggactatgtgtaccagctgctgctggacaccaggtatgagccctacatcaagtgggaggacaaggatgccaagatcttccgggtggtggaccccaacggcctggcccggctgtggggcaaccacaagaacagagtgaacatgacctatgagaagatgagccgggccctgcggcactactacaagctgaacatcatcaagaaggagcccggccagaagctgctcttccgcttcctgaagacccctgggaagatggtgcaggacaagcacagccacctggagcccctggagagccaggagcaggaccgcatcgagttcaaggacaagaggcctgagatcagcccctag

SEQ ID NO: 151539 - DNA, 795 bp, synthetic construct
  misc_feature 1..795: note = Description of Artificial Sequence: Synthetic coding sequence
  source 1..795: mol_type = other DNA
atgcaggagggggagctggccatcagccccatcagccctgtggccgccatgccacccctgggcacccacgtgcaggcccgctgtgaggcccagatcaacctgctgggggagggcggcatctgcaagctgcccggccgcctgcgcatccagcctgccctgtggagcagagaagatgtgctgcactggctgcgctgggccgagcaggagtacagcctgccctgcacagctgagcacggctttgagatgaatggccgggccctgtgcatcctgaccaaggatgacttccgccaccgggcccccagcagtggagatgtgctgtatgagctgctgcagtacatcaagacccagaggcgggccctggtgtgtggccccttcttcggcggcatcttccggctgaagacccccacccagcacagccctgtgcccccagaggactgccgcctgctgtgggactatgtgtaccagctgctgctggacaccaggtatgagccctacatcaagtgggaggacaaggatgccaagatcttccgggtggtggaccccaacggcctggcccggctgtggggcaaccacaagaacagagtgaacatgacctatgagaagatgagccgggccctgcggcactactacaagctgaacatcatcaagaaggagcccggccagaagctgctcttccgcttcctgaagaccccaggcaagatggtgcaggacaagcacagccacctggagcccctggagagccaggagcaggacagaattgagttcaaggacaagaggcctgagatcagcccctag

SEQ ID NO: 151540 - DNA, 861 bp, synthetic construct
  misc_feature 1..861: note = Description of Artificial Sequence: Synthetic coding sequence
  source 1..861: mol_type = other DNA
atgcaggagggggagctggccatcagccccatcagccctgtggccgccatgccacccctgggcacccacgtgcaggcccgctgtgaggcccagatcaacctgctgggggagggcggcatctgcaagctgcccggccgcctgagagatgtgctgtatgagctgctgcagtacatcaagacccagaggcgggccctggtgtgtggccccttctttggaggcatcttccggctgaagacccccacccagcacagccctgtgcccccagaggaggtgacaggccccagccagatggacacccggcggggccacctgctgcagcccccagaccccggcctgaccagcaactttggccacctggatgaccccggcctggcccgctggaccccaggcaaggaggagagcctgaacctgtgccactgtgccgagctgggctgcaggacccagggcgtgtgcagcttccctgccatgccccaggcccccattgatggaagaattgctgactgccgcctgctgtgggactatgtgtaccagctgctgctggacaccaggtatgagccctacatcaagtgggaggacaaggatgccaagatcttccgggtggtggaccccaacggcctggcccggctgtggggcaaccacaagaacagagtgaacatgacctatgagaagatgagccgggccctgcggcactactacaagctgaacatcatcaagaaggagcccggccagaagctgctcttccgcttcctgaagaccccaggcaagatggtgcaggacaagcacagccacctggagcccctggagagccaggagcaggacagaattgagttcaaggacaagaggcctgagatcagcccctag

SEQ ID NO: 151541 - DNA, 573 bp, synthetic construct
  misc_feature 1..573: note = Description of Artificial Sequence: Synthetic coding sequence
  source 1..573: mol_type = other DNA
atggacacccggcggggccacctgctgcagcccccagaccccggcctgaccagcaactttggccacctggatgaccccggcctggcccgctggaccccaggcaaggaggagagcctgaacctgtgccactgtgccgagctgggctgcaggacccagggcgtgtgcagcttccctgccatgccccaggcccccattgatggaagaattgctgactgccgcctgctgtgggactatgtgtaccagctgctgctggacaccaggtatgagccctacatcaagtgggaggacaaggatgccaagatcttccgggtggtggaccccaacggcctggcccggctgtggggcaaccacaagaacagagtgaacatgacctatgagaagatgagccgggccctgcggcactactacaagctgaacatcatcaagaaggagcccggccagaagctgctcttccgcttcctgaagaccccaggcaagatggtgcaggacaagcacagccacctggagcccctggagagccaggagcaggacagaattgagttcaaggacaagaggcctgagatcagcccctag

SEQ ID NO: 151542 - DNA, 1242 bp, synthetic construct
  misc_feature 1..1242: note = Description of Artificial Sequence: Synthetic coding sequence
  source 1..1242: mol_type = other DNA
atggccagctgtgccgagcccagcgagcccagcgcccccctgcctgctggggtgccccccctggaggactttgaggtgctggatggagtggaggatgctgagggggaggaggaggaggaggaggaggaggaggaggaggatgacctgtctgagctgccccccctggaggacatgggccagcccccagctgaggaggccgagcagcccggggccctggcccgggagttcctggccgccatggagcctgagcccgccccagccccagcccctgaggagtggctggacatcctgggcaatggcctgctgaggaagaagaccctggtgcccggccccccaggcagcagcaggcctgtgaagggccaggtggtgacagtgcacctgcagaccagcctggagaatggcaccagggtgcaggaggagcctgagctggtgttcaccctgggggactgtgatgtgatccaggccctggacctgtctgtgcccctgatggatgtgggggagacagccatggtgacagctgacagcaagtactgctacggcccccagggcagccgcagcccctacatcccccctcatgctgccctgtgcctggaggtgaccctgaagacagctgtggatggccctgacctggagatgctgaccggccaggagcgggtggccctggccaacaggaagagagaatgtggaaatgcccactaccagagagctgactttgtgctggccgccaacagctatgacctggccatcaaggccatcaccagcagcgccaaggtggacatgacctttgaggaggaggcccagctgctgcagctgaaggtgaagtgcctgaacaacctggccgccagccagctgaagctggaccactacagagctgccctgcggagctgcagcctggtgctggagcaccagcctgacaacatcaaggccctcttcaggaagggcaaggtgctggcccagcagggcgagtacagcgaggccatccccatcctgcgggccgccctgaagctggagcccagcaacaagaccatccatgctgagctgagcaagctggtgaagaagcatgctgcccagaggagcacagaaacagccctgtacaggaagatgctgggcaaccccagccggctgcctgccaagtgccctgggaagggggcctggagcatcccctggaagtggctgtttggagccacagctgtggccctgggcggcgtggccctgtctgtggtgattgctgccaggaactag

SEQ ID NO: 151543 - DNA, 1422 bp, synthetic construct
  misc_feature 1..1422: note = Description of Artificial Sequence: Synthetic coding sequence
  source 1..1422: mol_type = other DNA
atgaactatgacaagctgagccgggccctgcgctactactacaacaagaggatcctgcacaagaccaagggcaagcgcttcacctacaagttcaacttcaacaagctggtgctggtgaactaccccttcattgatgtgggcctggccggcggcgctgtgccccagagcgcccctcctgtgcccagcggcggcagccacttccgcttcccccccagcaccccatctgaggtgctgagccccacagaggaccccaggagccccccagcctgcagcagcagcagcagcagcctcttctctgctgtggtggcccggcggctgggccggggctctgtgtctgactgcagtgatggcaccagcgagctggaggagcccctgggggaggacccccgggcccggcccccaggccccccagacctgggcgccttccggggcccccccctggcccggctgccccatgaccccggggtcttccgggtgtacccccggccccggggcggccctgagcccctgagccccttccctgtgagccccctggccggccctggcagcctgctgcccccccagctgagccctgccctgcccatgacccccacccacctggcctacacccccagccccaccctgagccccatgtaccccagcggcggcggcggccccagcggcagcggcggcggcagccacttctccttctccccagaggacatgaagcgctacctgcaggcccacacccagagcgtgtacaactaccacctgagcccccgggccttcctgcactacccaggcctggtggtgccccagccccagaggccagacaagtgccccctgccccccatggcccctgagaccccacctgtgcccagcagcgccagcagcagcagcagcagcagcagcagccccttcaagttcaagctgcagcccccacccctgggccggcggcagagagctgctggggagaaggctgtggccggggctgacaagagcggcggcagcgctgggggcctggccgagggcgctggggccctggcccctcctcctcctccaccccagatcaaggtggagcccatcagcgagggggagagcgaggaggtggaggtgacagacatcagtgatgaagatgaggaggatggagaggtgttcaagaccccccgggcccccccagccccacccaagccagagcctggagaggcccctggggccagccagtgcatgcccctgaagctgcgcttcaagaggcgctggagcgaggactgccgcctggagggcggcggcggccctgctgggggctttgaagatgaaggagaggacaagaaggtgcggggggagggccctggagaggccggcggccccctgaccccaagaagagtgtccagtgacctgcagcacgccacagcccagctgagcctggagcaccgggacagctag

SEQ ID NO: 151544 - DNA, 2478 bp, synthetic construct
  misc_feature 1..2478: note = Description of Artificial Sequence: Synthetic coding sequence
  source 1..2478: mol_type = other DNA
atggctgctgatgagggcagcgctgagaagcaggccggggaggcccacatggctgctgatggagagaccaacggcagctgtgagaacagtgatgccagcagccacgccaatgctgccaagcacacccaggacagcgcccgggtgaacccccaggacggcaccaacaccctgaccagaattgctgaaaatggagtgtctgagcgggacagcgaggccgccaagcagaaccacgtgacagcagatgactttgtgcagacctctgtgattggcagcaatggctacatcctgaacaagccagccctgcaggcccagcccctgcggaccaccagcaccctggccagcagcctgcccggccacgccgccaagaccctgcctggaggagctgggaagggccgcaccccatctgccttcccccagaccccagctgcccccccagccaccctgggggagggcagcgctgacacagaggacaggaagctgcctgcccctggagcagatgtgaaggtgcaccgggccaggaagaccatgcccaagtctgtggtgggcctgcatgctgccagcaaggacccccgggaggtgcgggaggcccgggaccacaaggagcccaaggaggagatcaacaagaacatcagtgactttggccggcagcagctgctgccccccttccccagcctgcaccagagcctgccccagaaccagtgctacatggccaccaccaagagccagacagcctgcctgccctttgtgctggccgctgctgtgtccaggaagaagaagaggaggatgggcacctacagcctggtgcccaagaagaagaccaaggtgctgaagcagaggacagtcatcgagatgttcaagagcatcacccacagcacagtgggcagcaagggggagaaggacctgggcgccagcagcctgcacgtgaatggagagagcctggagatggacagtgatgaagatgacagcgaggagctggaggaggatgatggccatggagctgagcaggccgccgccttccccacagaggacagcaggaccagcaaggagagcatgtctgaggccgaccgggcccagaagatggatggagagagcgaggaggagcaggagagcgtggacacaggagaggaggaggagggcggagatgaaagtgacctgagcagcgagagcagcatcaagaagaagttcctgaagaggaagggcaagacagacagcccctggatcaagccagccaggaagagaagaagaagaagcaggaagaagcccagcggggccctgggcagcgagagctacaagagcagcgctggcagcgctgagcagacagcccctggggacagcacaggctacatggaggtgtccctggacagcctggacctgcgggtgaagggcatcctgagcagccaggccgagggcctggccaatggaccagatgtgctggagacagatggcctgcaggaggtgcccctgtgcagctgcaggatggagacccccaagagccgggagatcaccaccctggccaacaaccagtgcatggccacagagagcgtggaccacgagctgggccgctgcaccaacagcgtggtgaagtatgagctgatgaggcccagcaacaaggcccccctgctggtgctgtgtgaggaccaccggggccgcatggtgaagcaccagtgctgccccggctgcggctacttctgcacagctggcaacttcatggagtgccagcctgagagcagcatcagccaccgcttccacaaggactgtgccagccgggtgaacaatgccagctactgcccccactgtggggaggagagcagcaaggccaaggaggtgaccatcgccaaggctgacaccaccagcacagtgacccctgtgcccggccaggagaagggcagcgccctggagggccgggctgacaccaccaccggcagcgctgctggcccccccctgtctgaagatgacaagctgcagggcgccgccagccacgtgcctgagggctttgaccccaccggccctgctggcctgggccggcccaccccaggcctgagccagggccctgggaaggagaccctggagagcgccctgattgccctggacagcgagaagcccaagaagctgcgcttccaccccaagcagctgtacttcagcgcccggcagggcgagctgcagaaggtgctgctgatgctggtggatggcatcgaccccaacttcaagatggagcaccagaacaagaggagccccctgcacgccgctgctgaggccggccacgtggacatctgccacatgctggtgcaggccggggccaacatcgacacctgcagcgaggaccagaggacccccctgatggaggccgctgagaacaaccacctggaggccgtgaagtacctgatcaaggccggggccctggtggaccccaagatccagaagaccagcaaggtgtacacagagagccaggagacccagaggagccagaccatcctgtag

SEQ ID NO: 151545 - DNA, 3462 bp, synthetic construct
  misc_feature 1..3462: note = Description of Artificial Sequence: Synthetic coding sequence
  source 1..3462: mol_type = other DNA
atggctgctgatgagggcagcgctgagaagcaggccggggaggcccacatggctgctgatggagagaccaacggcagctgtgagaacagtgatgccagcagccacgccaatgctgccaagcacacccaggacagcgcccgggtgaacccccaggacggcaccaacaccctgaccagaattgctgaaaatggagtgtctgagcgggacagcgaggccgccaagcagaaccacgtgacagcagatgactttgtgcagacctctgtgattggcagcaatggctacatcctgaacaagccagccctgcaggcccagcccctgcggaccaccagcaccctggccagcagcctgcccggccacgccgccaagaccctgcctggaggagctgggaagggccgcaccccatctgccttcccccagaccccagctgcccccccagccaccctgggggagggcagcgctgacacagaggacaggaagctgcctgcccctggagcagatgtgaaggtgcaccgggccaggaagaccatgcccaagtctgtggtgggcctgcatgctgccagcaaggacccccgggaggtgcgggaggcccgggaccacaaggagcccaaggaggagatcaacaagaacatcagtgactttggccggcagcagctgctgccccccttccccagcctgcaccagagcctgccccagaaccagtgctacatggccaccaccaagagccagacagcctgcctgccctttgtgctggccgctgctgtgtccaggaagaagaagaggaggatgggcacctacagcctggtgcccaagaagaagaccaaggtgctgaagcagaggacagtcatcgagatgttcaagagcatcacccacagcacagtgggcagcaagggggagaaggacctgggcgccagcagcctgcacgtgaatggagagagcctggagatggacagtgatgaagatgacagcgaggagctggaggaggatgatggccatggagctgagcaggccgccgccttccccacagaggacagcaggaccagcaaggagagcatgtctgaggccgaccgggcccagaagatggatggagagagcgaggaggagcaggagagcgtggacacaggagaggaggaggagggcggagatgaaagtgacctgagcagcgagagcagcatcaagaagaagttcctgaagaggaagggcaagacagacagcccctggatcaagccagccaggaagagaagaagaagaagcaggaagaagcccagcggggccctgggcagcgagagctacaagagcagcgctggcagcgctgagcagacagcccctggggacagcacaggctacatggaggtgtccctggacagcctggacctgcgggtgaagggcatcctgagcagccaggccgagggcctggccaatggaccagatgtgctggagacagatggcctgcaggaggtgcccctgtgcagctgcaggatggagacccccaagagccgggagatcaccaccctggccaacaaccagtgcatggccacagagagcgtggaccacgagctgggccgctgcaccaacagcgtggtgaagtatgagctgatgaggcccagcaacaaggcccccctgctggtgctgtgtgaggaccaccggggccgcatggtgaagcaccagtgctgccccggctgcggctacttctgcacagctggcaacttcatggagtgccagcctgagagcagcatcagccaccgcttccacaaggactgtgccagccgggtgaacaatgccagctactgcccccactgtggggaggagagcagcaaggccaaggaggtgaccatcgccaaggctgacaccaccagcacagtgacccctgtgcccggccaggagaagggcagcgccctggagggccgggctgacaccaccaccggcagcgctgctggcccccccctgtctgaagatgacaagctgcagggcgccgccagccacgtgcctgagggctttgaccccaccggccctgctggcctgggccggcccaccccaggcctgagccagggccctgggaaggagaccctggagagcgccctgattgccctggacagcgagaagcccaagaagctgcgcttccaccccaagcagctgtacttcagcgcccggcagggcgagctgcagaaggtgctgctgatgctggtggatggcatcgaccccaacttcaagatggagcaccagaacaagaggagccccctgcacgccgctgctgaggccggccacgtggacatctgccacatgctggtgcaggccggggccaacatcgacacctgcagcgaggaccagaggacccccctgatggaggccgctgagaacaaccacctggaggccgtgaagtacctgatcaaggccggggccctggtggaccccaaggatgctgagggcagcacctgcctgcacctggccgccaagaagggccactatgaggtggtgcagtacctgctgagcaatggccagatggatgtgaactgccaggatgatggcggctggacccccatgatctgggccacagagtacaagcacgtggacctggtgaagctgctgctgagcaagggcagtgacatcaacatccgggacaatgaggagaacatctgcctgcactgggccgccttcagcggctgtgtggacattgctgagatcctgctggccgccaagtgtgacctgcatgctgtgaacatccatggagacagccccctgcacatcgccgcccgggagaacagatatgactgtgtggtgctcttcctgagccgggacagtgatgtgaccctgaagaacaaggagggggagacccccctgcagtgtgccagcctgaacagccaggtgtggagcgccctgcagatgagcaaggccctgcaggacagcgccccagaccggcccagccctgtggagcgcatcgtgtcccgggacatcgcccggggctatgagcgcatccccatcccctgtgtgaatgctgtggacagcgagccctgccccagcaactacaagtatgtgtcccagaactgtgtgaccagccccatgaacatcgacaggaacatcacccacctgcagtactgtgtgtgcattgatgactgcagcagcagcaactgcatgtgtggccagctgtccatgcgctgctggtatgacaaggatggccgcctgctgcctgagttcaacatggccgagcccccactcatctttgagtgcaaccacgcctgcagctgctggaggaactgcaggaacagagtggtgcagaatggcctgcgggcccggctgcagctgtaccgcacccgggacatgggctggggcgtgcgcagcctgcaggacatccccccaggcacctttgtgtgtgaatatgtgggggagctgatcagtgacagcgaggctgatgtgcgggaggaggacagctacctgtttgacctggacaacaaggtgatcagcgcctag

SEQ ID NO: 151546 - DNA, 3897 bp, synthetic construct
  misc_feature 1..3897: note = Description of Artificial Sequence: Synthetic coding sequence
  source 1..3897: mol_type = other DNA
atggctgctgctgatgctgaggccgtgcctgcccggggggagccccagcaggactgctgcgtgaagacagagctgctgggggaggagacccccatggccgcagatgagggcagcgctgagaagcaggccggggaggcccacatggccgcagatggagagaccaacggcagctgtgaaaattctgatgccagcagccacgccaatgctgccaagcacacccaggacagcgcccgggtgaacccccaggacggcaccaacaccctgaccagaattgctgaaaatggagtgtctgagcgggacagcgaggccgccaagcagaaccacgtgacagcagatgactttgtgcagaccagcgtcatcggcagcaatggctacatcctgaacaagccagccctgcaggcccagcccctgcggaccaccagcaccctggccagcagcctgcccggccatgctgccaagaccctgcccggcggggccgggaaaggaagaacacccagcgccttcccccagaccccagctgcccccccagccaccctgggggagggcagcgctgacacagaggacaggaagctgcctgcccctggagcagatgtgaaggtgcaccgggccaggaagaccatgcccaagtctgtggtgggcctgcacgccgccagcaaggacccccgggaggtgcgggaggcccgggaccacaaggagcccaaggaggagatcaacaagaacatcagtgactttggccggcagcagctgctgccccccttccccagcctgcaccagagcctgccccagaaccagtgctacatggccaccaccaagagccagacagcctgcctgccctttgtgctggccgctgctgtgtccaggaagaagaagaggaggatgggcacctacagcctggtgcccaagaagaagaccaaggtgctgaagcagaggacagtgattgagatgttcaagagcatcacccacagcacagtgggcagcaaaggagagaaggacctgggcgccagcagcctgcacgtgaatggagagagcctggagatggacagtgatgaagatgattctgaggagctggaggaggatgatggccacggggctgagcaggccgccgccttccccacagaggacagcaggaccagcaaggagagcatgtctgaggccgaccgggcccagaagatggatggagagagcgaggaggagcaggagagcgtggacaccggggaggaggaggagggcggagatgaaagtgacctgagcagcgagagcagcatcaagaagaagttcctgaagaggaagggcaagacagacagcccctggatcaagccagccaggaagagaagaagaagaagcaggaagaagcccagcggggccctgggcagcgagagctacaagagcagcgctggcagcgctgagcagacagcccctggggacagcacaggctacatggaggtgtccctggacagcctggacctgcgggtgaagggcatcctgagcagccaggccgagggcctggccaacggcccagatgtgctggagacagatggcctgcaggaggtgcccctgtgcagctgcaggatggagacccccaagagccgggagatcaccaccctggccaacaaccagtgcatggccacagaatctgtggaccacgagctgggccgctgcaccaacagcgtggtgaagtatgagctgatgaggcccagcaacaaggcccccctgctggtgctgtgtgaggaccaccggggccgcatggtgaagcaccagtgctgccccggctgcggctacttctgcacagctggcaacttcatggagtgccagcctgagagcagcatcagccaccgcttccacaaggactgtgccagccgggtgaacaatgccagctactgcccccactgtggggaggagagcagcaaggccaaggaggtgaccatcgccaaggctgacaccaccagcacagtgacccctgtgcccggccaggagaagggcagcgccctggagggccgggctgacaccaccactggatctgctgctggcccccccctgtctgaagatgacaagctgcagggcgccgccagccacgtgcctgagggctttgaccccactggacctgctggcctgggccggcccaccccaggcctgagccagggccctgggaaggagaccctggagagcgccctgattgccctggacagcgagaagcccaagaagctgcgcttccaccccaagcagctgtacttcagcgcccggcagggcgagctgcagaaggtgctgctgatgctggtggatggcatcgaccccaacttcaagatggagcaccagaacaagaggagccccctgcatgctgctgctgaggccggccacgtggacatctgccacatgctggtgcaggccggggccaacatcgacacctgcagcgaggaccagaggacccccctgatggaggccgctgagaacaaccacctggaggccgtgaagtacctgatcaaggccggggccctggtggaccccaaggatgctgagggcagcacctgcctgcacctggccgccaagaagggccactatgaggtggtgcagtacctgctgagcaatggccagatggatgtgaactgccaggatgatggcggctggacccccatgatctgggccacagagtacaagcacgtggacctggtgaagctgctgctgagcaaaggaagtgacatcaacatccgggacaatgaggagaacatctgcctgcactgggccgccttcagcggctgtgtggacattgctgagatcctgctggccgccaagtgtgacctgcatgctgtgaacatccacggggacagccccctgcacatcgccgccagagaaaatagatatgactgtgtggtgctcttcctgagccgggacagtgatgtgaccctgaagaacaaggagggggagacccccctgcagtgtgccagcctgaacagccaggtgtggagcgccctgcagatgagcaaggccctgcaggacagcgccccagaccggcccagccctgtggagagaattgtgtcccgggacatcgcccggggctatgaaagaatccccatcccctgtgtgaatgctgtggacagcgagccctgccccagcaactacaagtatgtgtcccagaactgtgtgaccagccccatgaacatcgacaggaacatcacccacctgcagtactgtgtgtgcattgatgactgcagcagcagcaactgcatgtgtggccagctgtccatgcgctgctggtatgacaaggatggccgcctgctgcctgagttcaacatggccgagcccccactcatctttgagtgcaaccacgcctgcagctgctggaggaactgcaggaacagagtggtgcagaatggcctgcgggcccggctgcagctgtaccgcacccgggacatgggctggggcgtgcgcagcctgcaggacatccccccaggcacctttgtgtgtgaatatgtgggggagctgatcagtgacagcgaggctgatgtgcgggaggaggacagctacctgtttgacctggacaacaaggatggagaggtgtactgcattgatgcccgcttctatggaaatgtgagccgcttcatcaaccaccactgtgagcccaacctggtgcctgtgcgggtcttcatggcccaccaggacctgcgcttcccccgcatcgccttcttcagcaccaggctcatcgaggccggggagcagctgggctttgattatggagagcgcttctgggacatcaagggcaagctgttcagctgccgctgtggcagccccaagtgccgccacagcagcgctgccctggcccagaggcaggccagcgctgcccaggaggcccaggaggatggcctgcctgacaccagcagcgctgctgctgctgaccccctgtag

SEQ ID NO: 151547 - DNA, 2427 bp, synthetic construct
  misc_feature 1..2427: note = Description of Artificial Sequence: Synthetic coding sequence
  source 1..2427: mol_type = other DNA
atggctgctgctgatgctgaggccgtgcctgcccggggggagccccagcaggactgctgcgtgaagacagagctgctgggggaggagacccccatggccgcagatgagggcagcgctgagaagcaggccggggaggcccacatggccgcagatggagagaccaacggcagctgtgaaaattctgatgccagcagccacgccaatgctgccaagcacacccaggacagcgcccgggtgaacccccaggacggcaccaacaccctgaccagaattgctgaaaatggagtgtctgagcgggacagcgaggccgccaagcagaaccacgtgacagcagatgactttgtgcagaccagcgtcatcggcagcaatggctacatcctgaacaagccagccctgcaggcccagcccctgcggaccaccagcaccctggccagcagcctgcccggccatgctgccaagaccctgcccggcggggccgggaaaggaagaacacccagcgccttcccccagaccccagctgcccccccagccaccctgggggagggcagcgctgacacagaggacaggaagctgcctgcccctggagcagatgtgaaggtgcaccgggccaggaagaccatgcccaagtctgtggtgggcctgcacgccgccagcaaggacccccgggaggtgcgggaggcccgggaccacaaggagcccaaggaggagatcaacaagaacatcagtgactttggccggcagcagctgctgccccccttccccagcctgcaccagagcctgccccagaaccagtgctacatggccaccaccaagagccagacagcctgcctgccctttgtgctggccgctgctgtgtccaggaagaagaagaggaggatgggcacctacagcctggtgcccaagaagaagaccaaggtgctgaagcagaggacagtgattgagatgttcaagagcatcacccacagcacagtgggcagcaaaggagagaaggacctgggcgccagcagcctgcacgtgaatggagagagcctggagatggacagtgatgaagatgattctgaggagctggaggaggatgatggccacggggctgagcaggccgccgccttccccacagaggacagcaggaccagcaaggagagcatgtctgaggccgaccgggcccagaagatggatggagagagcgaggaggagcaggagagcgtggacaccggggaggaggaggagggcggagatgaaagtgacctgagcagcgagagcagcatcaagaagaagttcctgaagaggaagggcaagacagacagcccctggatcaagccagccaggaagagaagaagaagaagcaggaagaagcccagcggggccctgggcagcgagagctacaagagcagcgctggcagcgctgagcagacagcccctggggacagcacaggctacatggaggtgtccctggacagcctggacctgcgggtgaagggcatcctgagcagccaggccgagggcctggccaacggcccagatgtgctggagacagatggcctgcaggaggtgcccctgtgcagctgcaggatggagacccccaagagccgggagatcaccaccctggccaacaaccagtgcatggccacagaatctgtggaccacgagctgggccgctgcaccaacagcgtggtgaagtatgagctgatgaggcccagcaacaaggcccccctgctggtgctgtgtgaggaccaccggggccgcatggtgaagcaccagtgctgccccggctgcggctacttctgcacagctggcaacttcatggagtgccagcctgagagcagcatcagccaccgcttccacaaggactgtgccagccgggtgaacaatgccagctactgcccccactgtggggaggagagcagcaaggccaaggaggtgaccatcgccaaggctgacaccaccagcacagtgacccctgtgcccggccaggagaagggcagcgccctggagggccgggctgacaccaccactggatctgctgctggcccccccctgtctgaagatgacaagctgcagggcgccgccagccacgtgcctgagggctttgaccccactggacctgctggcctgggccggcccaccccaggcctgagccagggccctgggaaggagaccctggagagcgccctgattgccctggacagcgagaagcccaagaagctgcgcttccaccccaagcagctgtacttcagcgcccggcagggcgagctgcagaaggtgctgctgatgctggtggatggcatcgaccccaacttcaagatggagcaccagaacaagaggagccccctgcatgctgctgctgaggccggccacgtggacatctgccacatgctggtgcagttctgccgcctgggcagccccaggagccggggctgcctgtggtag

SEQ ID NO: 151548 - DNA, 3702 bp, synthetic construct
  misc_feature 1..3702: note = Description of Artificial Sequence: Synthetic coding sequence
  source 1..3702: mol_type = other DNA
atgaggggcctgccccggggccggggcctgatgagggcccggggccggggccgggccgcccctcctggcagccggggccggggccggggcggcccccaccggggccggggccggcccaggagcctgctgagcctgccccgggcccaggcctcctggaccccccagctgagcacaggcctgaccagcccccctgtgccctgcctgcccagccagggcgaggccccagctgagatgggcgccctgctgctggagaaggagaccaggggggccacagagcgggtgcacggcagcctgggggacacccccaggtctgaggagaccctgcccaaggccaccccagacagcctggagcctgctggccccagcagccctgcctctgtgacagtgacagtgggagatgaaggagctgacacccctgtgggcgccacccccctgattggagatgaaagtgagaacctggagggagatggagacctgcggggcggccgcatcctgctgggccacgccaccaagagcttccccagcagccccagcaaaggaggcagctgccccagccgggccaagatgtccatgaccggggccggcaagagcccccccagcgtgcagagcctggccatgaggctgctgtccatgcctggggcccagggcgctgctgctgctggcagcgagcccccaccagccaccaccagccctgagggccagcccaaggtgcaccgggccaggaagaccatgagcaagccaggaaatggccagccccctgtgcctgagaagaggcctcctgagatccagcacttcaggatgtctgatgatgtgcacagcctgggcaaggtgaccagtgacctggccaagaggaggaagctgaacagcggcggcggcctgtctgaggagctgggcagcgccaggagaagtggagaggtgaccctgaccaagggggaccccggcagcctggaggagtgggagaccgtggtgggagatgacttcagcctgtactatgacagctacagcgtggatgagcgggtggacagcgacagcaagtctgaggtggaggccctgacagagcagctgtctgaggaggaggaggaggaggaggaggaggaggaggaggaggaggaggaggaggaggaggaggaggaggaggaggatgaggagagcggcaaccagagcgacagaagtggcagcagcggccgcaggaaggccaagaagaagtggaggaaggacagcccctgggtgaagcccagcaggaagaggaggaagcgggagcccccccgggccaaggagccccggggcgtgtccaatgacaccagcagcctggagacagagcggggctttgaggagctgcccctgtgcagctgcaggatggaggcccccaagattgaccgcatcagcgagagagctggccacaagtgcatggccacagagagcgtggatggagagctgagcggctgcaatgctgccatcctgaagcgggagaccatgaggcccagcagccgggtggccctgatggtgctgtgtgagacccaccgggccaggatggtgaagcaccactgctgccccggctgcggctacttctgcacagctggcaccttcctggagtgccacccagacttccgggtggcccaccgcttccacaaggcctgtgtgtcccagctgaatggcatggtgttctgcccccactgtggagaagatgccagcgaggcccaggaggtgaccatccccagaggagatggagtgaccccacctgctggaacagctgccccagcccccccacccctgagccaggatgtgcccggccgggctgacaccagccagcccagcgccaggatgaggggccatggagagcccaggaggcctccctgtgaccccctggccgacaccatcgacagcagcggccccagcctgaccctgcccaatggaggctgcctgtctgctgtgggcctgcccctgggccctggccgggaggccctggagaaggccctggtgatccaggagagcgagaggaggaagaagctgcgcttccacccccggcagctgtacctgtctgtgaagcagggcgagctgcagaaggtgatcctgatgctgctggacaacctggaccccaacttccagagcgaccagcagagcaagaggacccccctgcacgccgccgcccagaagggctctgtggagatctgccacgtgctgctgcaggccggggccaacatcaatgctgtggacaagcagcagaggacccccctgatggaggccgtggtgaacaaccacctggaggtggcccgctacatggtgcagaggggcggctgtgtgtacagcaaggaggaggatggcagcacctgcctgcaccacgccgccaagattggcaacctggagatggtgtccctgctgctgagcacaggccaggtggatgtgaatgcccaggacagcggcggctggacccccatcatctgggccgctgagcacaagcacattgaagtcatccgcatgctgctgaccagaggagcagatgtgaccctgacagacaatgaggagaacatctgcctgcactgggccagcttcaccggcagcgctgccatcgccgaggtgctgctgaatgcccgctgtgacctgcatgctgtgaactaccatggagacacccccctgcacatcgccgcccgggagagctaccatgactgtgtgctgctcttcctgagcagaggagccaaccctgagctgaggaacaaggagggggacacagcctgggacctgaccccagagaggagtgatgtgtggtttgccctgcagctgaacaggaagctgcggctgggcgtgggcaacagagccatcagaacagagaagatcatctgcagagatgtggcccggggctatgaaaatgtgcccatcccctgtgtgaatggagtggatggagagccctgcccagaggactacaagtacatcagcgagaactgtgagaccagcaccatgaacatcgacaggaacatcacccacctgcagcactgcacctgtgtggatgactgcagcagcagcaactgcctgtgtggccagctgagcatccgctgctggtatgacaaggatggccgcctgctgcaggagttcaacaagattgagcccccactcatctttgagtgcaaccaggcctgcagctgctggaggaactgcaagaacagagtggtgcagagcggcatcaaggtgcggctgcagctgtacagaacagccaagatgggctggggcgtgcgggccctgcagaccatcccccagggcaccttcatctgtgaatatgtgggggagctgatcagtgatgctgaggctgatgtgcgggaggatgacagctacctgtttgacctggacaacaaggatggagaggtgtactgcattgatgcccgctactacggcaacatcagccgcttcatcaaccacctgtgtgaccccaacatcatccctgtgcgggtcttcatgctgcaccaggacctgcgcttccccagaattgccttcttcagcagccgggacatcagaactggagaggagctgggctttgattatggagaccgcttctgggacatcaagagcaagtacttcacctgccagtgtggcagcgagaagtgcaagcacagcgctgaggccatcgccctggagcagagccggctggcccggctggacccccaccctgagctgctgcctgagctgggcagcctgccccctgtgaacacctag

SEQ ID NO: 151549 - DNA, 3531 bp, synthetic construct
  misc_feature 1..3531: note = Description of Artificial Sequence: Synthetic coding sequence
  source 1..3531: mol_type = other DNA
atggctgctgctgctggagctgctgctgctgctgctgctgagggggaggccccagctgagatgggcgccctgctgctggagaaggagaccaggggggccacagagcgggtgcacggcagcctgggggacacccccaggtctgaggagaccctgcccaaggccaccccagacagcctggagcccgccggccccagcagccctgcctctgtgacagtgacagtgggagatgagggcgctgacacccctgtgggcgccacccccctgattggagatgaaagtgagaacctggagggagatggagacctgcggggcggccgcatcctgctgggccacgccaccaagagcttccccagcagccccagcaagggcggcagctgccccagccgggccaagatgtccatgactggagctgggaagagccccccatctgtgcagagcctggccatgaggctgctgtccatgcctggggcccagggcgctgctgctgctggcagcgagcccccaccagccaccaccagccctgagggccagcccaaggtgcaccgggccaggaagaccatgagcaagccaggaaatggccagccccctgtgcctgagaagaggcctcctgagatccagcacttcaggatgtctgatgatgtgcacagcctgggcaaggtgaccagtgacctggccaagaggaggaagctgaacagcggcggcggcctgtctgaggagctgggcagcgcccggcgcagcggggaggtgaccctgaccaagggggaccccggcagcctggaggagtgggagaccgtggtgggagatgacttcagcctgtactatgacagctacagcgtggatgagcgggtggacagcgacagcaagtctgaggtggaggccctgacagagcagctgtctgaggaggaggaggaggaggaggaggaggaggaggaggaggaggaggaggaggaggaggaggaggaggaggaggatgaggagagcggcaaccagagcgacaggagcggcagcagtggaagaaggaaggccaagaagaagtggaggaaggacagcccctgggtgaagcccagcaggaagaggaggaagcgggagcccccccgggccaaggagccccggggcgtgtccaatgacaccagcagcctggagacagagcggggctttgaggagctgcccctgtgcagctgcaggatggaggcccccaagattgaccgcatcagcgagcgggccggccacaagtgcatggccacagaatctgtggatggagagctgagcggctgcaatgctgccatcctgaagcgggagaccatgaggcccagcagccgggtggccctgatggtgctgtgtgagacccaccgggccaggatggtgaagcaccactgctgccccggctgcggctacttctgcacagctggcaccttcctggagtgccacccagacttccgggtggcccaccgcttccacaaggcctgtgtgtcccagctgaatggcatggtgttctgcccccactgtggggaggatgccagcgaggcccaggaggtgaccatccccagaggagatggagtgaccccacctgctggaacagctgccccagcccccccacccctgagccaggatgtgcccggccgggctgacaccagccagcccagcgccaggatgaggggccacggggagccccggcggcccccctgtgaccccctggccgacaccatcgacagcagcggccccagcctgaccctgcccaacggcggctgcctgtctgctgtgggcctgcccctgggccctggccgggaggccctggagaaggccctggtgatccaggagagcgagaggaggaagaagctgcgcttccacccccggcagctgtacctgtctgtgaagcagggcgagctgcagaaggtgatcctgatgctgctggacaacctggaccccaacttccagagcgaccagcagagcaagaggacccccctgcatgctgctgcccagaagggctctgtggagatctgccacgtgctgctgcaggccggggccaacatcaatgctgtggacaagcagcagaggacccccctgatggaggccgtggtgaacaaccacctggaggtggcccgctacatggtgcagagaggaggctgtgtgtacagcaaggaggaggatggcagcacctgcctgcaccacgccgccaagattggcaacctggagatggtgtccctgctgctgagcacaggccaggtggatgtgaatgcccaggacagcggcggctggacccccatcatctgggccgctgagcacaagcacatcgaggtgatccgcatgctgctgaccagaggagcagatgtgaccctgacagacaatgaggagaacatctgcctgcactgggccagcttcaccggcagcgctgccatcgccgaggtgctgctgaatgcccgctgtgacctgcatgctgtgaactaccacggggacacccccctgcacatcgccgcccgggagagctaccatgactgtgtgctgctcttcctgagcagaggagccaaccctgagctgaggaacaaggagggggacacagcctgggacctgaccccagagaggagtgatgtgtggtttgccctgcagctgaacaggaagctgcggctgggcgtgggcaacagagccatcagaacagagaagatcatctgcagagatgtggcccggggctatgaaaatgtgcccatcccctgtgtgaatggagtggatggagagccctgcccagaggactacaagtacatcagcgagaactgtgagaccagcaccatgaacatcgacaggaacatcacccacctgcagcactgcacctgtgtggatgactgcagcagcagcaactgcctgtgtggccagctgagcatccgctgctggtatgacaaggatggccgcctgctgcaggagttcaacaagattgagcccccactcatctttgagtgcaaccaggcctgcagctgctggaggaactgcaagaacagagtggtgcagagcggcatcaaggtgcggctgcagctgtacagaacagccaagatgggctggggcgtgcgggccctgcagaccatcccccagggcaccttcatctgtgaatatgtgggggagctgatcagtgatgctgaggctgatgtgagagaagatgacagctacctgtttgacctggacaacaaggatggagaggtgtactgcattgatgcccgctactacggcaacatcagccgcttcatcaaccacctgtgtgaccccaacatcatccctgtgcgggtcttcatgctgcaccaggacctgcgcttcccccgcatcgccttcttcagcagccgggacatcagaactggagaggagctgggctttgattatggagaccgcttctgggacatcaagagcaagtacttcacctgccagtgtggcagcgagaagtgcaagcacagcgctgaggccatcgccctggagcagagccggctggcccggctggacccccaccctgagctgctgcctgagctgggcagcctgccccctgtgaacacctag

SEQ ID NO: 151550 - DNA, 3633 bp, synthetic construct
  misc_feature 1..3633: note = Description of Artificial Sequence: Synthetic coding sequence
  source 1..3633: mol_type = other DNA
atggctgctgctgctggagctgctgctgctgctgctgctgagggggaggccccagctgagatgggcgccctgctgctggagaaggagaccaggggggccacagagcgggtgcacggcagcctgggggacacccccaggtctgaggagaccctgcccaaggccaccccagacagcctggagcccgccggccccagcagccctgcctctgtgacagtgacagtgggagatgagggcgctgacacccctgtgggcgccacccccctgattggagatgaaagtgagaacctggagggagatggagacctgcggggcggccgcatcctgctgggccacgccaccaagagcttccccagcagccccagcaagggcggcagctgccccagccgggccaagatgtccatgactggagctgggaagagccccccatctgtgcagagcctggccatgaggctgctgtccatgcctggggcccagggcgctgctgctgctggcagcgagcccccaccagccaccaccagccctgagggccagcccaaggtgcaccgggccaggaagaccatgagcaagccaggaaatggccagccccctgtgcctgagaagaggcctcctgagatccagcacttcaggatgtctgatgatgtgcacagcctgggcaaggtgaccagtgacctggccaagaggaggaagctgaacagcggcggcggcctgtctgaggagctgggcagcgcccggcgcagcggggaggtgaccctgaccaagggggaccccggcagcctggaggagtgggagaccgtggtgggagatgacttcagcctgtactatgacagctacagcgtggatgagcgggtggacagcgacagcaagtctgaggtggaggccctgacagagcagctgtctgaggaggaggaggaggaggaggaggaggaggaggaggaggaggaggaggaggaggaggaggaggaggaggaggatgaggagagcggcaaccagagcgacaggagcggcagcagtggaagaaggaaggccaagaagaagtggaggaaggacagcccctgggtgaagcccagcaggaagaggaggaagcgggagcccccccgggccaaggagccccggggcgtgaatggagtgggcagcagcggccccagcgagtacatggaggtgcccctgggcagcctggagctgcccagcgagggcaccctgagccccaaccacgccggcgtgtccaatgacaccagcagcctggagacagagcggggctttgaggagctgcccctgtgcagctgcaggatggaggcccccaagattgaccgcatcagcgagcgggccggccacaagtgcatggccacagaatctgtggatggagagctgagcggctgcaatgctgccatcctgaagcgggagaccatgaggcccagcagccgggtggccctgatggtgctgtgtgagacccaccgggccaggatggtgaagcaccactgctgccccggctgcggctacttctgcacagctggcaccttcctggagtgccacccagacttccgggtggcccaccgcttccacaaggcctgtgtgtcccagctgaatggcatggtgttctgcccccactgtggggaggatgccagcgaggcccaggaggtgaccatccccagaggagatggagtgaccccacctgctggaacagctgccccagcccccccacccctgagccaggatgtgcccggccgggctgacaccagccagcccagcgccaggatgaggggccacggggagccccggcggcccccctgtgaccccctggccgacaccatcgacagcagcggccccagcctgaccctgcccaacggcggctgcctgtctgctgtgggcctgcccctgggccctggccgggaggccctggagaaggccctggtgatccaggagagcgagaggaggaagaagctgcgcttccacccccggcagctgtacctgtctgtgaagcagggcgagctgcagaaggtgatcctgatgctgctggacaacctggaccccaacttccagagcgaccagcagagcaagaggacccccctgcatgctgctgcccagaagggctctgtggagatctgccacgtgctgctgcaggccggggccaacatcaatgctgtggacaagcagcagaggacccccctgatggaggccgtggtgaacaaccacctggaggtggcccgctacatggtgcagagaggaggctgtgtgtacagcaaggaggaggatggcagcacctgcctgcaccacgccgccaagattggcaacctggagatggtgtccctgctgctgagcacaggccaggtggatgtgaatgcccaggacagcggcggctggacccccatcatctgggccgctgagcacaagcacatcgaggtgatccgcatgctgctgaccagaggagcagatgtgaccctgacagacaatgaggagaacatctgcctgcactgggccagcttcaccggcagcgctgccatcgccgaggtgctgctgaatgcccgctgtgacctgcatgctgtgaactaccacggggacacccccctgcacatcgccgcccgggagagctaccatgactgtgtgctgctcttcctgagcagaggagccaaccctgagctgaggaacaaggagggggacacagcctgggacctgaccccagagaggagtgatgtgtggtttgccctgcagctgaacaggaagctgcggctgggcgtgggcaacagagccatcagaacagagaagatcatctgcagagatgtggcccggggctatgaaaatgtgcccatcccctgtgtgaatggagtggatggagagccctgcccagaggactacaagtacatcagcgagaactgtgagaccagcaccatgaacatcgacaggaacatcacccacctgcagcactgcacctgtgtggatgactgcagcagcagcaactgcctgtgtggccagctgagcatccgctgctggtatgacaaggatggccgcctgctgcaggagttcaacaagattgagcccccactcatctttgagtgcaaccaggcctgcagctgctggaggaactgcaagaacagagtggtgcagagcggcatcaaggtgcggctgcagctgtacagaacagccaagatgggctggggcgtgcgggccctgcagaccatcccccagggcaccttcatctgtgaatatgtgggggagctgatcagtgatgctgaggctgatgtgagagaagatgacagctacctgtttgacctggacaacaaggatggagaggtgtactgcattgatgcccgctactacggcaacatcagccgcttcatcaaccacctgtgtgaccccaacatcatccctgtgcgggtcttcatgctgcaccaggacctgcgcttcccccgcatcgccttcttcagcagccgggacatcagaactggagaggagctgggctttgattatggagaccgcttctgggacatcaagagcaagtacttcacctgccagtgtggcagcgagaagtgcaagcacagcgctgaggccatcgccctggagcagagccggctggcccggctggacccccaccctgagctgctgcctgagctgggcagcctgccccctgtgaacacctag

SEQ ID NO: 151551 - DNA, 3531 bp, synthetic construct; identical to SEQ ID NO: 151549
  misc_feature 1..3531: note = Description of Artificial Sequence: Synthetic coding sequence
  source 1..3531: mol_type = other DNA

SEQ ID NO: 151552 - DNA, 3633 bp, synthetic construct; identical to SEQ ID NO: 151550
  misc_feature 1..3633: note = Description of Artificial Sequence: Synthetic coding sequence
  source 1..3633: mol_type = other DNA

SEQ ID NO: 151553 - DNA, 3804 bp, synthetic construct
  misc_feature 1..3804: note = Description of Artificial Sequence: Synthetic coding sequence
  source 1..3804: mol_type = other DNA
atgaggggcctgccccggggccggggcctgatgagggcccggggccggggccgggccgcccctcctggcagccggggccggggccggggcggcccccaccggggccggggccggcccaggagcctgctgagcctgccccgggcccaggcctcctggaccccccagctgagcacaggcctgaccagcccccctgtgccctgcctgcccagccagggcgaggccccagctgagatgggcgccctgctgctggagaaggagaccaggggggccacagagcgggtgcacggcagcctgggggacacccccaggtctgaggagaccctgcccaaggccaccccagacagcctggagcctgctggccccagcagccctgcctctgtgacagtgacagtgggagatgaaggagctgacacccctgtgggcgccacccccctgattggagatgaaagtgagaacctggagggagatggagacctgcggggcggccgcatcctgctgggccacgccaccaagagcttccccagcagccccagcaaaggaggcagctgccccagccgggccaagatgtccatgaccggggccggcaagagcccccccagcgtgcagagcctggccatgaggctgctgtccatgcctggggcccagggcgctgctgctgctggcagcgagcccccaccagccaccaccagccctgagggccagcccaaggtgcaccgggccaggaagaccatgagcaagccaggaaatggccagccccctgtgcctgagaagaggcctcctgagatccagcacttcaggatgtctgatgatgtgcacagcctgggcaaggtgaccagtgacctggccaagaggaggaagctgaacagcggcggcggcctgtctgaggagctgggcagcgccaggagaagtggagaggtgaccctgaccaagggggaccccggcagcctggaggagtgggagaccgtggtgggagatgacttcagcctgtactatgacagctacagcgtggatgagcgggtggacagcgacagcaagtctgaggtggaggccctgacagagcagctgtctgaggaggaggaggaggaggaggaggaggaggaggaggaggaggaggaggaggaggaggaggaggaggaggaggatgaggagagcggcaaccagagcgacagaagtggcagcagcggccgcaggaaggccaagaagaagtggaggaaggacagcccctgggtgaagcccagcaggaagaggaggaagcgggagcccccccgggccaaggagccccggggcgtgaatggagtgggcagcagcggccccagcgagtacatggaggtgcccctgggcagcctggagctgcccagcgagggcaccctgagccccaaccacgccggcgtgtccaatgacaccagcagcctggagacagagcggggctttgaggagctgcccctgtgcagctgcaggatggaggcccccaagattgaccgcatcagcgagagagctggccacaagtgcatggccacagagagcgtggatggagagctgagcggctgcaatgctgccatcctgaagcgggagaccatgaggcccagcagccgggtggccctgatggtgctgtgtgagacccaccgggccaggatggtgaagcaccactgctgccccggctgcggctacttctgcacagctggcaccttcctggagtgccacccagacttccgggtggcccaccgcttccacaaggcctgtgtgtcccagctgaatggcatggtgttctgcccccactgtggagaagatgccagcgaggcccaggaggtgaccatccccagaggagatggagtgaccccacctgctggaacagctgccccagcccccccacccctgagccaggatgtgcccggccgggctgacaccagccagcccagcgccaggatgaggggccatggagagcccaggaggcctccctgtgaccccctggccgacaccatcgacagcagcggccccagcctgaccctgcccaatggaggctgcctgtctgctgtgggcctgcccctgggccctggccgggaggccctggagaaggccctggtgatccaggagagcgagaggaggaagaagctgcgcttccacccccggcagctgtacctgtctgtgaagcagggcgagctgcagaaggtgatcctgatgctgctggacaacctggaccccaacttccagagcgaccagcagagcaagaggacccccctgcacgccgccgcccagaagggctctgtggagatctgccacgtgctgctgcaggccggggccaacatcaatgctgtggacaagcagcagaggacccccctgatggaggccgtggtgaacaaccacctggaggtggcccgctacatggtgcagaggggcggctgtgtgtacagcaaggaggaggatggcagcacctgcctgcaccacgccgccaagattggcaacctggagatggtgtccctgctgctgagcacaggccaggtggatgtgaatgcccaggacagcggcggctggacccccatcatctgggccgctgagcacaagcacattgaagtcatccgcatgctgctgaccagaggagcagatgtgaccctgacagacaatgaggagaacatctgcctgcactgggccagcttcaccggcagcgctgccatcgccgaggtgctgctgaatgcccgctgtgacctgcatgctgtgaactaccatggagacacccccctgcacatcgccgcccgggagagctaccatgactgtgtgctgctcttcctgagcagaggagccaaccctgagctgaggaacaaggagggggacacagcctgggacctgaccccagagaggagtgatgtgtggtttgccctgcagctgaacaggaagctgcggctgggcgtgggcaacagagccatcagaacagagaagatcatctgcagagatgtggcccggggctatgaaaatgtgcccatcccctgtgtgaatggagtggatggagagccctgcccagaggactacaagtacatcagcgagaactgtgagaccagcaccatgaacatcgacaggaacatcacccacctgcagcactgcacctgtgtggatgactgcagcagcagcaactgcctgtgtggccagctgagcatccgctgctggtatgacaaggatggccgcctgctgcaggagttcaacaagattgagcccccactcatctttgagtgcaaccaggcctgcagctgctggaggaactgcaagaacagagtggtgcagagcggcatcaaggtgcggctgcagctgtacagaacagccaagatgggctggggcgtgcgggccctgcagaccatcccccagggcaccttcatctgtgaatatgtgggggagctgatcagtgatgctgaggctgatgtgcgggaggatgacagctacctgtttgacctggacaacaaggatggagaggtgtactgcattgatgcccgctactacggcaacatcagccgcttcatcaaccacctgtgtgaccccaacatcatccctgtgcgggtcttcatgctgcaccaggacctgcgcttccccagaattgccttcttcagcagccgggacatcagaactggagaggagctgggctttgattatggagaccgcttctgggacatcaagagcaagtacttcacctgccagtgtggcagcgagaagtgcaagcacagcgctgaggccatcgccctggagcagagccggctggcccggctggacccccaccctgagctgctgcctgagctgggcagcctgccccctgtgaacacctag

SEQ ID NO: 151554 - DNA, 3804 bp, synthetic construct; identical to SEQ ID NO: 151553
  misc_feature 1..3804: note = Description of Artificial Sequence: Synthetic coding sequence
  source 1..3804: mol_type = other DNA

SEQ ID NO: 151555 - DNA, 3702 bp, synthetic construct; identical to SEQ ID NO: 151548
  misc_feature 1..3702: note = Description of Artificial Sequence: Synthetic coding sequence
  source 1..3702: mol_type = other DNA

SEQ ID NO: 151556 - DNA, 3804 bp, synthetic construct
  misc_feature 1..3804: note = Description of Artificial Sequence: Synthetic coding sequence
  source 1..3804: mol_type = other DNA
atgaggggcctgccccggggccggggcctgatgagggcccggggccggggccgggccgcccctcctggcagccggggccggggccggggcggcccccaccggggccggggccggcccaggagcctgctgagcctgccccgggcccaggcctcctggaccccccagctgagcacaggcctgaccagcccccctgtgccctgcctgcccagccagggcgaggccccagctgagatgggcgccctgctgctggagaaggagaccaggggggccacagagcgggtgcacggcagcctgggggacacccccaggtctgaggagaccctgcccaaggccaacccagacagcctggagcctgctggccccagcagccctgcctctgtgacagtgacagtgggagatgaaggagctgacacccctgtgggcgccacccccctgattggagatgaaagtgagaacctggagggagatggagacctgcggggcggccgcatcctgctgggccacgccaccaagagcttccccagcagccccagcaaaggaggcagctgccccagccgggccaagatgtccatgaccggggccggcaagagcccccccagcgtgcagagcctggccatgaggctgctgtccatgcctggggcccagggcgctgctgctgctggcagcgagcccccaccagccaccaccagccctgagggccagcccaaggtgcaccgggccaggaagaccatgagcaagccaggaaatggccagccccctgtgcctgagaagaggcctcctgagatccagcacttcaggatgtctgatgatgtgcacagcctgggcaaggtgaccagtgacctggccaagaggaggaagctgaacagcggcggcggcctgtctgaggagctgggcagcgccaggagaagtggagaggtgaccctgaccaagggggaccccggcagcctggaggagtgggagaccgtggtgggagatgacttcagcctgtactatgacagctacagcgtggatgagcgggtggacagcgacagcaagtctgaggtggaggccctgacagagcagctgtctgaggaggaggaggaggaggaggaggaggaggaggaggaggaggaggaggaggaggaggaggaggaggaggaggatgaggagagcggcaaccagagcgacagaagtggcagcagcggccgcaggaaggccaagaagaagtggaggaaggacagcccctgggtgaagcccagcaggaagaggaggaagcgggagcccccccgggccaaggagccccggggcgtgaatggagtgggcagcagcggccccagcgagtacatggaggtgcccctgggcagcctggagctgcccagcgagggcaccctgagccccaaccacgccggcgtgtccaatgacaccagcagcctggagacagagcggggctttgaggagctgcccctgtgcagctgcaggatggaggcccccaagattgaccgcatcagcgagagagctggccacaagtgcatggccacagagagcgtggatggagagctgagcggctgcaatgctgccatcctgaagcgggagaccatgaggcccagcagccgggtggccctgatggtgctgtgtgagacccaccgggccaggatggtgaagcaccactgctgccccggctgcggctacttctgcacagctggcaccttcctggagtgccacccagacttccgggtggcccaccgcttccacaaggcctgtgtgtcccagctgaatggcatggtgttctgcccccactgtggagaagatgccagcgaggcccaggaggtgaccatccccagaggagatggagtgaccccacctgctggaacagctgccccagcccccccacccctgagccaggatgtgcccggccgggctgacaccagccagcccagcgccaggatgaggggccatggagagcccaggaggcctccctgtgaccccctggccgacaccatcgacagcagcggccccagcctgaccctgcccaatggaggctgcctgtctgctgtgggcctgcccctgggccctggccgggaggccctggagaaggccctggtgatccaggagagcgagaggaggaagaagctgcgcttccacccccggcagctgtacctgtctgtgaagcagggcgagctgcagaaggtgatcctgatgctgctggacaacctggaccccaacttccagagcgaccagcagagcaagaggacccccctgcacgccgccgcccagaagggctctgtggagatctgccacgtgctgctgcaggccggggccaacatcaatgctgtggacaagcagcagaggacccccctgatggaggccgtggtgaacaaccacctggaggtggcccgctacatggtgcagaggggcggctgtgtgtacagcaaggaggaggatggcagcacctgcctgcaccacgccgccaagattggcaacctggagatggtgtccctgctgctgagcacaggccaggtggatgtgaatgcccaggacagcggcggctggacccccatcatctgggccgctgagcacaagcacattgaagtcatccgcatgctgctgaccagaggagcagatgtgaccctgacagacaatgaggagaacatctgcctgcactgggccagcttcaccggcagcgctgccatcgccgaggtgctgctgaatgcccgctgtgacctgcatgctgtgaactaccatggagacacccccctgcacatcgccgcccgggagagctaccatgactgtgtgctgctcttcctgagcagaggagccaaccctgagctgaggaacaaggagggggacacagcctgggacctgaccccagagaggagtgatgtgtggtttgccctgcagctgaacaggaagctgcggctgggcgtgggcaacagagccatcagaacagagaagatcatctgcagagatgtggcccggggctatgaaaatgtgcccatcccctgtgtgaatggagtggatggagagccctgcccagaggactacaagtacatcagcgagaactgtgagaccagcaccatgaacatcgacaggaacatcacccacctgcagcactgcacctgtgtggatgactgcagcagcagcaactgcctgtgtggccagctgagcatccgctgctggtatgacaaggatggccgcctgctgcaggagttcaacaagattgagcccccactcatctttgagtgcaaccaggcctgcagctgctggaggaactgcaagaacagagtggtgcagagcggcatcaaggtgcggctgcagctgtacagaacagccaagatgggctggggcgtgcgggccctgcagaccatcccccagggcaccttcatctgtgaatatgtgggggagctgatcagtgatgctgaggctgatgtgcgggaggatgacagctacctgtttgacctggacaacaaggatggagaggtgtactgcattgatgcccgctactacggcaacatcagccgcttcatcaaccacctgtgtgaccccaacatcatccctgtgcgggtcttcatgctgcaccaggacctgcgcttccccagaattgccttcttcagcagccgggacatcagaactggagaggagctgggctttgattatggagaccgcttctgggacatcaagagcaagtacttcacctgccagtgtggcagcgagaagtgcaagcacagcgctgaggccatcgccctggagcagagccggctggcccggctggacccccaccctgagctgctgcctgagctgggcagcctgccccctgtgaacacctag

SEQ ID NO: 151557 - DNA, 897 bp, synthetic construct
  misc_feature 1..897: note = Description of Artificial Sequence: Synthetic coding sequence
  source 1..897: mol_type = other DNA
tgaagcaagaggacccccctgcatgctgctgcccagaagggctctgtggagatctgccacgtgctgctgcaggccggggccaacatcaatgctgtggacaagcagcagaggacccccctgatggaggccgtggtgaacaaccacctggaggtggcccgctacatggtgcagagaggaggctgtgtgtacagcaaggaggaggatggcagcacctgcctgcaccacgccgccaagattggcaacctggagatggtgtccctgctgctgagcacaggccaggtggatgtgaatgcccagggccagctgcccccacccagcctgcccagccacccccaggacagcggcggctggacccccatcatctgggccgctgagcacaagcacattgaagtcatccgcatgctgctgaccagaggagcagatgtgaccctgacagacaatgaggagaacatctgcctgcactgggccagcttcaccggcagcgctgccatcgccgaggtgctgctgaatgcccgctgtgacctgcatgctgtgaactaccatggagacacccccctgcacatcgccgcccgggagagctaccatgactgtgtgctgctcttcctgagcagaggagccaaccctgagctgaggaacaaggagggggacacagcctgggacctgaccccagagaggagtgatgtgtggtttgccctgcagctgaacaggaagctgcggctgggcgtgggcaacagagccatcagaacagagaagatcatctgcagagatgtggcccggggctatgaaaatgtgcccatcccctgtgtgaatggagtggatggagagccctgcccagaggactacaagtacatcagcgagaactgtgagaccagcaccatgaacatcgacagaaattag

SEQ ID NO: 151558 - DNA, 3633 bp, synthetic construct
  misc_feature 1..3633: note = Description of Artificial Sequence: Synthetic coding sequence
  source 1..3633: mol_type = other DNA
atggctgctgctgctggagctgctgctgctgctgctgctgagggggaggccccagctgagatgggcgccctgctgctggagaaggagaccaggggggccacagagcgggtgcacggcagcctgggggacacccccaggtctgaggagaccctgcccaaggccaacccagacagcctggagcccgccggccccagcagccctgcctctgtgacagtgacagtgggagatgagggcgctgacacccctgtgggcgccacccccctgattggagatgaaagtgagaacctggagggagatggagacctgcggggcggccgcatcctgctgggccacgccaccaagagcttccccagcagccccagcaagggcggcagctgccccagccgggccaagatgtccatgactggagctgggaagagccccccatctgtgcagagcctggccatgaggctgctgtccatgcctggggcccagggcgctgctgctgctggcagcgagcccccaccagccaccaccagccctgagggccagcccaaggtgcaccgggccaggaagaccatgagcaagccaggaaatggccagccccctgtgcctgagaagaggcctcctgagatccagcacttcaggatgtctgatgatgtgcacagcctgggcaaggtgaccagtgacctggccaagaggaggaagctgaacagcggcggcggcctgtctgaggagctgggcagcgcccggcgcagcggggaggtgaccctgaccaagggggaccccggcagcctggaggagtgggagaccgtggtgggagatgacttcagcctgtactatgacagctacagcgtggatgagcgggtggacagcgacagcaagtctgaggtggaggccctgacagagcagctgtctgaggaggaggaggaggaggaggaggaggaggaggaggaggaggaggaggaggaggaggaggaggaggaggaggatgaggagagcggcaaccagagcgacaggagcggcagcagtggaagaaggaaggccaagaagaagtggaggaaggacagcccctgggtgaagcccagcaggaagaggaggaagcgggagcccccccgggccaaggagccccggggcgtgaatggagtgggcagcagcggccccagcgagtacatggaggtgcccctgggcagcctggagctgcccagcgagggcaccctgagccccaaccacgccggcgtgtccaatgacaccagcagcctggagacagagcggggctttgaggagctgcccctgtgcagctgcaggatggaggcccccaagattgaccgcatcagcgagcgggccggccacaagtgcatggccacagaatctgtggatggagagctgagcggctgcaatgctgccatcctgaagcgggagaccatgaggcccagcagccgggtggccctgatggtgctgtgtgagacccaccgggccaggatggtgaagcaccactgctgccccggctgcggctacttctgcacagctggcaccttcctggagtgccacccagacttccgggtggcccaccgcttccacaaggcctgtgtgtcccagctgaatggcatggtgttctgcccccactgtggggaggatgccagcgaggcccaggaggtgaccatccccagaggagatggagtgaccccacctgctggaacagctgccccagcccccccacccctgagccaggatgtgcccggccgggctgacaccagccagcccagcgccaggatgaggggccacggggagccccggcggcccccctgtgaccccctggccgacaccatcgacagcagcggccccagcctgaccctgcccaacggcggctgcctgtctgctgtgggcctgcccctgggccctggccgggaggccctggagaaggccctggtgatccaggagagcgagaggaggaagaagctgcgcttccacccccggcagctgtacctgtctgtgaagcagggcgagctgcagaaggtgatcctgatgctgctggacaacctggaccccaacttccagagcgaccagcagagcaagaggacccccctgcatgctgctgcccagaagggctctgtggagatctgccacgtgctgctgcaggccggggccaacatcaatgctgtggacaagcagcagaggacccccctgatggaggccgtggtgaacaaccacctggaggtggcccgctacatggtgcagagaggaggctgtgtgtacagcaaggaggaggatggcagcacctgcctgcaccacgccgccaagattggcaacctggagatggtgtccctgctgctgagcacaggccaggtggatgtgaatgcccaggacagcggcggctggacccccatcatctgggccgctgagcacaagcacatcgaggtgatccgcatgctgctgaccagaggagcagatgtgaccctgacagacaatgaggagaacatctgcctgcactgggccagcttcaccggcagcgctgccatcgccgaggtgctgctgaatgcccgctgtgacctgcatgctgtgaactaccacggggacacccccctgcacatcgccgcccgggagagctaccatgactgtgtgctgctcttcctgagcagaggagccaaccctgagctgaggaacaaggagggggacacagcctgggacctgaccccagagaggagtgatgtgtggtttgccctgcagctgaacaggaagctgcggctgggcgtgggcaacagagccatcagaacagagaagatcatctgcagagatgtggcccggggctatgaaaatgtgcccatcccctgtgtgaatggagtggatggagagccctgcccagaggactacaagtacatcagcgagaactgtgagaccagcaccatgaacatcgacaggaacatcacccacctgcagcactgcacctgtgtggatgactgcagcagcagcaactgcctgtgtggccagctgagcatccgctgctggtatgacaaggatggccgcctgctgcaggagttcaacaagattgagcccccactcatctttgagtgcaaccaggcctgcagctgctggaggaactgcaagaacagagtggtgcagagcggcatcaaggtgcggctgcagctgtacagaacagccaagatgggctggggcgtgcgggccctgcagaccatcccccagggcaccttcatctgtgaatatgtgggggagctgatcagtgatgctgaggctgatgtgagagaagatgacagctacctgtttgacctggacaacaaggatggagaggtgtactgcattgatgcccgctactacggcaacatcagccgcttcatcaaccacctgtgtgaccccaacatcatccctgtgcgggtcttcatgctgcaccaggacctgcgcttcccccgcatcgccttcttcagcagccgggacatcagaactggagaggagctgggctttgattatggagaccgcttctgggacatcaagagcaagtacttcacctgccagtgtggcagcgagaagtgcaagcacagcgctgaggccatcgccctggagcagagccggctggcccggctggacccccaccctgagctgctgcctgagctgggcagcctgccccctgtgaacacctag

SEQ ID NO: 151559 - DNA, 897 bp, synthetic construct; identical to SEQ ID NO: 151557
  misc_feature 1..897: note = Description of Artificial Sequence: Synthetic coding sequence
  source 1..897: mol_type = other DNA

SEQ ID NO: 151560 - DNA, 3531 bp, synthetic construct; identical to SEQ ID NO: 151549
  misc_feature 1..3531: note = Description of Artificial Sequence: Synthetic coding sequence
  source 1..3531: mol_type = other DNA

SEQ ID NO: 151561 - DNA, 3804 bp, synthetic construct; identical to SEQ ID NO: 151553
  misc_feature 1..3804: note = Description of Artificial Sequence: Synthetic coding sequence
  source 1..3804: mol_type = other DNA

SEQ ID NO: 151562 - DNA, 3633 bp, synthetic construct; identical to SEQ ID NO: 151558
  misc_feature 1..3633: note = Description of Artificial Sequence: Synthetic coding sequence
  source 1..3633: mol_type = other DNA

SEQ ID NO: 151563 - DNA, 897 bp, synthetic construct; identical to SEQ ID NO: 151557
  misc_feature 1..897: note = Description of Artificial Sequence: Synthetic coding sequence
  source 1..897: mol_type = other DNA

SEQ ID NO: 151564 - DNA, 2769 bp, synthetic construct
  misc_feature 1..2769: note = Description of Artificial Sequence: Synthetic coding sequence
  source 1..2769: mol_type = other DNA
tctgaggtggaggccctgacagagcagctgtctgaggaggaggaggaggaggaggaggaggaggaggaggaggaggaggaggaggaggaggaggaggaggaggaggatgaggagagcggcaaccagagcgacaggagcggcagcagtggaagaaggaaggccaagaagaagtggaggaaggacagcccctgggtgaagcccagcaggaagaggaggaagcgggagcccccccgggccaaggagccccggggcgtgaatggagtgggcagcagcggccccagcgagtacatggaggtgcccctgggcagcctggagctgcccagcgagggcaccctgagccccaaccacgccggcgtgtccaatgacaccagcagcctggagacagagcggggctttgaggagctgcccctgtgcagctgcaggatggaggcccccaagattgaccgcatcagcgagcgggccggccacaagtgcatggccacagaatctgtggatggagagctgagcggctgcaatgctgccatcctgaagcgggagaccatgaggcccagcagccgggtggccctgatggtgctgtgtgagacccaccgggccaggatggtgaagcaccactgctgccccggctgcggctacttctgcacagctggcaccttcctggagtgccacccagacttccgggtggcccaccgcttccacaaggcctgtgtgtcccagctgaatggcatggtgttctgcccccactgtggggaggatgccagcgaggcccaggaggtgaccatccccagaggagatggagtgaccccacctgctggaacagctgccccagcccccccacccctgagccaggatgtgcccggccgggctgacaccagccagcccagcgccaggatgaggggccacggggagccccggcggcccccctgtgaccccctggccgacaccatcgacagcagcggccccagcctgaccctgcccaacggcggctgcctgtctgctgtgggcctgcccctgggccctggccgggaggccctggagaaggccctggtgatccaggagagcgagaggaggaagaagctgcgcttccacccccggcagctgtacctgtctgtgaagcagggcgagctgcagaaggtgatcctgatgctgctggacaacctggaccccaacttccagagcgaccagcagagcaagaggacccccctgcatgctgctgcccagaagggctctgtggagatctgccacgtgctgctgcaggccggggccaacatcaatgctgtggacaagcagcagaggacccccctgatggaggccgtggtgaacaaccacctggaggtggcccgctacatggtgcagagaggaggctgtgtgtacagcaaggaggaggatggcagcacctgcctgcaccacgccgccaagattggcaacctggagatggtgtccctgctgctgagcacaggccaggtggatgtgaatgcccaggacagcggcggctggacccccatcatctgggccgctgagcacaagcacatcgaggtgatccgcatgctgctgaccagaggagcagatgtgaccctgacagacaatgaggagaacatctgcctgcactgggccagcttcaccggcagcgctgccatcgccgaggtgctgctgaatgcccgctgtgacctgcatgctgtgaactaccacggggacacccccctgcacatcgccgcccgggagagctaccatgactgtgtgctgctcttcctgagcagaggagccaaccctgagctgaggaacaaggagggggacacagcctgggacctgaccccagagaggagtgatgtgtggtttgccctgcagctgaacaggaagctgcggctgggcgtgggcaacagagccatcagaacagagaagatcatctgcagagatgtggcccggggctatgaaaatgtgcccatcccctgtgtgaatggagtggatggagagccctgcccagaggactacaagtacatcagcgagaactgtgagaccagcaccatgaacatcgacaggaacatcacccacctgcagcactgcacctgtgtggatgactgcagcagcagcaactgcctgtgtggccagctgagcatccgctgctggtatgacaaggatggccgcctgctgcaggagttcaacaagattgagcccccactcatctttgagtgcaaccaggcctgcagctgctggaggaactgcaagaacagagtggtgcagagcggcatcaaggtgcggctgcagctgtacagaacagccaagatgggctggggcgtgcgggccctgcagaccatcccccagggcaccttcatctgtgaatatgtgggggagctgatcagtgatgctgaggctgatgtgagagaagatgacagctacctgtttgacctggacaacaaggatggagaggtgtactgcattgatgcccgctactacggcaacatcagccgcttcatcaaccacctgtgtgaccccaacatcatccctgtgcgggtcttcatgctgcaccaggacctgcgcttcccccgcatcgccttcttcagcagccgggacatcagaactggagaggagctgggctttgattatggagaccgcttctgggacatcaagagcaagtacttcacctgccagtgtggcagcgagaagtgcaagcacagcgctgaggccatcgccctggagcagagccggctggcccggctggacccccaccctgagctgctgcctgagctgggcagcctgccccctgtgaacacctag

SEQ ID NO: 151565 - DNA, 3702 bp, synthetic construct
  misc_feature 1..3702: note = Description of Artificial Sequence: Synthetic coding sequence
  source 1..3702: mol_type = other DNA
atgaggggcctgccccggggccggggcctgatgagggcccggggccggggccgggccgcccctcctggcagccggggccggggccggggcggcccccaccggggccggggccggcccaggagcctgctgagcctgccccgggcccaggcctcctggaccccccagctgagcacaggcctgaccagcccccctgtgccctgcctgcccagccagggcgaggccccagctgagatgggcgccctgctgctggagaaggagaccaggggggccacagagcgggtgcacggcagcctgggggacacccccaggtctgaggagaccctgcccaaggccaacccagacagcctggagcctgctggccccagcagccctgcctctgtgacagtgacagtgggagatgaaggagctgacacccctgtgggcgccacccccctgattggagatgaaagtgagaacctggagggagatggagacctgcggggcggccgcatcctgctgggccacgccaccaagagcttccccagcagccccagcaaaggaggcagctgccccagccgggccaagatgtccatgaccggggccggcaagagcccccccagcgtgcagagcctggccatgaggctgctgtccatgcctggggcccagggcgctgctgctgctggcagcgagcccccaccagccaccaccagccctgagggccagcccaaggtgcaccgggccaggaagaccatgagcaagccaggaaatggccagccccctgtgcctgagaagaggcctcctgagatccagcacttcaggatgtctgatgatgtgcacagcctgggcaaggtgaccagtgacctggccaagaggaggaagctgaacagcggcggcggcctgtctgaggagctgggcagcgccaggagaagtggagaggtgaccctgaccaagggggaccccggcagcctggaggagtgggagaccgtggtgggagatgacttcagcctgtactatgacagctacagcgtggatgagcgggtggacagcgacagcaagtctgaggtggaggccctgacagagcagctgtctgaggaggaggaggaggaggaggaggaggaggaggaggaggaggaggaggaggaggaggaggaggaggaggaggatgaggagagcggcaaccagagcgacagaagtggcagcagcggccgcaggaaggccaagaagaagtggaggaaggacagcccctgggtgaagcccagcaggaagaggaggaagcgggagcccccccgggccaaggagccccggggcgtgtccaatgacaccagcagcctggagacagagcggggctttgaggagctgcccctgtgcagctgcaggatggaggcccccaagattgaccgcatcagcgagagagctggccacaagtgcatggccacagagagcgtggatggagagctgagcggctgcaatgctgccatcctgaagcgggagaccatgaggcccagcagccgggtggccctgatggtgctgtgtgagacccaccgggccaggatggtgaagcaccactgctgccccggctgcggctacttctgcacagctggcaccttcctggagtgccacccagacttccgggtggcccaccgcttccacaaggcctgtgtgtcccagctgaatggcatggtgttctgcccccactgtggagaagatgccagcgaggcccaggaggtgaccatccccagaggagatggagtgaccccacctgctggaacagctgccccagcccccccacccctgagccaggatgtgcccggccgggctgacaccagccagcccagcgccaggatgaggggccatggagagcccaggaggcctccctgtgaccccctggccgacaccatcgacagcagcggccccagcctgaccctgcccaatggaggctgcctgtctgctgtgggcctgcccctgggccctggccgggaggccctggagaaggccctggtgatccaggagagcgagaggaggaagaagctgcgcttccacccccggcagctgtacctgtctgtgaagcagggcgagctgcagaaggtgatcctgatgctgctggacaacctggaccccaacttccagagcgaccagcagagcaagaggacccccctgcacgccgccgcccagaagggctctgtggagatctgccacgtgctgctgcaggccggggccaacatcaatgctgtggacaagcagcagaggacccccctgatggaggccgtggtgaacaaccacctggaggtggcccgctacatggtgcagaggggcggctgtgtgtacagcaaggaggaggatggcagcacctgcctgcaccacgccgccaagattggcaacctggagatggtgtccctgctgctgagcacaggccaggtggatgtgaatgcccaggacagcggcggctggacccccatcatctgggccgctgagcacaagcacattgaagtcatccgcatgctgctgaccagaggagcagatgtgaccctgacagacaatgaggagaacatctgcctgcactgggccagcttcaccggcagcgctgccatcgccgaggtgctgctgaatgcccgctgtgacctgcatgctgtgaactaccatggagacacccccctgcacatcgccgcccgggagagctaccatgactgtgtgctgctcttcctgagcagaggagccaaccctgagctgaggaacaaggagggggacacagcctgggacctgaccccagagaggagtgatgtgtggtttgccctgcagctgaacaggaagctgcggctgggcgtgggcaacagagccatcagaacagagaagatcatctgcagagatgtggcccggggctatgaaaatgtgcccatcccctgtgtgaatggagtggatggagagccctgcccagaggactacaagtacatcagcgagaactgtgagaccagcaccatgaacatcgacaggaacatcacccacctgcagcactgcacctgtgtggatgactgcagcagcagcaactgcctgtgtggccagctgagcatccgctgctggtatgacaaggatggccgcctgctgcaggagttcaacaagattgagcccccactcatctttgagtgcaaccaggcctgcagctgctggaggaactgcaagaacagagtggtgcagagcggcatcaaggtgcggctgcagctgtacagaacagccaagatgggctggggcgtgcgggccctgcagaccatcccccagggcaccttcatctgtgaatatgtgggggagctgatcagtgatgctgaggctgatgtgcgggaggatgacagctacctgtttgacctggacaacaaggatggagaggtgtactgcattgatgcccgctactacggcaacatcagccgcttcatcaaccacctgtgtgaccccaacatcatccctgtgcgggtcttcatgctgcaccaggacctgcgcttccccagaattgccttcttcagcagccgggacatcagaactggagaggagctgggctttgattatggagaccgcttctgggacatcaagagcaagtacttcacctgccagtgtggcagcgagaagtgcaagcacagcgctgaggccatcgccctggagcagagccggctggcccggctggacccccaccctgagctgctgcctgagctgggcagcctgccccctgtgaacacctag

SEQ ID NO: 151566 - DNA, 3702 bp, synthetic construct; identical to SEQ ID NO: 151548
  misc_feature 1..3702: note = Description of Artificial Sequence: Synthetic coding sequence
  source 1..3702: mol_type = other DNA

SEQ ID NO: 151567 - DNA, 3633 bp, synthetic construct; identical to SEQ ID NO: 151550
  misc_feature 1..3633: note = Description of Artificial Sequence: Synthetic coding sequence
  source 1..3633: mol_type = other DNA

SEQ ID NO: 151568 - DNA, 897 bp, synthetic construct; identical to SEQ ID NO: 151557
  misc_feature 1..897: note = Description of Artificial Sequence: Synthetic coding sequence
  source 1..897: mol_type = other DNA

SEQ ID NO: 151569 - DNA, 3804 bp, synthetic construct; identical to SEQ ID NO: 151553
  misc_feature 1..3804: note = Description of Artificial Sequence: Synthetic coding sequence
  source 1..3804: mol_type = other DNA

SEQ ID NO: 151570 - DNA, 2667 bp, synthetic construct
  misc_feature 1..2667: note = Description of Artificial Sequence: Synthetic coding sequence
  source 1..2667: mol_type = other DNA
tctgaggtggaggccctgacagagcagctgtctgaggaggaggaggaggaggaggaggaggaggaggaggaggaggaggaggaggaggaggaggaggaggaggaggatgaggagagcggcaaccagagcgacaggagcggcagcagtggaagaaggaaggccaagaagaagtggaggaaggacagcccctgggtgaagcccagcaggaagaggaggaagcgggagcccccccgggccaaggagccccggggcgtgtccaatgacaccagcagcctggagacagagcggggctttgaggagctgcccctgtgcagctgcaggatggaggcccccaagattgaccgcatcagcgagcgggccggccacaagtgcatggccacagaatctgtggatggagagctgagcggctgcaatgctgccatcctgaagcgggagaccatgaggcccagcagccgggtggccctgatggtgctgtgtgagacccaccgggccaggatggtgaagcaccactgctgccccggctgcggctacttctgcacagctggcaccttcctggagtgccacccagacttccgggtggcccaccgcttccacaaggcctgtgtgtcccagctgaatggcatggtgttctgcccccactgtggggaggatgccagcgaggcccaggaggtgaccatccccagaggagatggagtgaccccacctgctggaacagctgccccagcccccccacccctgagccaggatgtgcccggccgggctgacaccagccagcccagcgccaggatgaggggccacggggagccccggcggcccccctgtgaccccctggccgacaccatcgacagcagcggccccagcctgaccctgcccaacggcggctgcctgtctgctgtgggcctgcccctgggccctggccgggaggccctggagaaggccctggtgatccaggagagcgagaggaggaagaagctgcgcttccacccccggcagctgtacctgtctgtgaagcagggcgagctgcagaaggtgatcctgatgctgctggacaacctggaccccaacttccagagcgaccagcagagcaagaggacccccctgcatgctgctgcccagaagggctctgtggagatctgccacgtgctgctgcaggccggggccaacatcaatgctgtggacaagcagcagaggacccccctgatggaggccgtggtgaacaaccacctggaggtggcccgctacatggtgcagagaggaggctgtgtgtacagcaaggaggaggatggcagcacctgcctgcaccacgccgccaagattggcaacctggagatggtgtccctgctgctgagcacaggccaggtggatgtgaatgcccaggacagcggcggctggacccccatcatctgggccgctgagcacaagcacatcgaggtgatccgcatgctgctgaccagaggagcagatgtgaccctgacagacaatgaggagaacatctgcctgcactgggccagcttcaccggcagcgctgccatcgccgaggtgctgctgaatgcccgctgtgacctgcatgctgtgaactaccacggggacacccccctgcacatcgccgcccgggagagctaccatgactgtgtgctgctcttcctgagcagaggagccaaccctgagctgaggaacaaggagggggacacagcctgggacctgaccccagagaggagtgatgtgtggtttgccctgcagctgaacaggaagctgcggctgggcgtgggcaacagagccatcagaacagagaagatcatctgcagagatgtggcccggggctatgaaaatgtgcccatcccctgtgtgaatggagtggatggagagccctgcccagaggactacaagtacatcagcgagaactgtgagaccagcaccatgaacatcgacaggaacatcacccacctgcagcactgcacctgtgtggatgactgcagcagcagcaactgcctgtgtggccagctgagcatccgctgctggtatgacaaggatggccgcctgctgcaggagttcaacaagattgagcccccactcatctttgagtgcaaccaggcctgcagctgctggaggaactgcaagaacagagtggtgcagagcggcatcaaggtgcggctgcagctgtacagaacagccaagatgggctggggcgtgcgggccctgcagaccatcccccagggcaccttcatctgtgaatatgtgggggagctgatcagtgatgctgaggctgatgtgagagaagatgacagctacctgtttgacctggacaacaaggatggagaggtgtactgcattgatgcccgctactacggcaacatcagccgcttcatcaaccacctgtgtgaccccaacatcatccctgtgcgggtcttcatgctgcaccaggacctgcgcttcccccgcatcgccttcttcagcagccgggacatcagaactggagaggagctgggctttgattatggagaccgcttctgggacatcaagagcaagtacttcacctgccagtgtggcagcgagaagtgcaagcacagcgctgaggccatcgccctggagcagagccggctggcccggctggacccccaccctgagctgctgcctgagctgggcagcctgccccctgtgaacacctag

SEQ ID NO: 151571 - DNA, 3531 bp, synthetic construct
  misc_feature 1..3531: note = Description of Artificial Sequence: Synthetic coding sequence
  source 1..3531: mol_type = other DNA
atggctgctgctgctggagctgctgctgctgctgctgctgagggggaggccccagctgagatgggcgccctgctgctggagaaggagaccaggggggccacagagcgggtgcacggcagcctgggggacacccccaggtctgaggagaccctgcccaaggccaacccagacagcctggagcccgccggccccagcagccctgcctctgtgacagtgacagtgggagatgagggcgctgacacccctgtgggcgccacccccctgattggagatgaaagtgagaacctggagggagatggagacctgcggggcggccgcatcctgctgggccacgccaccaagagcttccccagcagccccagcaagggcggcagctgccccagccgggccaagatgtccatgactggagctgggaagagccccccatctgtgcagagcctggccatgaggctgctgtccatgcctggggcccagggcgctgctgctgctggcagcgagcccccaccagccaccaccagccctgagggccagcccaaggtgcaccgggccaggaagaccatgagcaagccaggaaatggccagccccctgtgcctgagaagaggcctcctgagatccagcacttcaggatgtctgatgatgtgcacagcctgggcaaggtgaccagtgacctggccaagaggaggaagctgaacagcggcggcggcctgtctgaggagctgggcagcgcccggcgcagcggggaggtgaccctgaccaagggggaccccggcagcctggaggagtgggagaccgtggtgggagatgacttcagcctgtactatgacagctacagcgtggatgagcgggtggacagcgacagcaagtctgaggtggaggccctgacagagcagctgtctgaggaggaggaggaggaggaggaggaggaggaggaggaggaggaggaggaggaggaggaggaggaggaggaggatgaggagagcggcaaccagagcgacaggagcggcagcagtggaagaaggaaggccaagaagaagtggaggaaggacagcccctgggtgaagcccagcaggaagaggaggaagcgggagcccccccgggccaaggagccccggggcgtgtccaatgacaccagcagcctggagacagagcggggctttgaggagctgcccctgtgcagctgcaggatggaggcccccaagattgaccgcatcagcgagcgggccggccacaagtgcatggccacagaatctgtggatggagagctgagcggctgcaatgctgccatcctgaagcgggagaccatgaggcccagcagccgggtggccctgatggtgctgtgtgagacccaccgggccaggatggtgaagcaccactgctgccccggctgcggctacttctgcacagctggcaccttcctggagtgccacccagacttccgggtggcccaccgcttccacaaggcctgtgtgtcccagctgaatggcatggtgttctgcccccactgtggggaggatgccagcgaggcccaggaggtgaccatccccagaggagatggagtgaccccacctgctggaacagctgccccagcccccccacccctgagccaggatgtgcccggccgggctgacaccagccagcccagcgccaggatgaggggccacggggagccccggcggcccccctgtgaccccctggccgacaccatcgacagcagcggccccagcctgaccctgcccaacggcggctgcctgtctgctgtgggcctgcccctgggccctggccgggaggccctggagaaggccctggtgatccaggagagcgagaggaggaagaagctgcgcttccacccccggcagctgtacctgtctgtgaagcagggcgagctgcagaaggtgatcctgatgctgctggacaacctggaccccaacttccagagcgaccagcagagcaagaggacccccctgcatgctgctgcccagaagggctctgtggagatctgccacgtgctgctgcaggccggggccaacatcaatgctgtggacaagcagcagaggacccccctgatggaggccgtggtgaacaaccacctggaggtggcccgctacatggtgcagagaggaggctgtgtgtacagcaaggaggaggatggcagcacctgcctgcaccacgccgccaagattggcaacctggagatggtgtccctgctgctgagcacaggccaggtggatgtgaatgcccaggacagcggcggctggacccccatcatctgggccgctgagcacaagcacatcgaggtgatccgcatgctgctgaccagaggagcagatgtgaccctgacagacaatgaggagaacatctgcctgcactgggccagcttcaccggcagcgctgccatcgccgaggtgctgctgaatgcccgctgtgacctgcatgctgtgaactaccacggggacacccccctgcacatcgccgcccgggagagctaccatgactgtgtgctgctcttcctgagcagaggagccaaccctgagctgaggaacaaggagggggacacagcctgggacctgaccccagagaggagtgatgtgtggtttgccctgcagctgaacaggaagctgcggctgggcgtgggcaacagagccatcagaacagagaagatcatctgcagagatgtggcccggggctatgaaaatgtgcccatcccctgtgtgaatggagtggatggagagccctgcccagaggactacaagtacatcagcgagaactgtgagaccagcaccatgaacatcgacaggaacatcacccacctgcagcactgcacctgtgtggatgactgcagcagcagcaactgcctgtgtggccagctgagcatccgctgctggtatgacaaggatggccgcctgctgcaggagttcaacaagattgagcccccactcatctttgagtgcaaccaggcctgcagctgctggaggaactgcaagaacagagtggtgcagagcggcatcaaggtgcggctgcagctgtacagaacagccaagatgggctggggcgtgcgggccctgcagaccatcccccagggcaccttcatctgtgaatatgtgggggagctgatcagtgatgctgaggctgatgtgagagaagatgacagctacctgtttgacctggacaacaaggatggagaggtgtactgcattgatgcccgctactacggcaacatcagccgcttcatcaaccacctgtgtgaccccaacatcatccctgtgcgggtcttcatgctgcaccaggacctgcgcttcccccgcatcgccttcttcagcagccgggacatcagaactggagaggagctgggctttgattatggagaccgcttctgggacatcaagagcaagtacttcacctgccagtgtggcagcgagaagtgcaagcacagcgctgaggccatcgccctggagcagagccggctggcccggctggacccccaccctgagctgctgcctgagctgggcagcctgccccctgtgaacacctag

SEQ ID NO: 151572 - DNA, 3096 bp, synthetic construct
  misc_feature 1..3096: note = Description of Artificial Sequence: Synthetic coding sequence
  source 1..3096: mol_type = other DNA
agctgccactgcacccccagctggccccctgtgcctgagaagaggcctcctgagatccagcacttcaggatgtctgatgatgtgcacagcctgggcaaggtgaccagtgacctggccaagaggaggaagctgaacagcggcggcggcctgtctgaggagctgggcagcgcccggcgcagcggggaggtgaccctgaccaagggggaccccggcagcctggaggagtgggagaccgtggtgggagatgacttcagcctgtactatgacagctacagcgtggatgagcgggtggacagcgacagcaagtctgaggtggaggccctgacagagcagctgtctgaggaggaggaggaggaggaggaggaggaggaggaggaggaggaggaggaggaggaggaggaggaggaggaggatgaggagagcggcaaccagagcgacaggagcggcagcagtggaagaaggaaggccaagaagaagtggaggaaggacagcccctgggtgaagcccagcaggaagaggaggaagcgggagcccccccgggccaaggagccccggggcgtgaatggagtgggcagcagcggccccagcgagtacatggaggtgcccctgggcagcctggagctgcccagcgagggcaccctgagccccaaccacgccggcgtgtccaatgacaccagcagcctggagacagagcggggctttgaggagctgcccctgtgcagctgcaggatggaggcccccaagattgaccgcatcagcgagcgggccggccacaagtgcatggccacagaatctgtggatggagagctgagcggctgcaatgctgccatcctgaagcgggagaccatgaggcccagcagccgggtggccctgatggtgctgtgtgagacccaccgggccaggatggtgaagcaccactgctgccccggctgcggctacttctgcacagctggcaccttcctggagtgccacccagacttccgggtggcccaccgcttccacaaggcctgtgtgtcccagctgaatggcatggtgttctgcccccactgtggggaggatgccagcgaggcccaggaggtgaccatccccagaggagatggagtgaccccacctgctggaacagctgccccagcccccccacccctgagccaggatgtgcccggccgggctgacaccagccagcccagcgccaggatgaggggccacggggagccccggcggcccccctgtgaccccctggccgacaccatcgacagcagcggccccagcctgaccctgcccaacggcggctgcctgtctgctgtgggcctgcccctgggccctggccgggaggccctggagaaggccctggtgatccaggagagcgagaggaggaagaagctgcgcttccacccccggcagctgtacctgtctgtgaagcagggcgagctgcagaaggtgatcctgatgctgctggacaacctggaccccaacttccagagcgaccagcagagcaagaggacccccctgcatgctgctgcccagaagggctctgtggagatctgccacgtgctgctgcaggccggggccaacatcaatgctgtggacaagcagcagaggacccccctgatggaggccgtggtgaacaaccacctggaggtggcccgctacatggtgcagagaggaggctgtgtgtacagcaaggaggaggatggcagcacctgcctgcaccacgccgccaagattggcaacctggagatggtgtccctgctgctgagcacaggccaggtggatgtgaatgcccaggacagcggcggctggacccccatcatctgggccgctgagcacaagcacatcgaggtgatccgcatgctgctgaccagaggagcagatgtgaccctgacagacaacgtgtctgagcggctggtggaggaggagaacatctgcctgcactgggccagcttcaccggcagcgctgccatcgccgaggtgctgctgaatgcccgctgtgacctgcatgctgtgaactaccatggagacacccccctgcacatcgccgcccgggagagctaccatgactgtgtgctgctcttcctgagcagaggagccaaccctgagctgaggaacaaggagggggacacagcctgggacctgaccccagagaggagtgatgtgtggtttgccctgcagctgaacaggaagctgcggctgggcgtgggcaacagagccatcagaacagagaagatcatctgcagagatgtggcccggggctatgaaaatgtgcccatcccctgtgtgaatggagtggatggagagccctgcccagaggactacaagtacatcagcgagaactgtgagaccagcaccatgaacatcgacaggaacatcacccacctgcagcactgcacctgtgtggatgactgcagcagcagcaactgcctgtgtggccagctgagcatccgctgctggtatgacaaggatggccgcctgctgcaggagttcaacaagattgagcccccactcatctttgagtgcaaccaggcctgcagctgctggaggaactgcaagaacagagtggtgcagagcggcatcaaggtgcggctgcagctgtacagaacagccaagatgggctggggcgtgcgggccctgcagaccatcccccagggcaccttcatctgtgaatatgtgggggagctgatcagtgatgctgaggctgatgtgcgggaggatgacagctacctgtttgacctggacaacaaggatggagaggtgtactgcattgatgcccgctactacggcaacatcagccgcttcatcaaccacctgtgtgaccccaacatcatccctgtgcgggtcttcatgctgcaccaggacctgcgcttccccagaattgccttcttcagcagccgggacatcagaactggagaggagctgggctttgattatggagaccgcttctgggacatcaagagcaagtacttcacctgccagtgtggcagcgagaagtgcaagcacagcgctgaggccatcgccctggagcagagccggctggcccggctggacccccaccctgagctgctgcctgagctgggcagcctgccccctgtgaacacctag

SEQ ID NO: 151573 - DNA, 3702 bp, synthetic construct; identical to SEQ ID NO: 151548
  misc_feature 1..3702: note = Description of Artificial Sequence: Synthetic coding sequence
  source 1..3702: mol_type = other DNA

SEQ ID NO: 151574 - DNA, 3804 bp, synthetic construct; identical to SEQ ID NO: 151556
  misc_feature 1..3804: note = Description of Artificial Sequence: Synthetic coding sequence
  source 1..3804: mol_type = other DNA

SEQ ID NO: 151575 - DNA, 897 bp, synthetic construct; identical to SEQ ID NO: 151557
  misc_feature 1..897: note = Description of Artificial Sequence: Synthetic coding sequence
  source 1..897: mol_type = other DNA

SEQ ID NO: 151576 - DNA, 897 bp, synthetic construct; identical to SEQ ID NO: 151557
  misc_feature 1..897: note = Description of Artificial Sequence: Synthetic coding sequence
  source 1..897: mol_type = other DNA

SEQ ID NO: 151577 - DNA, 3633 bp, synthetic construct; identical to SEQ ID NO: 151550
  misc_feature 1..3633: note = Description of Artificial Sequence: Synthetic coding sequence
  source 1..3633: mol_type = other DNA

SEQ ID NO: 151578 - DNA, 3531 bp, synthetic construct; identical to SEQ ID NO: 151549
  misc_feature 1..3531: note = Description of Artificial Sequence: Synthetic coding sequence
  source 1..3531: mol_type = other DNA

SEQ ID NO: 151579 - DNA, 3702 bp, synthetic construct; identical to SEQ ID NO: 151565
  misc_feature 1..3702: note = Description of Artificial Sequence: Synthetic coding sequence
  source 1..3702: mol_type = other DNA

SEQ ID NO: 151580 - DNA, 897 bp, synthetic construct; identical to SEQ ID NO: 151557
  misc_feature 1..897: note = Description of Artificial Sequence: Synthetic coding sequence
  source 1..897: mol_type = other DNA

SEQ ID NO: 151581 - DNA, 3531 bp, synthetic construct; identical to SEQ ID NO: 151571
  misc_feature 1..3531: note = Description of Artificial Sequence: Synthetic coding sequence
  source 1..3531: mol_type = other DNA

SEQ ID NO: 151582 - DNA, 2667 bp, synthetic construct; identical to SEQ ID NO: 151570
  misc_feature 1..2667: note = Description of Artificial Sequence: Synthetic coding sequence
  source 1..2667: mol_type = other DNA

SEQ ID NO: 151583 - DNA, 2769 bp, synthetic construct; identical to SEQ ID NO: 151564
  misc_feature 1..2769: note = Description of Artificial Sequence: Synthetic coding sequence
  source 1..2769: mol_type = other DNA

SEQ ID NO: 151584 - DNA, 3096 bp, synthetic construct
  misc_feature 1..3096: note = Description of Artificial Sequence: Synthetic coding sequence
  source 1..3096: mol_type = other DNA
agctgccactgcacccccagcaggcctcctgtgcctgagaagaggcctcctgagatccagcacttcaggatgtctgatgatgtgcacagcctgggcaaggtgaccagtgacctggccaagaggaggaagctgaacagcggcggcggcctgtctgaggagctgggcagcgcccggcgcagcggggaggtgaccctgaccaagggggaccccggcagcctggaggagtgggagaccgtggtgggagatgacttcagcctgtactatgacagctacagcgtggatgagcgggtggacagcgacagcaagtctgaggtggaggccctgacagagcagctgtctgaggaggaggaggaggaggaggaggaggaggaggaggaggaggaggaggaggaggaggaggaggaggaggaggatgaggagagcggcaaccagagcgacaggagcggcagcagtggaagaaggaaggccaagaagaagtggaggaaggacagcccctgggtgaagcccagcaggaagaggaggaagcgggagcccccccgggccaaggagccccggggcgtgaatggagtgggcagcagcggccccagcgagtacatggaggtgcccctgggcagcctggagctgcccagcgagggcaccctgagccccaaccacgccggcgtgtccaatgacaccagcagcctggagacagagcggggctttgaggagctgcccctgtgcagctgcaggatggaggcccccaagattgaccgcatcagcgagcgggccggccacaagtgcatggccacagaatctgtggatggagagctgagcggctgcaatgctgccatcctgaagcgggagaccatgaggcccagcagccgggtggccctgatggtgctgtgtgagacccaccgggccaggatggtgaagcaccactgctgccccggctgcggctacttctgcacagctggcaccttcctggagtgccacccagacttccgggtggcccaccgcttccacaaggcctgtgtgtcccagctgaatggcatggtgttctgcccccactgtggggaggatgccagcgaggcccaggaggtgaccatccccagaggagatggagtgaccccacctgctggaacagctgccccagcccccccacccctgagccaggatgtgcccggccgggctgacaccagccagcccagcgccaggatgaggggccacggggagccccggcggcccccctgtgaccccctggccgacaccatcgacagcagcggccccagcctgaccctgcccaacggcggctgcctgtctgctgtgggcctgcccctgggccctggccgggaggccctggagaaggccctggtgatccaggagagcgagaggaggaagaagctgcgcttccacccccggcagctgtacctgtctgtgaagcagggcgagctgcagaaggtgatcctgatgctgctggacaacctggaccccaacttccagagcgaccagcagagcaagaggacccccctgcatgctgctgcccagaagggctctgtggagatctgccacgtgctgctgcaggccggggccaacatcaatgctgtggacaagcagcagaggacccccctgatggaggccgtggtgaacaaccacctggaggtggcccgctacatggtgcagagaggaggctgtgtgtacagcaaggaggaggatggcagcacctgcctgcaccacgccgccaagattggcaacctggagatggtgtccctgctgctgagcacaggccaggtggatgtgaatgcccaggacagcggcggctggacccccatcatctgggccgctgagcacaagcacatcgaggtgatccgcatgctgctgaccagaggagcagatgtgaccctgacagacaacgtgtctgagcggctggtggaggaggagaacatctgcctgcactgggccagcttcaccggcagcgctgccatcgccgaggtgctgctgaatgcccgctgtgacctgcatgctgtgaactaccatggagacacccccctgcacatcgccgcccgggagagctaccatgactgtgtgctgctcttcctgagcagaggagccaaccctgagctgaggaacaaggagggggacacagcctgggacctgaccccagagaggagtgatgtgtggtttgccctgcagctgaacaggaagctgcggctgggcgtgggcaacagagccatcagaacagagaagatcatctgcagagatgtggcccggggctatgaaaatgtgcccatcccctgtgtgaatggagtggatggagagccctgcccagaggactacaagtacatcagcgagaactgtgagaccagcaccatgaacatcgacaggaacatcacccacctgcagcactgcacctgtgtggatgactgcagcagcagcaactgcctgtgtggccagctgagcatccgctgctggtatgacaaggatggccgcctgctgcaggagttcaacaagattgagcccccactcatctttgagtgcaaccaggcctgcagctgctggaggaactgcaagaacagagtggtgcagagcggcatcaaggtgcggctgcagctgtacagaacagccaagatgggctggggcgtgcgggccctgcagaccatcccccagggcaccttcatctgtgaatatgtgggggagctgatcagtgatgctgaggctgatgtgcgggaggatgacagctacctgtttgacctggacaacaaggatggagaggtgtactgcattgatgcccgctactacggcaacatcagccgcttcatcaaccacctgtgtgaccccaacatcatccctgtgcgggtcttcatgctgcaccaggacctgcgcttccccagaattgccttcttcagcagccgggacatcagaactggagaggagctgggctttgattatggagaccgcttctgggacatcaagagcaagtacttcacctgccagtgtggcagcgagaagtgcaagcacagcgctgaggccatcgccctggagcagagccggctggcccggctggacccccaccctgagctgctgcctgagctgggcagcctgccccctgtgaacacctag

SEQ ID NO: 151585 - DNA, 3096 bp, synthetic construct; identical to SEQ ID NO: 151572
  misc_feature 1..3096: note = Description of Artificial Sequence: Synthetic coding sequence
  source 1..3096: mol_type = other DNA

SEQ ID NO: 151586 - DNA, 3096 bp, synthetic construct; identical to SEQ ID NO: 151572
  misc_feature 1..3096: note = Description of Artificial Sequence: Synthetic coding sequence
  source 1..3096: mol_type = other DNA

SEQ ID NO: 151587 - DNA, 3096 bp, synthetic construct; identical to SEQ ID NO: 151584
  misc_feature 1..3096: note = Description of Artificial Sequence: Synthetic coding sequence
  source 1..3096: mol_type = other DNA

SEQ ID NO: 151588 - DNA, 3096 bp, synthetic construct; identical to SEQ ID NO: 151572
  misc_feature 1..3096: note = Description of Artificial Sequence: Synthetic coding sequence
  source 1..3096: mol_type = other DNA

SEQ ID NO: 151589 - DNA, 2178 bp, synthetic construct
  misc_feature 1..2178: note = Description of Artificial Sequence: Synthetic coding sequence
  source 1..2178: mol_type = other DNA
atggctgatgaggacctgatcttccggctggagggcgtggatggcggccagagccccagggctggccatgatggagacagtgatggagacagtgatgatgaggagggctacttcatctgccccatcacagatgaccccagcagcaaccagaatgtgaacagcaaggtgaacaagtactacagcaacctgaccaagtctgagcgctacagcagcagcggcagccctgccaacagcttccacttcaaggaggcctggaagcacgccatccagaaggccaagcacatgccagacccctgggccgagttccacctggaggacatcgccacagagcgggccaccaggcaccgctacaatgctgtgactggagagtggctggatgatgaggtgctgatcaagatggccagccagcccttcggccgcggggccatgagggagtgcttccgcaccaagaagctgagcaacttcctgcacgcccagcagtggaagggggccagcaactacgtggccaagcgctacatcgagcctgtggacagagatgtgtactttgaagatgtgcggctgcagatggaggccaagctgtggggcgaggagtacaacagacacaagccacccaagcaggtggacatcatgcagatgtgcatcatcgagctgaaggacaggcctgggaagcccctcttccacctggagcactacatcgagggcaagtacatcaagtacaacagcaacagcggctttgtgagagatgacaacatccggctgaccccccaggccttcagccacttcacctttgagaggagcggccaccagctgattgtggtggacatccagggcgtgggggacctgtacacagacccccagatccacacagaaacaggaacagactttggagatggcaacctgggcgtgcggggcatggccctcttcttctacagccacgcctgcaaccgcatctgtgagagcatgggcctggccccctttgacctgagcccccgggagagagatgctgtgaaccagaacaccaagctgctgcagagcgccaagaccatcctgcggggcacagaggagaagtgtggcagcccccaggtgaggaccctgagcggcagccggccccccctgctgcggcccctgtctgagaacagcggagatgagaacatgtctgatgtgacctttgacagcctgcccagcagccccagcagcgccaccccccacagccagaagctggaccacctgcactggcctgtgttcagtgacctggacaacatggccagccgggaccatgaccacctggacaaccaccgggagagcgagaacagcggggacagcggctaccccagcgagaagagaggagagctggatgatcctgagccccgggagcacggccacagctacagcaacagaaaatatgaaagtgatgaggacagcctgggcagcagcggccgggtgtgtgtggagaagtggaacctgctgaacagcagccggctgcacctgccccgggccagcgctgtggccctggaggtgcagaggctgaatgccctggacctggagaagaagattggcaagagcatcctgggcaaggtgcacctggccatggtgcgctaccacgagggcggccgcttctgtgagaagggggaggagtgggaccaggagagcgctgtgttccacctggagcacgccgccaacctgggggagctggaggccatcgtgggcctgggcctgatgtacagccagctgccccaccacatcctggctgatgtgtccctgaaggagacagaggagaacaagaccaagggctttgactacctgctgaaggctgctgaggccggggaccggcagagcatgatcctggtggcccgggcctttgacagcggccagaacctgagcccagaccgctgccaggactggctggaggccctgcactggtacaacacagccctggagatgacagactgtgatgaaggaggagaatatgatggcatgcaggatgagccccgctacatgatgctggcccgggaggccgagatgctgttcaccggcggctacggcctggagaaggacccccagaggtctggggacctgtacacccaggccgctgaggccgccatggaggccatgaagggccgcctggccaaccagtactaccagaaggccgaggaggcctgggcccagatggaggagtag

SEQ ID NO: 151590 - DNA, 1389 bp, synthetic construct
  misc_feature 1..1389: note = Description of Artificial Sequence: Synthetic coding sequence
  source 1..1389: mol_type = other DNA
atgggcaaggagaagacccacatcaacatcgtggtgattggacatgtggacagcggcaagagcaccaccaccggccacctgatctacaagtgtggcggcatcgacaagaggaccatcgagaagtttgagaaggaggccgctgagatgggcaagggcagcttcaagtatgcctgggtgctggacaagctgaaggccgagcgggagcggggcatcaccatcgacatcagcctgtggaagtttgagaccagcaagtactacgtgaccatcattgatgcccctggccaccgggacttcatcaagaacatgatcaccggcaccagccaggccgactgtgctgtgctgattgtggccgccggcgtgggggagtttgaagctggcatcagcaagaatggccagacccgggagcacgccctgctggcctacaccctgggcgtgaagcagctgattgtgggcgtgaacaagatggacagcacagagcccccctacagccagaagagatatgaggagatcgtgaaggaggtgtccacctacatcaagaagattggctacaacccagacacagtggcctttgtgcccatcagcggctggaatggagacaacatgctggagcccagcgccaacatgccctggttcaagggctggaaggtgaccaggaaggatggaaatgccagcggcaccaccctgctggaggccctggactgcatcctgccccccacccggcccacagacaagcccctgcggctgcccctgcaggatgtgtacaagattggaggcattggaacagtgcctgtgggccgggtggagactggagtgctgaagccaggcatggtggtgacctttgcccctgtgaatgtgaccacagaggtgaagtctgtggagatgcaccacgaggccctgtctgaggccctgcccggggacaacgtgggcttcaacgtgaagaatgtgtctgtgaaggatgtgagaagaggaaatgtggccggggacagcaagaatgacccccccatggaggccgccggcttcaccgcccaggtgatcatcctgaaccaccctggccagatctctgctggctacgcccctgtgctggactgccacacagcccacatcgcctgcaagtttgctgagctgaaggagaagattgacagaagaagtggcaagaagctggaggatggccccaagttcctgaagtctggagatgctgccatcgtggacatggtgcctgggaagcccatgtgtgtggagagcttcagtgactacccacccctgggccgctttgctgtgcgggacatgaggcagacagtggccgtgggcgtcatcaaggctgtggacaagaaggccgccggggccggcaaggtgaccaagagcgcccagaaggcccagaaggccaagtag

SEQ ID NO: 151591 - DNA, 1389 bp, synthetic construct; identical to SEQ ID NO: 151590
  misc_feature 1..1389: note = Description of Artificial Sequence: Synthetic coding sequence
  source 1..1389: mol_type = other DNA

SEQ ID NO: 151592 - DNA, 1389 bp, synthetic construct; identical to SEQ ID NO: 151590
  misc_feature 1..1389: note = Description of Artificial Sequence: Synthetic coding sequence
  source 1..1389: mol_type = other DNA

SEQ ID NO: 151593 - DNA, 438 bp, synthetic construct
  misc_feature 1..438: note = Description of Artificial Sequence: Synthetic coding sequence
  source 1..438: mol_type = other DNA
atgggcaaggagaagacccacatcaacatcgtggtgattggacatgtggacagcggcaagagcaccaccaccggccacctgatctacaagtgtggcggcatcgacaagaggaccatcgagaagtttgagaaggaggccgctgagatgggcaagggcagcttcaagtatgcctgggtgctggacaagctgaaggccgagcgggagcggggcatcaccatcgacatcagcctgtggaagtttgagaccagcaagtactacgtgaccatcattgatgcccctggccaccgggacttcatcaagaacatgatcaccggcaccagccaggccgactgtgctgtgctgattgtggccgccggcgtgggggagtttgaagctggcatcagcaagaatggccagacccgggagcacgccctgctggcctacaccctgggcgtgtag

SEQ ID NO: 151594 - DNA, 1281 bp, synthetic construct
  misc_feature 1..1281: note = Description of Artificial Sequence: Synthetic coding sequence
  source 1..1281: mol_type = other DNA
atgggcaaggagaagacccacatcaacatcgtggtgattggacatgtggacagcggcaagagcaccaccaccggccacctgatctacaagtgtggcggcatcgacaagaggaccatcgagaagtttgagaaggaggccgctgagatgggcaagggcagcttcaagtatgcctgggtgctggacaagctgaaggccgagcgggagcggggcatcaccatcgacatcagcctgtggaagtttgagaccagcaagtactacgtgaccatcattgatgcccctggccaccgggacttcatcaagaacatgatcaccggcaccagccaggccgactgtgctgtgctgattgtggccgccggcgtgggggagtttgaagctggcatcagcaagaatggccagacccgggagcacgccctgctggcctacaccctgggcgtgaagcagctgattgtgggcgtgaacaagatggacagcacagagcccccctacagccagaagagatatgaggagatcgtgaaggaggtgtccacctacatcaagaagattggctacaacccagacacagtggcctttgtgcccatcagcggctggaatggagacaacatgctggagcccagcgccaacatgccctggttcaagggctggaaggtgaccaggaaggatggaaatgccagcggcaccaccctgctggaggccctggactgcatcctgccccccacccggcccacagacaagcccctgcggctgcccctgcaggatgtgtacaagattggaggcattggaacagtgcctgtgcccagcggggactggtgcagccctggcatggtggtgacctttgcccctgtgaatgtgaccacagaggtgaagtctgtggagatgcaccacgaggccctgtctgaggccctgcccggggacaacgtgggcttcaacgtgaagaatgtgtctgtgaaggatgtgagaagaggaaatgtggccggggacagcaagaatgacccccccatggaggccgccggcttcaccgcccaggtgatcatcctgaaccaccctggccagatctctgctggctacgcccctgtgctggactgccacacagcccacatcgcctgcaagtttgctgagctgaaggagaagattgacagaagaagtggcaagaagctggaggatggccccaagttcctgaagtctggagatgctgccatcgtggacatggtgcctgggaagcccatgtgtgtggagagcttcagtgactacccacccctgggcaagagcctgtgctgcagctag

SEQ ID NO: 151595 - DNA, 1326 bp, synthetic construct
  misc_feature 1..1326: note = Description of Artificial Sequence: Synthetic coding sequence
  source 1..1326: mol_type = other DNA
atgggcaaggagaagacccacatcaacatcgtggtgattggacatgtggacagcggcaagagcaccaccaccggccacctgatctacaagtgtggcggcatcgacaagaggaccatcgagaagtttgagaaggaggccgctgagatgggcaagggcagcttcaagtatgcctgggtgctggacaagctgaaggccgagcgggagcggggcatcaccatcgacatcagcctgtggaagtttgagaccagcaagtactacgtgaccatcattgatgcccctggccaccgggacttcatcaagaacatgatcaccggcaccagccaggccgactgtgctgtgctgattgtggccgccggcgtgggggagtttgaagctggcatcagcaagaatggccagacccgggagcacgccctgctggcctacagccagaagagatatgaggagatcgtgaaggaggtgtccacctacatcaagaagattggctacaacccagacacagtggcctttgtgcccatcagcggctggaatggagacaacatgctggagcccagcgccaacatgccctggttcaagggctggaaggtgaccaggaaggatggaaatgccagcggcaccaccctgctggaggccctggactgcatcctgccccccacccggcccacagacaagcccctgcggctgcccctgcaggatgtgtacaagattggaggcatcggcaccgtgcctgtgggccgggtggagaccggggtgctgaagccaggcatggtggtgacctttgcccctgtgaatgtgaccacagaggtgaagtctgtggagatgcaccacgaggccctgtctgaggccctgcccggggacaacgtgggcttcaacgtgaagaatgtgtctgtgaaggatgtgagaagaggaaatgtggccggggacagcaagaatgacccccccatggaggccgccggcttcaccgcccaggtgatcatcctgaaccaccctggccagatctctgctggctacgcccctgtgctggactgccacacagcccacatcgcctgcaagtttgctgagctgaaggagaagattgaccggcgcagcggcaagaagctggaggatggccccaagttcctgaagtctggagatgctgccatcgtggacatggtgcctgggaagcccatgtgtgtggagagcttcagtgactacccacccctgggccgctttgctgtgcgggacatgaggcagacagtggccgtgggcgtcatcaaggctgtggacaagaaggctgctggagctgggaaggtgaccaagagcgcccagaaggcccagaaggccaagtag

SEQ ID NO: 151596 - DNA, 324 bp, synthetic construct
  misc_feature 1..324: note = Description of Artificial Sequence: Synthetic coding sequence
  source 1..324: mol_type = other DNA
atgggcaaggagaagacccacatcaacatcgtggtgattggacatgtggacagcggcaagagcaccaccaccggccacctgatctacaagtgtggcggcatcgacaagaggaccatcgagaagtttgagaaggaggccgctgagatgggcaagggcagcttcaagtatgcctgggtgctggacaagctgaaggccgagcgggagcggggcatcaccatcgacatcagcctgtggaagtttgagaccagcaagtactacgtgaccatcattgatgcccctggccaccgggacttcatcaagaacatgatcaccggcaccagctag

SEQ ID NO: 151597 - DNA, 336 bp, synthetic construct
  misc_feature 1..336: note = Description of Artificial Sequence: Synthetic coding sequence
  source 1..336: mol_type = other DNA
atgggcaaggagaagacccacatcaacatcgtggtgattggacatgtggacagcggcaagagcaccaccaccggccacctgatctacaagtgtggcggcatcgacaagaggaccatcgagaagtttgagaaggaggccgctgagatgggcaagggcagcttcaagtatgcctgggtgctggacaagctgaaggccgagcgggagcggggcatcaccatcgacatcagcctgtggaagtttgagaccaccaagcagtggacccggcggctgctggagctggcccggagccccagcctgcccaggaagctgcggcggctgaatgagtactacccctag

SEQ ID NO: 151598 - DNA, 1626 bp, synthetic construct
  misc_feature 1..1626: note = Description of Artificial Sequence: Synthetic coding sequence
  source 1..1626: mol_type = other DNA
atggtgatcaacctgtgcctgccccagttccggccccgcatccactgcaacaagatctctgcagatggctatgaggtggagaacctgatcagcgaggacctgaccaagaggagccacggcttcagaacagagtacttcatcaagccccctgtgtatgtgacagtgtccttccccttcaacgtggagatctgccgcatcaacatcgacctgacagctgggggcggccagaatgtgacaggcctggagatgtacaccagcgccagcagcagccgggtgtcctggaacaccccccagtgcaggaccctgggccctgctgagcccagcgtgcctgacaaggaggccttcaccctggtgggcaaggtgctgctgaagaaccagagccaggtggtgttcagccaccggggcttcaaggcccggcccccatttggagccatggaggccaccctgcccagccctgctgtggtggcccaggagctgtggaacaagggggccctgagcctgagccacgtggcccacctgcgcatctgcatcacccacgtgactggaggcggcatcccctgcatcaagaggctggaggtgtggggccagcctgccaagacctgcagccaggaggtgattgacagcatcctgctggtgaccagcgagaacctgccccaggatgtggccctgcaggccccagccctgcccatggagagtgactgtgaccccggggaccagcctgagagccagcaggcccccagcagcctgcagaagctggccgagatcatccaggatgtgcctgaggagttcctggaccccatcaccctggagatcatgccctgccccatgctgctgcccagcggcaaggtgattgaccagagcaccctggagaagtgcaacagaagtgaggccacctggggccgggtgcccagcgaccccttcaccggggtggccttcaccccccacagccagcccctgccccaccccagcctgaaggccagaattgaccacttcctgctgcagcacagcatccctggctgccacctgctgggccgggcccagacagccctggccgtcatccccagcagcatcgtgctgcccagccagaagaggaagattgagcaggccgagcacgtgcctgacagcaactttggagtgaatgccagctgcttcagcgccaccagccccctggtgctgcccaccaccagcgagcacacagccaagaagatgaaggccaccaatgagcccagcctgacccacatggactgcagcacaggccccctgagccatgagcagaagctgagccagagcctggagatcgccctggccagcaccctgggctccatgcccagcttcaccgcccggctgacccggggccagctgcagcacctgggcacccggggcagcaacacctcctggaggcctggcaccggcagcgagcagcccggcagcatcctgggcccagaatgtgccagctgcaagagggtcttcagcccctacttcaagaaggagcctgtgtaccagctgccctgtggccacctgctgtgccggccctgcctgggggagaagcagaggagcctgcccatgacctgcacagcctgccagaggcctgtggccagccaggatgtgctgcgggtgcacttctag

SEQ ID NO: 151599 - DNA, 1392 bp, synthetic construct
  misc_feature 1..1392: note = Description of Artificial Sequence: Synthetic coding sequence
  source 1..1392: mol_type = other DNA
atgggcaaggagaagacccacatcaacatcgtggtgattggacatgtggacagcggcaagagcaccaccaccggccacctgatctacaagtgtggcggcatcgacaagaggaccatcgagaagtttgagaaggaggccgctgagatgggcaagggcagcttcaagtatgcctgggtgctggacaagctgaaggccgagcgggagcggggcatcaccatcgacatcagcctgtggaagtttgagaccaccaagtactacatcaccatcattgatgcccctggccaccgggacttcatcaagaacatgatcaccggcaccagccaggccgactgtgctgtgctgattgtggccgccggcgtgggggagtttgaagctggcatcagcaagaatggccagacccgggagcacgccctgctggcctacaccctgggcgtgaagcagctgattgtgggcgtgaacaagatggacagcacagagcccgcctacagcgagaagagatatgatgagatcgtgaaggaggtgtctgcctacatcaagaagattggctacaacccagccaccgtgccctttgtgcccatcagcggctggcatggagacaacatgctggagcccagccccaacatgccctggttcaagggctggaaggtggagaggaaggagggcaatgccagcggcgtgtccctgctggaggccctggacaccatcctgccccccacccggcccacagacaagcccctgcggctgcccctgcaggatgtgtacaagattggaggcattggaacagtgcctgtgggccgggtggagaccggcatcctgcggcccggcatggtggtgacctttgcccctgtgaacatcaccacagaggtgaagtctgtggagatgcaccacgaggccctgtctgaggccctgcccggggacaacgtgggcttcaacgtgaagaatgtgtctgtgaaggacatcagaagaggaaatgtgtgtggggacagcaagagtgaccccccccaggaggccgcccagttcaccagccaggtgatcatcctgaaccaccctggccagatctctgctggctacagccctgtgattgactgccacacagcccacatcgcctgcaagtttgctgagctgaaggagaagattgacagaagaagtggcaagaagctggaggacaaccccaagagcctgaagtctggagatgctgccatcgtggagatggtgcctgggaagcccatgtgtgtggagagcttcagccagtacccacccctgggccgctttgctgtgcgggacatgaggcagacagtggccgtgggcgtcatcaagaatgtggagaagaagtctggaggagctgggaaggtgaccaagagcgcccagaaggcccagaaggccggcaagtag

SEQ ID NO: 151600 - DNA, 678 bp, synthetic construct
  misc_feature 1..678: note = Description of Artificial Sequence: Synthetic coding sequence
  source 1..678: mol_type = other DNA
atgggctttggagacctgaagagccctgctggcctgcaggtgctgaatgactacctggccgacaagagctacatcgagggctacgtgcccagccaggctgatgtggccgtgtttgaggccgtgagcagccccccacctgctgacctgtgccacgccctgcgctggtacaaccacatcaagagctatgagaaggagaaggccagcctgcccggggtgaagaaggccctgggcaagtatggccctgcagatgtggaggacaccaccggcagcggggccacagacagcaaggatgatgatgacatcgacctgtttggaagtgatgatgaggaggagagcgaggaggccaagaggctgcgggaggagcggctggcccagtatgagagcaagaaggccaagaagccagccctggtggccaagagcagcatcctgctggatgtgaagccctgggatgatgaaacagacatggccaagctggaggagtgtgtgcgcagcatccaggctgatggcctggtgtggggcagcagcaagctggtgcctgtgggctacggcatcaagaagctgcagatccagtgtgtggtggaggatgacaaggtgggcacagacatgctggaggagcagatcacagcctttgaagattatgtgcagagcatggatgtggccgccttcaacaagatctag

SEQ ID NO: 151601 - DNA, 678 bp, synthetic construct; identical to SEQ ID NO: 151600
  misc_feature 1..678: note = Description of Artificial Sequence: Synthetic coding sequence
  source 1..678: mol_type = other DNA

SEQ ID NO: 151602 - DNA, 678 bp, synthetic construct; identical to SEQ ID NO: 151600
  misc_feature 1..678: note = Description of Artificial Sequence: Synthetic coding sequence
  source 1..678: mol_type = other DNA

SEQ ID NO: 151603 - DNA, 372 bp, synthetic construct
  misc_feature 1..372: note = Description of Artificial Sequence: Synthetic coding sequence
  source 1..372: mol_type = other DNA
atgggctttggagacctgaagagccctgctggcctgcaggtgctgaatgactacctggccgacaagagctacatcgagggctacgtgcccagccaggctgatgtggccgtgtttgaggccgtgagcagccccccacctgctgacctgtgccacgccctgcgctggtacaaccacatcaagagctatgagaaggagaaggccagcctgcccggggtgaagaaggccctgggcaagtatggccctgcagatgtggaggacaccaccggcagcggggccacagacagcaaggatgatgatgacatcgacctgtttggaagtgatgatgaggaggagagcgaggaggccaagaggctgcgggaggagcggctgtag

SEQ ID NO: 151604 - DNA, 846 bp, synthetic construct
  misc_feature 1..846: note = Description of Artificial Sequence: Synthetic coding sequence
  source 1..846: mol_type = other DNA
atggccaccaacttcctggcccacgagaagatctggtttgacaagttcaagtatgatgatgctgagcggcgcttctatgagcagatgaatggacctgtggccggggccagccggcaggagaatggagccagcgtcatcctgcgggacatcgcccgggcccgggagaacatccagaagagcctggccggcagcagcggccctggggccagcagcggcaccagcggggaccatggagagctggtggtgcgcatcgccagcctggaggtggagaaccagagcctgcggggcgtggtgcaggagctgcagcaggccatcagcaagctggaggcccggctgaatgtgctggagaagagcagccctggccaccgggccacagccccccagacccagcacgtgagccccatgaggcaggtggagcccccagccaagaagccagccaccccagcagaagatgatgaagatgatgacatcgacctgtttggaagtgacaatgaggaggaggacaaggaggccgcccagctgcgggaggagcggctgcggcagtatgcagagaagaaggccaagaagccagccctggtggccaagagcagcatcctgctggatgtgaagccctgggatgatgaaacagacatggcccagctggaggcctgtgtgcgcagcatccagctggatggcctggtgtggggcgccagcaagctggtgcctgtgggctacggcatcaggaagctgcagatccagtgtgtggtggaggatgacaaggtgggcacagacctgctggaggaggagatcaccaagtttgaggagcacgtgcagagcgtggacattgctgccttcaacaagatctag

SEQ ID NO: 151605 - DNA, 1896 bp, synthetic construct
  misc_feature 1..1896: note = Description of Artificial Sequence: Synthetic coding sequence
  source 1..1896: mol_type = other DNA
atgaggtctgggaaggccagctgcaccctggagaccgtgtgggaggacaagcacaagtatgaggaggccgagcggcgcttctatgagcacgaggccacccaggccgccgccagcgcccagcagctgcctgctgagggccctgccatgaatggacctggccaggatgatcctgaagatgctgatgaagctgaggccccagatggcggcagcagaagagaccccaggaagagccaggacagcaggaagcccctgcagaagaagaggaagaggagccccaagagcggcctgggccctgctgacctggccctgctgggcctgtctgctgagcgggtgtggctggacaagagcctgtttgaccaggccgagagcagctaccggcagaagctggctgatgtggccgcccaggccgcctggcccccagccctggccccctggggcctgtgcacccacggcaaccaggtggcctgccaccacgtgacctggggcatctgggtgaacaagagcagctttgaccaggccgagcgggcctttgtggagtggagccaggccctgctgctggccccagatggcagccggcggcagggcacccccaacacaggccagcaggtggccgtgcctgacctggcccaccagcccagcccccctgtgaatggccagccccccctgggcagcctgcaggccctggtgcgggaggtgtggctggagaagcccaggtatgatgctgctgagcggggcttctatgaggccctgtttgatggccaccccccaggcaaggtgcggctgcaggagagagctggcctggccgagggcgcccggcggggcagaagagaccggcggggcaggaacatcctgggcaacaagagagctggcctgcggcgggcagatggagaggcccccagcgccctgccctactgctacttcctgcagaaggatgctgaggccccctggctgagcaagccagcctatgacagcgctgagtgccgccaccacgccgctgaggccctgcgggtggcctggtgcctggaggccgccagcctgagccaccggcccggccccaggagcggcctgtctgtgagcagcctgcggcccaacaggaagatggccaccaacttcctggcccacgagaagatctggtttgacaagttcaagtatgatgatgctgagcggcgcttctatgagcagatgaatggacctgtggccggggccagccggcaggagaatggagccagcgtcatcctgcgggacatcgcccgggcccgggagaacatccagaagagcctggccggcagcagcggccctggggccagcagcggcaccagcggggaccatggagagctggtggtgcgcatcgccagcctggaggtggagaaccagagcctgcggggcgtggtgcaggagctgcagcaggccatcagcaagctggaggcccggctgaatgtgctggagaagagcagccctggccaccgggccacagccccccagacccagcacgtgagccccatgaggcaggtggagcccccagccaagaagccagccaccccagcagaagatgatgaagatgatgacatcgacctgtttggaagtgacaatgaggaggaggacaaggaggccgcccagctgcgggaggagcggctgcggcagtatgcagagaagaaggccaagaagccagccctggtggccaagagcagcatcctgctggatgtgaagccctgggatgatgaaacagacatggcccagctggaggcctgtgtgcgcagcatccagctggatggcctggtgtggggcgccagcaagctggtgcctgtgggctacggcatcaggaagctgcagatccagtgtgtgggcggccggcagggcggggaccggctggccggcggcggggaccaccaggtgtag

SEQ ID NO: 151606 - DNA, 1728 bp, synthetic construct
  misc_feature 1..1728: note = Description of Artificial Sequence: Synthetic coding sequence
  source 1..1728: mol_type = other DNA
atgaatggacctggccaggatgatcctgaagatgctgatgaagctgaggccccagatggcggcagcagaagagaccccaggaagagccaggacagcaggaagcccctgcagaagaagaggaagaggagccccaagagcggcctgggccctgctgacctggccctgctgggcctgtctgctgagcgggtgtggctggacaagagcctgtttgaccaggccgagagcagctaccggcagaagctggctgatgtggccgcccaggccgcctggcccccagccctggccccctggggcctgtgcacccacggcaaccaggtggcctgccaccacgtgacctggggcatctgggtgaacaagagcagctttgaccaggccgagcgggcctttgtggagtggagccaggccctgctgctggccccagatggcagccggcggcagggcacccccaacacaggccagcaggtggccgtgcctgacctggcccaccagcccagcccccctgtgaatggccagccccccctgggcagcctgcaggccctggtgcgggaggtgtggctggagaagcccaggtatgatgctgctgagcggggcttctatgaggccctgtttgatggccaccccccaggcaaggtgcggctgcaggagagagctggcctggccgagggcgcccggcggggcagaagagaccggcggggcaggaacatcctgggcaacaagagagctggcctgcggcgggcagatggagaggcccccagcgccctgccctactgctacttcctgcagaaggatgctgaggccccctggctgagcaagccagcctatgacagcgctgagtgccgccaccacgccgctgaggccctgcgggtggcctggtgcctggaggccgccagcctgagccaccggcccggccccaggagcggcctgtctgtgagcagcctgcggcccaacaggaagatggccaccaacttcctggcccacgagaagatctggtttgacaagttcaagtatgatgatgctgagcggcgcttctatgagcagatgaatggacctgtggccggggccagccggcagagcagcggccctggggccagcagcggcaccagcggggaccatggagagctggtggtgcgcatcgccagcctggaggtggagaaccagagcctgcggggcgtggtgcaggagctgcagcaggccatcagcaagctggaggcccggctgaatgtgctggagaagagcagccctggccaccgggccacagccccccagacccagcacgtgagccccatgaggcaggtggagcccccagccaagaagccagccaccccagcagaagatgatgaagatgatgacatcgacctgtttggaagtgacaatgaggaggaggacaaggaggccgcccagctgcgggaggagcggctgcggcagtatgcagagaagaaggccaagaagccagccctggtggccaagagcagcatcctgctggatgtgaagccctgggatgatgaaacagacatggcccagctggaggcctgtgtgcgcagcatccagctggatggcctggtgtggggcgccagcaagctggtgcctgtgggctacggcatcaggaagctgcagatccagtgtgtggtggaggatgacaaggtgggcacagacctgctggaggaggagatcaccaagtttgaggagcacgtgcagagcgtggacattgctgccttcaacaagatctag

SEQ ID NO: 151607 - DNA, 846 bp, synthetic construct; identical to SEQ ID NO: 151604
  misc_feature 1..846: note = Description of Artificial Sequence: Synthetic coding sequence
  source 1..846: mol_type = other DNA

SEQ ID NO: 151608 - DNA, 846 bp, synthetic construct; identical to SEQ ID NO: 151604
  misc_feature 1..846: note = Description of Artificial Sequence: Synthetic coding sequence
  source 1..846: mol_type = other DNA

SEQ ID NO: 151609 - DNA, 1944 bp, synthetic construct
  misc_feature 1..1944: note = Description of Artificial Sequence: Synthetic coding sequence
  source 1..1944: mol_type = other DNA
atgaggtctgggaaggccagctgcaccctggagaccgtgtgggaggacaagcacaagtatgaggaggccgagcggcgcttctatgagcacgaggccacccaggccgccgccagcgcccagcagctgcctgctgagggccctgccatgaatggacctggccaggatgatcctgaagatgctgatgaagctgaggccccagatggcggcagcagaagagaccccaggaagagccaggacagcaggaagcccctgcagaagaagaggaagaggagccccaagagcggcctgggccctgctgacctggccctgctgggcctgtctgctgagcgggtgtggctggacaagagcctgtttgaccaggccgagagcagctaccggcagaagctggctgatgtggccgcccaggccgcctggcccccagccctggccccctggggcctgtgcacccacggcaaccaggtggcctgccaccacgtgacctggggcatctgggtgaacaagagcagctttgaccaggccgagcgggcctttgtggagtggagccaggccctgctgctggccccagatggcagccggcggcagggcacccccaacacaggccagcaggtggccgtgcctgacctggcccaccagcccagcccccctgtgaatggccagccccccctgggcagcctgcaggccctggtgcgggaggtgtggctggagaagcccaggtatgatgctgctgagcggggcttctatgaggccctgtttgatggccaccccccaggcaaggtgcggctgcaggagagagctggcctggccgagggcgcccggcggggcagaagagaccggcggggcaggaacatcctgggcaacaagagagctggcctgcggcgggcagatggagaggcccccagcgccctgccctactgctacttcctgcagaaggatgctgaggccccctggctgagcaagccagcctatgacagcgctgagtgccgccaccacgccgctgaggccctgcgggtggcctggtgcctggaggccgccagcctgagccaccggcccggccccaggagcggcctgtctgtgagcagcctgcggcccaacaggaagatggccaccaacttcctggcccacgagaagatctggtttgacaagttcaagtatgatgatgctgagcggcgcttctatgagcagatgaatggacctgtggccggggccagccggcaggagaatggagccagcgtcatcctgcgggacatcgcccgggcccgggagaacatccagaagagcctggccggcagcagcggccctggggccagcagcggcaccagcggggaccatggagagctggtggtgcgcatcgccagcctggaggtggagaaccagagcctgcggggcgtggtgcaggagctgcagcaggccatcagcaagctggaggcccggctgaatgtgctggagaagagcagccctggccaccgggccacagccccccagacccagcacgtgagccccatgaggcaggtggagcccccagccaagaagccagccaccccagcagaagatgatgaagatgatgacatcgacctgtttggaagtgacaatgaggaggaggacaaggaggccgcccagctgcgggaggagcggctgcggcagtatgcagagaagaaggccaagaagccagccctggtggccaagagcagcatcctgctggatgtgaagccctgggatgatgaaacagacatggcccagctggaggcctgtgtgcgcagcatccagctggatggcctggtgtggggcgccagcaagctggtgcctgtgggctacggcatcaggaagctgcagatccagtgtgtggtggaggatgacaaggtgggcacagacctgctggaggaggagatcaccaagtttgaggagcacgtgcagagcgtggacattgctgccttcaacaagatctag

SEQ ID NO: 151610 - DNA, 1944 bp, synthetic construct; identical to SEQ ID NO: 151609
  misc_feature 1..1944: note = Description of Artificial Sequence: Synthetic coding sequence
  source 1..1944: mol_type = other DNA

SEQ ID NO: 151611 - DNA, 774 bp, synthetic construct
  misc_feature 1..774: note = Description of Artificial Sequence: Synthetic coding sequence
  source 1..774: mol_type = other DNA
atggccaccaacttcctggcccacgagaagatctggtttgacaagttcaagtatgatgatgctgagcggcgcttctatgagcagatgaatggacctgtggccggggccagccggcagagcagcggccctggggccagcagcggcaccagcggggaccatggagagctggtggtgcgcatcgccagcctggaggtggagaaccagagcctgcggggcgtggtgcaggagctgcagcaggccatcagcaagctggaggcccggctgaatgtgctggagaagagcagccctggccaccgggccacagccccccagacccagcacgtgagccccatgaggcaggtggagcccccagccaagaagccagccaccccagcagaagatgatgaagatgatgacatcgacctgtttggaagtgacaatgaggaggaggacaaggaggccgcccagctgcgggaggagcggctgcggcagtatgcagagaagaaggccaagaagccagccctggtggccaagagcagcatcctgctggatgtgaagccctgggatgatgaaacagacatggcccagctggaggcctgtgtgcgcagcatccagctggatggcctggtgtggggcgccagcaagctggtgcctgtgggctacggcatcaggaagctgcagatccagtgtgtggtggaggatgacaaggtgggcacagacctgctggaggaggagatcaccaagtttgaggagcacgtgcagagcgtggacattgctgccttcaacaagatctag

SEQ ID NO: 151612 - DNA, 546 bp, synthetic construct
  misc_feature 1..546: note = Description of Artificial Sequence: Synthetic coding sequence
  source 1..546: mol_type = other DNA
atgaggtctgggaaggccagctgcaccctggagaccgtgtgggaggacaagcacaagtatgaggaggccgagcggcgcttctatgagcacgaggccacccaggccgccgccagcgcccagcagctgcctgctgagggccctgccatgaatggacctggccaggatgatcctgaagatgctgatgaagctgaggccccagatggcggcagcagaagagaccccaggaagagccaggacagcaggaagcccctgcagaagaagaggaagaggagccccaagagcggcctgggccctgctgacctggccctgctgggcctgtctgctgagcgggtgtggctggacaagagcctgtttgaccaggccgagagcagctaccggcagaagctggctgatgtggccgcccaggccgcctggcccccagccctggccccctggggcctgtgcacccacggcaaccaggtggcctgccaccacgtgacctggggcatctgggtgaacaagagcagctttgaccaggccgagcgggcctttgtggagtggagctag

SEQ ID NO: 151613 - DNA, 192 bp, synthetic construct
  misc_feature 1..192: note = Description of Artificial Sequence: Synthetic coding sequence
  source 1..192: mol_type = other DNA
atgaggtctgggaaggccagctgcaccctggagaccgtgtgggaggacaagcacaagtatgaggaggccgagcggcgcttctatgagcacgaggccacccaggccgccgccagcgcccagcagctgcctgctgagggccctgccatgaatggacctggccaggatgatcctgaagatgctgatgaggcctag

SEQ ID NO: 151614 - DNA, 120 bp, synthetic construct
  misc_feature 1..120: note = Description of Artificial Sequence: Synthetic coding sequence
  source 1..120: mol_type = other DNA
atggccaccaacttcctggcccacgagaagatctggtttgacaagttcaagtatgatgatgctgagcggcgcttctatgagcagatgaatggacctgtggccggggccagccggcagtag

SEQ ID NO: 151615 - DNA, 246 bp, synthetic construct
  misc_feature 1..246: note = Description of Artificial Sequence: Synthetic coding sequence
  source 1..246: mol_type = other DNA
atgaggtctgggaaggccagctgcaccctggagaccgtgtgggaggacaagcacaagtatgaggaggccgagcggcgcttctatgagcacgaggccacccaggccgccgccagcgcccagcagctgcctgctgagggccctgccatgaatggacctggccaggatgatcctgaagatgctgatgaagctgaggccccagatggcggcagcagaagagaccccaggaagagccaggacagcaggtag

SEQ ID NO: 151616 - DNA, 114 bp, synthetic construct
  misc_feature 1..114: note = Description of Artificial Sequence: Synthetic coding sequence
  source 1..114: mol_type = other DNA
atgaggtctgggaaggccagctgcaccctggagaccgtgtgggaggacaagcacaagtatgaggaggccgagcggcgcttctatgagcacgaggccacccaggccgccgcctag

SEQ ID NO: 151617 - DNA, 162 bp, synthetic construct
  misc_feature 1..162: note = Description of Artificial Sequence: Synthetic coding sequence
  source 1..162: mol_type = other DNA
atgaggtctgggaaggccagctgcaccctggagaccgtgtgggaggacaagcacaagtatgaggaggccgagcggcgcttctatgagcacgaggccacccaggccgccgccagcgcccagcagctgcctgctgagggccctgccatgaatggacctggatag

SEQ ID NO: 151618 - DNA, 192 bp, synthetic construct
  misc_feature 1..192: note = Description of Artificial Sequence: Synthetic coding sequence
  source 1..192: mol_type = other DNA
atggccaccaacttcctggcccacgagaagatctggtttgacaagttcaagtatgatgatgctgagcggcgcttctatgagcagatgaatggacctgtggccggggccagccggcaggagaatggagccagcgtcatcctgcgggacatcgcccgggcccgggagaacatccagaagagcctggccggctag

SEQ ID NO: 151619 - DNA, 903 bp, synthetic construct
  misc_feature 1..903: note = Description of Artificial Sequence: Synthetic coding sequence
  source 1..903: mol_type = other DNA
atgaggtctgggaaggccagctgcaccctggagaccgtgtgggaggacaagcacaagtatgaggaggccgagcggcgcttctatgagcacgaggccacccaggccgccgccagcgcccagcagctgcctgctgagggccctgccatgaatggacctggccaggatgatcctgaagatgctgatgaagctgaggccccagatggcggcagcagaagagaccccaggaagagccaggacagcaggaagcccctgcagaagaagaggaagaggagccccaagagcggcctgggccctgctgacctggccctgctgggcctgtctgctgagcgggtgtggctggacaagagcctgtttgaccaggccgagagcagctaccggcagaagctggctgatgtggccgcccaggccgcctggcccccagccctggccccctggggcctgtgcacccacggcaaccaggtggcctgccaccacgtgacctggggcatctgggtgaacaagagcagctttgaccaggccgagcgggcctttgtggagtggagccaggccctgctgctggccccagatggcagccggcggcagggcacccccaacacaggccagcaggtggccgtgcctgacctggcccaccagcccagcccccctgtgaatggccagccccccctgggcagcctgcaggccctggtgcgggaggtgtggctggagaagcccaggtatgatgctgctgagcggggcttctatgaggccctgtttgatggccaccccccaggcaaggtgcggctgcaggagagagctggcctggccgagggcgcccggcggggcagaagagaccggcggggcaggaacatcctgggcaacaagagagctggcctgcggcgggcagatggagaggcccccagctag

SEQ ID NO: 151620 - DNA, 66 bp, synthetic construct
  misc_feature 1..66: note = Description of Artificial Sequence: Synthetic coding sequence
  source 1..66: mol_type = other DNA
atgaggtctgggaaggccagctgcaccctggagaccgtgtgggaggacaagcacaagtatgaatag

SEQ ID NO: 151621 - DNA, 474 bp, synthetic construct
  misc_feature 1..474: note = Description of Artificial Sequence: Synthetic coding sequence
  source 1..474: mol_type = other DNA
atgaggtctgggaaggccagctgcaccctggagaccgtgtgggaggacaagcacaagtatgaggaggccgagcggcgcttctatgagcacgaggccacccaggccgccgccagcgcccagcagctgcctgctgagggccctgccatgaatggacctggccaggatgatcctgaagatgctgatgaagctgaggccccagatggcggcagcagaagagaccccaggaagagccaggacagcaggaagcccctgcagaagaagaggaagaggagccccaagagcggcctgggccctgctgacctggccctgctgggcctgtctgctgagcgggtgtggctggacaagagcctgtttgaccaggccgagagcagctaccggcagaagctggctgatgtggccgcccaggccgcctggcccccagccctggccccctggggcctgtgcacccacggcaaccaggtggcctgccactag

SEQ ID NO: 151622 - DNA, 774 bp, synthetic construct; identical to SEQ ID NO: 151611
  misc_feature 1..774: note = Description of Artificial Sequence: Synthetic coding sequence
  source 1..774: mol_type = other DNA

SEQ ID NO: 151623 - DNA, 846 bp, synthetic construct; identical to SEQ ID NO: 151604
  misc_feature 1..846: note = Description of Artificial Sequence: Synthetic coding sequence
  source 1..846: mol_type = other DNA

SEQ ID NO: 151624 - DNA, 441 bp, synthetic construct
  misc_feature 1..441: note = Description of Artificial Sequence: Synthetic coding sequence
  source 1..441: mol_type = other DNA
atgaggtctgggaaggccagctgcaccctggagaccgtgtgggaggacaagcacaagtatgaggaggccgagcggcgcttctatgagcacgaggccacccaggccgccgccagcgcccagcagctgcctgctgagggccctgccatgaatggacctggccaggatgatcctgaagatgctgatgaagctgaggccccagatggcggcagcagaagagaccccaggaagagccaggacagcaggaagcccctgcagaagaagaggaagaggagccccaagagcggcctgggccctgctgacctggccctgctgggcctgtctgctgagcgggtgtggctggacaagagcctgtttgaccaggccgagagcagctaccggcagaagctggctgatgtggccgcccaggccgcctggcccccagccctggccccctggggctag

SEQ ID NO: 151625 - DNA, 615 bp, synthetic construct
  misc_feature 1..615: note = Description of Artificial Sequence: Synthetic coding sequence
  source 1..615: mol_type = other DNA
atggccaccaacttcctggcccacgagaagatctggtttgacaagttcaagtatgatgatgctgagcggcgcttctatgagcagatgaatggacctgtggccggggccagccggcaggagaatggagccagcgtcatcctgcgggacatcgcccgggcccgggagaacatccagaagagcctggccggcagcagcggccctggggccagcagcggcaccagcggggaccatggagagctggtggtgcgcatcgccagcctggaggtggagaaccagagcctgcggggcgtggtgcaggagctgcagcaggccatcagcaagctggaggcccggctgaatgtgctggagaagagcagccctggccaccgggccacagccccccagacccagcacgtgagccccatgaggcaggtggagcccccagccaagaagccagccaccccagcagaagatgatgaagatgatgacatcgacctgtttggaagtgacaatgaggaggaggacaaggaggccgcccagctgcgggaggagcggctgcggcagtatgcagagaagaaggccaagaagccagccctggtggccaagagcagcatcctgctggatgtgaagccctag

SEQ ID NO: 151626 - DNA, 390 bp, synthetic construct
  misc_feature 1..390: note = Description of Artificial Sequence: Synthetic coding sequence
  source 1..390: mol_type = other DNA
atgaggtctgggaaggccagctgcaccctggagaccgtgtgggaggacaagcacaagtatgaggaggccgagcggcgcttctatgagcacgaggccacccaggccgccgccagcgcccagcagctgcctgctgagggccctgccatgaatggacctggccaggatgatcctgaagatgctgatgaagctgaggccccagatggcggcagcagaagagaccccaggaagagccaggacagcaggaagcccctgcagaagaagaggaagaggagccccaagagcggcctgggccctgctgacctggccctgctgggcctgtctgctgagcgggtgtggctggacaagagcctgtttgaccaggccgagagcagctaccggcagaagctgtag

SEQ ID NO: 151627 - DNA, 501 bp, synthetic construct
  misc_feature 1..501: note = Description of Artificial Sequence: Synthetic coding sequence
  source 1..501: mol_type = other DNA
atggccaccaacttcctggcccacgagaagatctggtttgacaagttcaagtatgatgatgctgagcggcgcttctatgagcagatgaatggacctgtggccggggccagccggcaggagaatggagccagcgtcatcctgcgggacatcgcccgggcccgggagaacatccagaagagcctggccggcagcagcggccctggggccagcagcggcaccagcggggaccatggagagctggtggtgcgcatcgccagcctggaggtggagaaccagagcctgcggggcgtggtgcaggagctgcagcaggccatcagcaagctggaggcccggctgaatgtgctggagaagagcagccctggccaccgggccacagccccccagacccagcacgtgagccccatgaggcaggtggagcccccagccaagaagccagccaccccagcagaagatgatgaagatgatgacatcgacctgtttggaagtgacaatgaggagtag

SEQ ID NO: 151628 - DNA, 255 bp, synthetic construct
  misc_feature 1..255: note = Description of Artificial Sequence: Synthetic coding sequence
  source 1..255: mol_type = other DNA
atgaggtctgggaaggccagctgcaccctggagaccgtgtgggaggacaagcacaagtatgaggaggccgagcggcgcttctatgagcacgaggccacccaggccgccgccagcgcccagcagctgcctgctgagggccctgccatgaatggacctggccaggatgatcctgaagatgctgatgaagctgaggccccagatggcggcagcagaagagaccccaggaagagccaggacagcaggaagcccctgtag

SEQ ID NO: 151629 - DNA, 600 bp, synthetic construct
  misc_feature 1..600: note = Description of Artificial Sequence: Synthetic coding sequence
  source 1..600: mol_type = other DNA
atggccaccaacttcctggcccacgagaagatctggtttgacaagttcaagtatgatgatgctgagcggcgcttctatgagcagatgaatggacctgtggccggggccagccggcaggagaatggagccagcgtcatcctgcgggacatcgcccgggcccgggagaacatccagaagagcctggccggcagcagcggccctggggccagcagcggcaccagcggggaccatggagagctggtggtgcgcatcgccagcctggaggtggagaaccagagcctgcggggcgtggtgcaggagctgcagcaggccatcagcaagctggaggcccggctgaatgtgctggagaagagcagccctggccaccgggccacagccccccagacccagcacgtgagccccatgaggcaggtggagcccccagccaagaagccagccaccccagcagaagatgatgaagatgatgacatcgacctgtttggaagtgacaatgaggaggaggacaaggaggccgcccagctgcgggaggagcggctgcggcagtatgcagagaagaaggccaagaagccagccctggtggccaagagcagcatcctgtag

SEQ ID NO: 151630 - DNA, 774 bp, synthetic construct
  misc_feature 1..774: note = Description of Artificial Sequence: Synthetic coding sequence
  source 1..774: mol_type = other DNA
atgaggtctgggaaggccagctgcaccctggagaccgtgtgggaggacaagcacaagtatgaggaggccgagcggcgcttctatgagcacgaggccacccaggccgccgccagcgcccagcagctgcctgctgagggccctgccatgaatggacctggccaggatgatcctgaagatgctgatgaagctgaggccccagatggcggcagcagaagagaccccaggaagagccaggacagcaggaagcccctgcagaagaagaggaagaggagccccaagagcggcctgggccctgctgacctggccctgctgggcctgtctgctgagcgggtgtggctggacaagagcctgtttgaccaggccgagagcagctaccggcagaagctggctgatgtggccgcccaggccgcctggcccccagccctggccccctggggcctgtgcacccacggcaaccaggtggcctgccaccacgtgacctggggcatctgggtgaacaagagcagctttgaccaggccgagcgggcctttgtggagtggagccaggccctgctgctggccccagatggcagccggcggcagggcacccccaacacaggccagcaggtggccgtgcctgacctggcccaccagcccagcccccctgtgaatggccagccccccctgggcagcctgcaggccctggtgcgggaggtgtggctggagaagcccaggtatgatgctgctgagcggggcttctatgaggccctgtttgatggccaccccccaggatag

SEQ ID NO: 151631 - DNA, 540 bp, synthetic construct
  misc_feature 1..540: note = Description of Artificial Sequence: Synthetic coding sequence
  source 1..540: mol_type = other DNA
atgaggtctgggaaggccagctgcaccctggagaccgtgtgggaggacaagcacaagtatgaggaggccgagcggcgcttctatgagcacgaggccacccaggccgccgccagcgcccagcagctgcctgctgagggccctgccatgaatggacctggccaggatgatcctgaagatgctgatgaagctgaggccccagatggcggcagcagaagagaccccaggaagagccaggacagcaggaagcccctgcagaagaagaggaagaggagccccaagagcggcctgggccctgctgacctggccctgctgggcctgtctgctgagcgggtgtggctggacaagagcctgtttgaccaggccgagagcagctaccggcagaagctggctgatgtggccgcccaggccgcctggcccccagccctggccccctggggcctgtgcacccacggcaaccaggtggcctgccaccacgtgacctggggcatctgggtgaacaagagcagctttgaccaggccgagcgggcctttgtggagtag

SEQ ID NO: 151632 - DNA, 108 bp, synthetic construct
  misc_feature 1..108: note = Description of Artificial Sequence: Synthetic coding sequence
  source 1..108: mol_type = other DNA
atggccaccaacttcctggcccacgagaagatctggtttgacaagttcaagtatgatgatgctgagcggcgcttctatgagcagatgaatggacctgtggccggctag

SEQ ID NO: 151633 - DNA, 150 bp, synthetic construct
  misc_feature 1..150: note = Description of Artificial Sequence: Synthetic coding sequence
  source 1..150: mol_type = other DNA
atgaggtctgggaaggccagctgcaccctggagaccgtgtgggaggacaagcacaagtatgaggaggccgagcggcgcttctatgagcacgaggccacccaggccgccgccagcgcccagcagctgcctgctgagggccctgccatgtag

SEQ ID NO: 151634 - DNA, 120 bp, synthetic construct; identical to SEQ ID NO: 151614
  misc_feature 1..120: note = Description of Artificial Sequence: Synthetic coding sequence
  source 1..120: mol_type = other DNA

SEQ ID NO: 151635 - DNA, 573 bp, synthetic construct
  misc_feature 1..573: note = Description of Artificial Sequence: Synthetic coding sequence
  source 1..573: mol_type = other DNA
atgaggtctgggaaggccagctgcaccctggagaccgtgtgggaggacaagcacaagtatgaggaggccgagcggcgcttctatgagcacgaggccacccaggccgccgccagcgcccagcagctgcctgctgagggccctgccatgaatggacctggccaggatgatcctgaagatgctgatgaagctgaggccccagatggcggcagcagaagagaccccaggaagagccaggacagcaggaagcccctgcagaagaagaggaagaggagccccaagagcggcctgggccctgctgacctggccctgctgggcctgtctgctgagcgggtgtggctggacaagagcctgtttgaccaggccgagagcagctaccggcagaagctggctgatgtggccgcccaggccgcctggcccccagccctggccccctggggcctgtgcacccacggcaaccaggtggcctgccaccacgtgacctggggcatctgggtgaacaagagcagctttgaccaggccgagcgggcctttgtggagtggagccaggccctgctgctggccccagatggatag

SEQ ID NO: 151636 - DNA, 2094 bp, synthetic construct
  misc_feature 1..2094: note = Description of Artificial Sequence: Synthetic coding sequence
  source 1..2094: mol_type = other DNA
atggaggcccccctgggcagcatcctgagcccctgccccggccgggccgccaccggccgggccggcaccggccgggtgggcaccggcctgcggcccccagctgtgctgcagctgtgccccctgctggccttctaccgctgtgtgaggaagatgaggtctgggaaggccagctgcaccctggagaccgtgtgggaggacaagcacaagtatgaggaggccgagcggcgcttctatgagcacgaggccacccaggccgccgccagcgcccagcagctgcctgctgagggccctgccatgaatggacctggccaggatgatcctgaagatgctgatgaagctgaggccccagatggcggcagcagaagagaccccaggaagagccaggacagcaggaagcccctgcagaagaagaggaagaggagccccaagagcggcctgggccctgctgacctggccctgctgggcctgtctgctgagcgggtgtggctggacaagagcctgtttgaccaggccgagagcagctaccggcagaagctggctgatgtggccgcccaggccgcctggcccccagccctggccccctggggcctgtgcacccacggcaaccaggtggcctgccaccacgtgacctggggcatctgggtgaacaagagcagctttgaccaggccgagcgggcctttgtggagtggagccaggccctgctgctggccccagatggcagccggcggcagggcacccccaacacaggccagcaggtggccgtgcctgacctggcccaccagcccagcccccctgtgaatggccagccccccctgggcagcctgcaggccctggtgcgggaggtgtggctggagaagcccaggtatgatgctgctgagcggggcttctatgaggccctgtttgatggccaccccccaggcaaggtgcggctgcaggagagagctggcctggccgagggcgcccggcggggcagaagagaccggcggggcaggaacatcctgggcaacaagagagctggcctgcggcgggcagatggagaggcccccagcgccctgccctactgctacttcctgcagaaggatgctgaggccccctggctgagcaagccagcctatgacagcgctgagtgccgccaccacgccgctgaggccctgcgggtggcctggtgcctggaggccgccagcctgagccaccggcccggccccaggagcggcctgtctgtgagcagcctgcggcccaacaggaagatggccaccaacttcctggcccacgagaagatctggtttgacaagttcaagtatgatgatgctgagcggcgcttctatgagcagatgaatggacctgtggccggggccagccggcaggagaatggagccagcgtcatcctgcgggacatcgcccgggcccgggagaacatccagaagagcctggccggcagcagcggccctggggccagcagcggcaccagcggggaccatggagagctggtggtgcgcatcgccagcctggaggtggagaaccagagcctgcggggcgtggtgcaggagctgcagcaggccatcagcaagctggaggcccggctgaatgtgctggagaagagcagccctggccaccgggccacagccccccagacccagcacgtgagccccatgaggcaggtggagcccccagccaagaagccagccaccccagcagaagatgatgaagatgatgacatcgacctgtttggaagtgacaatgaggaggaggacaaggaggccgcccagctgcgggaggagcggctgcggcagtatgcagagaagaaggccaagaagccagccctggtggccaagagcagcatcctgctggatgtgaagccctgggatgatgaaacagacatggcccagctggaggcctgtgtgcgcagcatccagctggatggcctggtgtggggcgccagcaagctggtgcctgtgggctacggcatcaggaagctgcagatccagtgtgtggtggaggatgacaaggtgggcacagacctgctggaggaggagatcaccaagtttgaggagcacgtgcagagcgtggacattgctgccttcaacaagatctag

SEQ ID NO: 151637 - DNA, 615 bp, synthetic construct; identical to SEQ ID NO: 151625
  misc_feature 1..615: note = Description of Artificial Sequence: Synthetic coding sequence
  source 1..615: mol_type = other DNA

SEQ ID NO: 151638 - DNA, 507 bp, synthetic construct
  misc_feature 1..507: note = Description of Artificial Sequence: Synthetic coding sequence
  source 1..507: mol_type = other DNA
atggccaccaacttcctggcccacgagaagatctggtttgacaagttcaagtatgatgatgctgagcggcgcttctatgagcagatgaatggacctgtggccggggccagccggcaggagaatggagccagcgtcatcctgcgggacatcgcccgggcccgggagaacatccagaagagcctggccggcagcagcggccctggggccagcagcggcaccagcggggaccatggagagctggtggtgcgcatcgccagcctggaggtggagaaccagagcctgcggggcgtggtgcaggagctgcagcaggccatcagcaagctggaggcccggctgaatgtgctggagaagagcagccctggccaccgggccacagccccccagacccagcacgtgagccccatgaggcaggtggagcccccagccaagaagccagccaccccagcagaagatgatgaagatgatgacatcgacctgtttggaagtgacaatgaggaggaggactag

SEQ ID NO: 151639 - DNA, 786 bp, synthetic construct
  misc_feature 1..786: note = Description of Artificial Sequence: Synthetic coding sequence
  source 1..786: mol_type = other DNA
atggccaccaacttcctggcccacgagaagatctggtttgacaagttcaagtatgatgatgctgagcggcgcttctatgagcagatgaatggacctgtggccggggccagccggcaggagaatggagccagcgtcatcctgcgggacatcgcccgggcccgggagaacatccagaagagcctggccggcagcagcggccctggggccagcagcggcaccagcggggaccatggagagctggtggtgcgcatcgccagcctggaggtggagaaccagagcctgcggggcgtggtgcaggagctgcagcaggccatcagcaagctggaggcccggctgaatgtgctggagaagagcagccctggccaccgggccacagccccccagacccagcacgtgagccccatgaggcaggtggagcccccagccaagaagccagccaccccagcagaagatgatgaagatgatgacatcgacctgtttggaagtgacaatgaggaggaggacaaggaggccgcccagctgcgggaggagcggctgcggcagtatgcagagaagaaggccaagaagccagccctggtggccaagagcagcatcctgctggatgtgaagccctgggatgatgaaacagacatggcccagctggaggcctgtgtgcgcagcatccagctggatggcctggtgtggggcgccagcaagctggtgcctgtgggctacggcatcaggaagctgcagatccagtgtgtggtggaggatgacaaggtgggcacagacctgctggaggagtag

SEQ ID NO: 151640 - DNA, 96 bp, synthetic construct
  misc_feature 1..96: note = Description of Artificial Sequence: Synthetic coding sequence
  source 1..96: mol_type = other DNA
atgaggtctgggaaggccagctgcaccctggagaccgtgtgggaggacaagcacaagtatgaggaggccgagcggcgcttctatgagcacgagtag

SEQ ID NO: 151641 - DNA, 207 bp, synthetic construct
  misc_feature 1..207: note = Description of Artificial Sequence: Synthetic coding sequence
  source 1..207: mol_type = other DNA
atgaggtctgggaaggccagctgcaccctggagaccgtgtgggaggacaagcacaagtatgaggaggccgagcggcgcttctatgagcacgaggccacccaggccgccgccagcgcccagcagctgcctgctgagggccctgccatgaatggacctggccaggatgatcctgaagatgctgatgaagctgaggccccagatggatag

SEQ ID NO: 151642 - DNA, 789 bp, synthetic construct
  misc_feature 1..789: note = Description of Artificial Sequence: Synthetic coding sequence
  source 1..789: mol_type = other DNA
atggccaccaacttcctggcccacgagaagatctggtttgacaagttcaagtatgatgatgctgagcggcgcttctatgagcagatgaatggacctgtggccggggccagccggcaggagaatggagccagcgtcatcctgcgggacatcgcccgggcccgggagaacatccagaagagcctggccggcagcagcggccctggggccagcagcggcaccagcggggaccacgtggtgcaggagctgcagcaggccatcagcaagctggaggcccggctgaatgtgctggagaagagcagccctggccaccgggccacagccccccagacccagcacgtgagccccatgaggcaggtggagcccccagccaagaagccagccaccccagcagaagatgatgaagatgatgacatcgacctgtttggaagtgacaatgaggaggaggacaaggaggccgcccagctgcgggaggagcggctgcggcagtatgcagagaagaaggccaagaagccagccctggtggccaagagcagcatcctgctggatgtgaagccctgggatgatgaaacagacatggcccagctggaggcctgtgtgcgcagcatccagctggatggcctggtgtggggcgccagcaagctggtgcctgtgggctacggcatcaggaagctgcagatccagtgtgtggtggaggatgacaaggtgggcacagacctgctggaggaggagatcaccaagtttgaggagcacgtgcagagcgtggacattgctgccttcaacaagatctag

SEQ ID NO: 151643 - DNA, 525 bp, synthetic construct
  misc_feature 1..525: note = Description of Artificial Sequence: Synthetic coding sequence
  source 1..525: mol_type = other DNA
atggctgctgctgctgagctgagcctgctggagaagagcctgggcctgagcaagggcaacaagtacagcgcccagggcgagcggcagatccctgtgctgcagaccaacaacggccccagcctgaccggcctgaccaccatcgccgcccacctggtgaagcaggccaacaaggagtacctgctgggcagcacagctgaggagaaggccatcgtgcagcagtggctggagtacagagtgacccaggtggatggccacagcagcaagaatgacatccacaccctgctgaaggacctgaacagctacctggaggacaaggtgtacctgaccggctacaacttcaccctggccgacatcctgctgtactacggcctgcaccgcttcatcgtggacctgactgtgcaggagaaggagaagtacctgaatgtgagccgctggttctgccacatccagcactacccaggcatccggcagcacctgagctctgtggtgttcatcaagaacagactctacaccaacagccactag

SEQ ID NO: 151644 - DNA, 420 bp, synthetic construct
  misc_feature 1..420: note = Description of Artificial Sequence: Synthetic coding sequence
  source 1..420: mol_type = other DNA
atggctgctgctgctgagctgagcctgctggagaagagcctgggcctgagcaagggcaacaagtacagcgcccagggcgagcggcagatccctgtgctgcagaccaacaacggccccagcctgaccggcctgaccaccatcgccgcccacctggtgaagcaggccaacaaggagtacctgctgggcagcacagctgaggagaaggccatcgtgcagcagtggctggagtacagagtgacccaggtggatggccacagcagcaagaatgacatccacaccctgctgaaggacctgaacagctacctggaggacaaggtgtacctgaccggctacaacttcaccctggccgacatcctgctgtactacggcctgcaccgcttcatcatcaggaagctgcggcacacagaggtgggcaactag

SEQ ID NO: 151645 - DNA, 1314 bp, synthetic construct
  misc_feature 1..1314: note = Description of Artificial Sequence: Synthetic coding sequence
  source 1..1314: mol_type = other DNA
atggctgctggcaccctgtacacctacccagagaactggagggccttcaaggccctgattgctgcccagtacagcggggcccaggtgcgggtgctgagcgccccaccccacttccacttcggccagaccaacagaacacctgagttcctgaggaagtttcctgctgggaaggtgcctgcctttgaaggagatgatggcttctgtgtgtttgagagcaatgccatcgcctactacgtgtccaatgaggagctgcggggcagcaccccagaggccgccgcccaggtggtgcagtgggtgtcctttgctgacagcgacatcgtgcccccagccagcacctgggtgttccccaccctgggcatcatgcaccacaacaagcaggccacagaaaatgccaaggaggaggtgcggcgcatcctgggcctgctggatgcctacctgaagaccaggaccttcctggtgggggagcgggtgaccctggccgacatcaccgtggtgtgcaccctgctgtggctgtacaagcaggtgctggagcccagcttccggcaggccttccccaacaccaaccgctggttcctgacctgcatcaaccagccccagttccgggctgtgctgggggaggtgaagctgtgtgagaagatggcccagtttgatgccaagaagtttgctgagacccagcccaagaaggacacccccaggaaggagaagggcagccgggaggagaagcagaagccccaggccgagaggaaggaggagaagaaggctgctgccccagcccctgaggaggagatggatgaatgtgagcaggccctggccgctgagcccaaggccaaggacccctttgcccacctgcccaagagcacctttgtgctggatgagttcaagaggaagtacagcaatgaagacaccctgtctgtggccctgccctacttctgggagcactttgacaaggatggctggagcctgtggtacagcgagtaccgcttccctgaggagctgacccagaccttcatgagctgcaacctgatcaccggcatgttccagaggctggacaagctgaggaagaatgcctttgccagcgtcatcctgtttggcaccaacaacagcagcagcatcagcggcgtgtgggtgttccggggccaggagctggccttccccctgagcccagactggcaggtggactatgagagctacacctggaggaagctggaccccggcagcgaggagacccagaccctggtgcgggagtacttctcctgggagggcgccttccagcacgtgggcaaggccttcaaccagggcaagatcttcaagtag

SEQ ID NO: 151646 - DNA, 1464 bp, synthetic construct
  misc_feature 1..1464: note = Description of Artificial Sequence: Synthetic coding sequence
  source 1..1464: mol_type = other DNA
atggccgagcgctgggtggccccagctgtgctgcggcgggccaggtttgccagcaccttcttcctgagcccccagatctatgcccacaaggatggagacctgcggagcgccttcttcatcctgtccttcaagagaggagagttcatccccttcctgaactggaccctgtacacctacccagagaactggagggccttcaaggccctgattgctgcccagtacagcggggcccaggtgcgggtgctgagcgccccaccccacttccacttcggccagaccaacagaacacctgagttcctgaggaagtttcctgctgggaaggtgcctgcctttgaaggagatgatggcttctgtgtgtttgagagcaatgccatcgcctactacgtgtccaatgaggagctgcggggcagcaccccagaggccgccgcccaggtggtgcagtgggtgtcctttgctgacagcgacatcgtgcccccagccagcacctgggtgttccccaccctgggcatcatgcaccacaacaagcaggccacagaaaatgccaaggaggaggtgcggcgcatcctgggcctgctggatgcctacctgaagaccaggaccttcctggtgggggagcgggtgaccctggccgacatcaccgtggtgtgcaccctgctgtggctgtacaagcaggtgctggagcccagcttccggcaggccttccccaacaccaaccgctggttcctgacctgcatcaaccagccccagttccgggctgtgctgggggaggtgaagctgtgtgagaagatggcccagtttgatgccaagaagtttgctgagacccagcccaagaaggacacccccaggaaggagaagggcagccgggaggagaagcagaagccccaggccgagaggaaggaggagaagaaggctgctgccccagcccctgaggaggagatggatgaatgtgagcaggccctggccgctgagcccaaggccaaggacccctttgcccacctgcccaagagcacctttgtgctggatgagttcaagaggaagtacagcaatgaagacaccctgtctgtggccctgccctacttctgggagcactttgacaaggatggctggagcctgtggtacagcgagtaccgcttccctgaggagctgacccagaccttcatgagctgcaacctgatcaccggcatgttccagaggctggacaagctgaggaagaatgcctttgccagcgtcatcctgtttggcaccaacaacagcagcagcatcagcggcgtgtgggtgttccggggccaggagctggccttccccctgagcccagactggcaggtggactatgagagctacacctggaggaagctggaccccggcagcgaggagacccagaccctggtgcgggagtacttctcctgggagggcgccttccagcacgtgggcaaggccttcaaccagggcaagatcttcaagtag

SEQ ID NO: 151647 - DNA, 621 bp, synthetic construct
  misc_feature 1..621: note = Description of Artificial Sequence: Synthetic coding sequence
  source 1..621: mol_type = other DNA
atgcaccacaacaagcaggccacagaaaatgccaaggaggaggtgcggcgcatcctgggcctgctggatgcctacctgaagaccaggaccttcctggtgggggagcgggtgaccctggccgctgagcccaaggccaaggacccctttgcccacctgcccaagagcacctttgtgctggatgagttcaagaggaagtacagcaatgaagacaccctgtctgtggccctgccctacttctgggagcactttgacaaggatggctggagcctgtggtacagcgagtaccgcttccctgaggagctgacccagaccttcatgagctgcaacctgatcaccggcatgttccagaggctggacaagctgaggaagaatgcctttgccagcgtcatcctgtttggcaccaacaacagcagcagcatctctggagtgtgggtgttccggggccaggagctggccttccccctgagcccagactggcaggtggactatgagagctacacctggaggaagctggaccccggcagcgaggagacccagaccctggtgcgggagtacttctcctgggagggcgccttccagcacgtgggcaaggccttcaaccagggcaagatcttcaagtag

SEQ ID NO: 151648 - DNA, 2577 bp, synthetic construct
  misc_feature 1..2577: note = Description of Artificial Sequence: Synthetic coding sequence
  source 1..2577: mol_type = other DNA
atggtgaacttcaccgtggaccagatccgggccatcatggacaagaaggccaacatccggaacatgtctgtgattgcccacgtggaccacggcaagagcaccctgacagacagcctggtgtgcaaggccggcatcatcgccagcgcccgggccggggagacccgcttcacagacaccaggaaggatgagcaggagcgctgcatcaccatcaagagcacagccatcagcctcttctatgagctgtctgaaaatgacctgaacttcatcaagcagagcaaggatggagctggcttcctgatcaacctgattgacagccctggccacgtggacttcagcagcgaggtgacagctgccctgcgggtgacagatggagccctggtggtggtggactgtgtgtctggagtgtgtgtgcagacagaaacagtgctgcggcaggccatcgccgagcgcatcaagcctgtgctgatgatgaacaagatggaccgggccctgctggagctgcagctggagcctgaggagctgtaccagaccttccagagaattgtggagaatgtgaatgtcatcatcagcacctacggggagggggagagcggccccatgggcaacatcatgattgatcctgtgctgggcaccgtgggcttcggcagcggcctgcacggctgggccttcaccctgaagcagtttgctgagatgtatgtggccaagtttgctgccaagggggagggccagctgggccctgctgagcgggccaagaaggtggaggacatgatgaagaagctgtggggagaccgctactttgatcctgccaacgggaagttcagcaagagcgccaccagccctgagggcaagaagctgcccaggaccttctgccagctgatcctggaccccatcttcaaggtgtttgatgccatcatgaacttcaagaaggaggagacagccaagctgattgagaagctggacatcaagctggacagcgaggacaaggacaaggagggcaagcccctgctgaaggctgtgatgaggcgctggctgcctgctggagatgccctgctgcagatgatcaccatccacctgcccagccctgtgacagcccagaagtaccgctgtgagctgctgtatgagggccccccagatgatgaagctgccatgggcatcaagagctgtgaccccaagggccccctgatgatgtacatcagcaagatggtgcccaccagtgacaagggccgcttctacgccttcggccgggtcttcagcggcctggtgtccacaggcctgaaggtgcgcatcatgggccccaactacacccctgggaagaaggaggacctgtacctgaagcccatccagaggaccatcctgatgatgggccgctacgtggagcccattgaagatgtgccctgtggcaacatcgtgggcctggtgggcgtggaccagttcctggtgaagacaggcaccatcaccacctttgagcacgcccacaacatgagggtgatgaagttctctgtgtcccctgtggtgcgggtggccgtggaggccaagaacccagctgacctgcccaagctggtggagggcctgaagaggctggccaagagtgaccccatggtgcagtgcatcatcgaggagagcggggagcacatcatcgccggggccggggagctgcacctggagatctgcctgaaggacctggaggaggaccacgcctgcatccccatcaagaagagtgaccctgtggtgtcctaccgggagaccgtgtctgaggagagcaatgtgctgtgcctgagcaagagccccaacaagcacaaccggctgtacatgaaggcccggcccttcccagatggcctggctgaagatattgacaagggggaggtgtctgcccggcaggagctgaagcagagggcccgctacctggccgagaagtatgagtgggatgtggccgaggccaggaagatctggtgcttcggcccagatggcaccggccccaacatcctgacagacatcaccaagggcgtgcagtacctgaatgagatcaaggacagcgtggtggccggcttccagtgggccaccaaggagggcgccctgtgtgaggagaacatgagaggagtgcgctttgatgtgcatgatgtgaccctgcatgctgatgccatccacagaggaggcggccagatcatccccacagcccggcgctgcctgtatgcctctgtgctgacagcccagccccggctgatggagcccatctacctggtggagatccagtgcccagagcaggtggtgggcggcatctacggcgtgctgaacaggaagaggggccacgtgtttgaggagagccaggtggccggcacccccatgtttgtggtgaaggcctacctgcctgtgaatgaaagctttggcttcaccgctgacctgcggagcaacacaggaggccaggccttcccccagtgtgtgtttgaccactggcagatcctgcccggggacccctttgacaacagcagccggcccagccaggtggtggccgagaccaggaagaggaagggcctgaaggagggcatcccagccctggacaacttcctggacaagctgtag

SEQ ID NO: 151649 - DNA, 1752 bp, synthetic construct
  misc_feature 1..1752: note = Description of Artificial Sequence: Synthetic coding sequence
  source 1..1752: mol_type = other DNA
atggtgaacttcaccgtggaccagatccgggccatcatggacaagaaggccaacatccggaacatgtctgtgattgcccacgtggaccacggcaagagcaccctgacagacagcctggtgtgcaaggccggcatcatcgccagcgcccgggccggggagacccgcttcacagacaccaggaaggatgagcaggagcgctgcatcaccatcaagagcacagccatcagcctcttctatgagctgtctgaaaatgacctgaacttcatcaagcagagcaaggatggagctggcttcctgatcaacctgattgacagccctggccacgtggacttcagcagcgaggtgacagctgccctgcgggtgacagatggagccctggtggtggtggactgtgtgtctggagtgtgtgtgcagacagaaacagtgctgcggcaggccatcgccgagcgcatcaagcctgtgctgatgatgaacaagatggaccgggccctgctggagctgcagctggagcctgaggagctgtaccagaccttccagagaattgtggagaatgtgaatgtcatcatcagcacctacggggagggggagagcggccccatgggcaacatcatgattgatcctgtgctgggcaccgtgggcttcggcagcggcctgcacggctgggccttcaccctgaagcagtttgctgagatgtatgtggccaagtttgctgccaagggggagggccagctgggccctgctgagcgggccaagaaggtggaggacatgatgaagaagctgtggggagaccgctactttgatcctgccaacgggaagttcagcaagagcgccaccagccctgagggcaagaagctgcccaggaccttctgccagctgatcctggaccccatcttcaaggtgtttgatgccatcatgaacttcaagaaggaggagacagccaagctgattgagaagctggacatcaagctggacagcgaggacaaggacaaggagggcaagcccctgctgaaggctgtgatgaggcgctggctgcctgctggagatgccctgctgcagatgatcaccatccacctgcccagccctgtgacagcccagaagtaccgctgtgagctgctgtatgagggccccccagatgatgaagctgccatgggcatcaagagctgtgaccccaagggccccctgatgatgtacatcagcaagatggtgcccaccagtgacaagggccgcttctacgccttcggccgggtcttcagcggcctggtgtccacaggcctgaaggtgcgcatcatgggccccaactacacccctgggaagaaggaggacctgtacctgaagcccatccagaggaccatcctgatgatgggccgctacgtggagcccattgaagatgtgccctgtggcaacatcgtgggcctggtgggcgtggaccagttcctggtgaagacaggcaccatcaccacctttgagcacgcccacaacatgagggtgatgaagttctctgtgtcccctgtggtgcgggtggccgtggaggccaagaacccagctgacctgcccaagctggtggagggcctgaagaggctggccaagagtgaccccatggtgcagtgcatcatcgaggagagcggggagcacatcatcgccggggccggggagctgcacctggagatctgcctgaaggacctggaggaggaccacgcctgcatccccatcaagaaggagaccgtgtccaagaagaagaagaagaagaagtag

SEQ ID NO: 151650 - DNA, 351 bp, synthetic construct
  misc_feature 1..351: note = Description of Artificial Sequence: Synthetic coding sequence
  source 1..351: mol_type = other DNA
atgcccaagaacaaggagtatgcccaggtgatcaagatgctgggcaatggccgcctggaggccatgtgctttgatggagtgaagaggctgtgccacatccggggcaagctgaggaagaaggtgtggatcaacaccagtgacatcatcctggtgggcctgcgggactaccaggacaacaaggcagatgtgatcctgaagtacaatgctgatgaggcccggagcctgaaggcctacggggagctgcctgagcacgccaagatcaatgaaacagacacctttggacctggagatgatgatgagatccagtttgatgacattggagatgatgatgaagatattgatgacatctag

SEQ ID NO: 151651 - DNA, 435 bp, synthetic construct
  misc_feature 1..435: note = Description of Artificial Sequence: Synthetic coding sequence
  source 1..435: mol_type = other DNA
atgcccaagaacaagggcaaaggaggcaagaacagaagaagaggcaagaatgaaaatgaaagtgagaagcgggagctggtgttcaaggaggatggccaggagtatgcccaggtgatcaagatgctgggcaatggccgcctggaggccatgtgctttgatggagtgaagaggctgtgccacatccggggcaagctgaggaagaaggtgtggatcaacaccagtgacatcatcctggtgggcctgcgggactaccaggacaacaaggcagatgtgatcctgaagtacaatgctgatgaggcccggagcctgaaggcctacggggagctgcctgagcacgccaagatcaatgaaacagacacctttggacctggagatgatgatgagatccagtttgatgacattggagatgatgatgaagatattgatgacatctag

SEQ ID NO: 151652 - DNA, 435 bp, synthetic construct
  misc_feature 1..435: note = Description of Artificial Sequence: Synthetic coding sequence
  source 1..435: mol_type = other DNA
atgcccaagaacaagggcaaaggaggcaagaacagaagaagaggcaagaatgaaaatgaaagtgagaagcgggagctggtgttcaaggaggatggccaggagtatgcccaggtgatcaagatgctgggcaatggccgcctggaggccctgtgctttgatggagtgaagaggctgtgccacatccggggcaagctgaggaagaaggtgtggatcaacaccagtgacatcatcctggtgggcctgcgggactaccaggacaacaaggcagatgtgatcctgaagtacaatgctgatgaggcccggagcctgaaggcctacggggagctgcctgagcacgccaagatcaatgaaacagacacctttggacctggagatgatgatgagatccagtttgatgacattggagatgatgatgaagatattgatgacatctag

SEQ ID NO: 151653 - DNA, 384 bp, synthetic construct
  misc_feature 1..384: note = Description of Artificial Sequence: Synthetic coding sequence
  source 1..384: mol_type = other DNA
atgcccaagaacaagggcaaaggaggcaagaacagaagaagaggcaagaatgaaaatgaaagtgagaagcgggagctggtgttcaaggaggatggccaggagtatgcccaggtgatcaagatgctgggcaatggccgcctggaggccctgtgctttgatggagtgaagaggctgtgccacatccggggcaagctgaggaagaaggacaacaaggcagatgtgatcctgaagtacaatgctgatgaggcccggagcctgaaggcctatggagagctgcctgagcacgccaagatcaatgaaacagacaccttcggccctggagatgatgatgagatccagtttgatgacattggagatgatgatgaggacattgatgacatctag

SEQ ID NO: 151654 - DNA, 1419 bp, synthetic construct
  misc_feature 1..1419: note = Description of Artificial Sequence: Synthetic coding sequence
  source 1..1419: mol_type = other DNA
atggccggcggggaggccggcgtgaccctgggccagccccacctgagccggcaggacctgaccaccctggatgtgaccaagctgacccccctgagccatgaagtcatcagccggcaggccaccatcaacatcggcaccatcggccacgtggcccacggcaagagcacagtggtgaaggccatcagcggcgtgcacacagtgcgcttcaagaatgagctggagaggaacatcaccatcaagctgggctacgccaatgccaagatctacaagctggatgaccccagctgccccaggcctgagtgctaccgcagctgtggcagcagcaccccagatgagttccccacagacatccctggcaccaagggcaacttcaagctggtgagacatgtgtcctttgtggactgccccggccatgacatcctgatggccaccatgctgaatggagctgctgtgatggatgctgccctgctgctgattgctggaaatgaaagctgcccccagccccagaccagcgagcacctggccgccatcgagatcatgaagctgaagcacatcctgatcctgcagaacaagattgacctggtgaaggagagccaggccaaggagcagtatgagcagatcctggcctttgtgcagggcaccgtggccgagggcgcccccatcatccccatcagcgcccagctgaagtacaacatcgaggtggtgtgtgagtacatcgtgaagaagatccctgtgcccccccgggacttcaccagcgagccccggctgattgtcatccgcagctttgatgtgaacaagccaggctgtgaggtggatgacctgaagggcggcgtggccggcggcagcatcctgaagggcgtgctgaaggtgggccaggagattgaggtgcggcccggcatcgtgtccaaggacagcgagggcaagctgatgtgcaagcccatcttcagcaagatcgtgtccctgtttgctgagcacaatgacctgcagtatgctgcccctgggggcctgattggagtgggcaccaagattgaccccaccctgtgcagagctgacaggatggtgggccaggtgctgggcgctgtgggcgccctgcctgagatcttcacagagctggagatctcctacttcctgctgcggcggctgctgggcgtgaggacagaaggagacaagaaggccgccaaggtgcagaagctgagcaagaatgaggtgctgatggtgaacatcggcagcctgagcactggaggccgggtgtctgctgtgaaggctgacctgggcaagatcgtgctgaccaaccctgtgtgcacagaggtgggggagaagatcgccctgagcagaagagtggagaagcactggaggctcatcggctggggccagatccggcggggcgtgaccatcaagcccaccgtggatgatgactag

SEQ ID NO: 151655 - DNA, 552 bp, synthetic construct
  misc_feature 1..552: note = Description of Artificial Sequence: Synthetic coding sequence
  source 1..552: mol_type = other DNA
tgagctggaggagaggccggcgtgaccctgggccagccccacctgagccggcaggacctgaccaccctggatgtgaccaagctgacccccctgagccatgaagtcatcagccggcaggccaccatcaacatcggcaccatcggccacgtggcccacggcaagagcacagtggtgaaggccatcagcggcgtgcacacagtgcgcttcaagaatgagctggagaggaacatcaccatcaagctgggctacgccaatgccaagatctacaagctggatgaccccagctgccccaggcctgagtgctaccgcagctgtggcagcagcaccccagatgagttccccacagacatccctggcaccaagggcaacttcaagctggtgagacatgtgtcctttgtggactgccccggccatgacatcctgatggccaccatgctgaatggagctgctgtgatggatgctgccctgctgctgattggcaagtacctgaccatcggcctggacaagtccatgtggaacaagagcaagatgaagtacctgaagggcaactag

SEQ ID NO: 151656 - DNA, 1116 bp, synthetic construct
  misc_feature 1..1116: note = Description of Artificial Sequence: Synthetic coding sequence
  source 1..1116: mol_type = other DNA
atgttccaggaggtgaaggctgacaaggtgaccatgctgtggaacaagaaggccacagctgtgctggtgattgccagcacagatgtggacaagacaggagccagctactatggagagcagaccctgcactacatcgccaccaacggggagagcgctgtggtgcagctgcccaagaatggccccatctatgatgtggtgtggaacagcagcagcacagagttctgtgctgtgtatggcttcatgcctgccaaggccaccatcttcaacctgaagtgtgaccctgtgtttgattttggcaccggccccagaaatgctgcctactacagcccccacggccacatcctggtgctggccggcttcggcaacctgcggggccagatggaggtgtgggatgtgaagaactacaagctgatcagcaagcctgtggccagtgacagcacctactttgcctggtgcccagatggagagcacatcctgacagccacctgtgccccccggctgcgggtgaacaacggctacaagatctggcactacacaggcagcatcctgcacaagtatgatgtgcccagcaatgctgagctgtggcaggtgtcctggcagcccttcctggatggcatcttccctgccaagaccatcacctaccaggccgtgcccagcgaggtgcccaatgaggagcccaaggtggccacagcctaccggcccccagccctgaggaacaagcccatcaccaacagcaagctgcacgaggaggagcccccccagaacatgaagccccagagcggaaatgacaagcccctgagcaagacagccctgaagaaccagaggaagcatgaggccaagaaggccgccaagcaggaggcccggagtgacaagagcccagacctggcccccaccccagccccccagagcacccccaggaacacagtgtcccagagcatcagcggggaccctgagattgacaagaagatcaagaacctgaagaagaagctgaaggccatcgagcagctgaaggagcaggccgccaccgggaagcagctggagaagaaccagctggagaagatccagaaggagacagccctgctgcaggagctggaggacctggagctgggcatctag

SEQ ID NO: 151657 - DNA, 1758 bp, synthetic construct
  misc_feature 1..1758: note = Description of Artificial Sequence: Synthetic coding sequence
  source 1..1758: mol_type = other DNA
atggcccccagcacccccctgctgactgtgcggggcagcgagggcctgtacatggtgaatggccccccccacttcacagagagcacagtgttcccccgggagagcggcaagaactgcaaggtgtgcatcttcagcaaggatggcaccctgtttgcctggggcaatggagagaaggtgaacatcatctctgtgaccaacaagggcctgctgcacagctttgacctgctgaaggctgtgtgcctggagttcagccccaagaacacagtgctggccacctggcagccctacaccaccagcaaggatggaacagctggcatccccaacctgcagctgtatgatgtgaagacaggcacctgcctgaagagcttcatccagaagaagatgcagaactggtgccccagctggagcgaagatgagaccctgtgtgccagaaatgtgaacaatgaggtgcacttctttgagaacaacaacttcaacaccatcgccaacaagctgcacctgcagaagatcaatgactttgtgctgagccctggcccccagccctacaaggtggccgtgtatgtgcccggcagcaagggggcccccagctttgtgcggctgtaccagtaccccaactttgctggcccccatgctgccctggccaacaagagcttcttcaaggctgacaaggtgaccatgctgtggaacaagaaggccacagctgtgctggtgattgccagcacagatgtggacaagacaggagccagctactatggagagcagaccctgcactacatcgccaccaacggggagagcgctgtggtgcagctgcccaagaatggccccatctatgatgtggtgtggaacagcagcagcacagagttctgtgctgtgtatggcttcatgcctgccaaggccaccatcttcaacctgaagtgtgaccctgtgtttgattttggcaccggccccagaaatgctgcctactacagcccccacggccacatcctggtgctggccggcttcggcaacctgcggggccagatggaggtgtgggatgtgaagaactacaagctgatcagcaagcctgtggccagtgacagcacctactttgcctggtgcccagatggagagcacatcctgacagccacctgtgccccccggctgcgggtgaacaacggctacaagatctggcactacacaggcagcatcctgcacaagtatgatgtgcccagcaatgctgagctgtggcaggtgtcctggcagcccttcctggatggcatcttccctgccaagaccatcacctaccaggccgtgcccagcgaggtgcccaatgaggagcccaaggtggccacagcctaccggcccccagccctgaggaacaagcccatcaccaacagcaagctgcacgaggaggagcccccccagaacatgaagccccagagcggaaatgacaagcccctgagcaagacagccctgaagaaccagaggaagcatgaggccaagaaggccgccaagcaggaggcccggagtgacaagagcccagacctggcccccaccccagccccccagagcacccccaggaacacagtgtcccagagcatcagcggggaccctgagattgacaagaagatcaagaacctgaagaagaagctgaaggccatcgagcagctgaaggagcaggccgccaccgggaagcagctggagaagaaccagctggagaagatccagaaggagacagccctgctgcaggagctggaggacctggagctgggcatctag

SEQ ID NO: 151658 - DNA, 1893 bp, synthetic construct
  misc_feature 1..1893: note = Description of Artificial Sequence: Synthetic coding sequence
  source 1..1893: mol_type = other DNA
atgcagggcggcaacagcggcgtgaggaagcgggaggaggagggagatggagctggagctgtggccgcccccccagccatcgacttccctgctgagggccctgaccctgaatatgatgaaagtgatgtgcctgctgagatccaggtgctgaaggagcccctgcagcagcccaccttcccctttgctgtggccaaccagctgctgctggtgtccctgctggagcacctgagccacgtgcatgagcccaaccccctgcggagccggcaggtgttcaagctgctgtgccagaccttcatcaagatgggcctgctgagcagcttcacctgcagtgatgagttcagcagcctgcggctgcaccacaacagagccatcacccacctgatgaggtctgccaaggagcgggtgcggcaggacccctgtgaggacatcagccgcatccagaagatccgcagccgggaggtggccctggaggcccagaccagccgctacctgaatgaatttgaggagctggccatcctgggcaaaggaggctacggccgggtgtacaaggtgaggaacaagctggatggccagtactatgccatcaagaagatcctgatcaagggggccaccaagacagtgtgcatgaaggtgctgcgggaggtgaaggtgctggccggcctgcagcaccccaacatcgtgggctaccacacagcctggattgagcacgtgcacgtgatccagcccagggctgacagagctgccatcgagctgcccagcctggaggtgctgagtgaccaggaggaggaccgggagcagtgtggggtgaagaatgatgagagcagcagcagcagcatcatctttgctgagcccaccccagagaaggagaagagatttggagagagtgacacagagaaccagaacaacaagtctgtgaagtacaccaccaacctggtgatccgggagagcggggagctggagagcaccctggagctgcaggagaatggcctggccggcctgagcgccagcagcatcgtggagcagcagctgcccctgcggaggaacagccacctggaggagagcttcaccagcacagaggagagcagcgaggagaatgtgaacttcctgggccagacagaggcccagtaccacctgatgctgcacatccagatgcagctgtgtgagctgagcctgtgggactggatcgtggagaggaacaagaggggccgggagtatgtggatgaaagtgcctgcccctacgtgatggccaacgtggccaccaagatcttccaggagctggtggagggcgtcttctacatccacaacatgggcatcgtgcaccgggacctgaagcccaggaacatcttcctgcacggccctgaccagcaggtgaagattggagactttggcctggcctgcacagacatcctgcagaagaacacagactggaccaacagaaatggcaagaggacccccacccacaccagccgggtgggcacctgcctgtatgccagccctgagcagctggagggctctgaatatgatgccaagagtgacatgtacagcctgggcgtggtgctgctggagctgttccagccctttggaacagagatggagcgggcagaggtgctgaccggcctgaggacaggccagctgcctgagagcctgaggaagcgctgccctgtgcaggccaagtacatccagcacctgaccaggaggaacagcagccagaggccttctgccatccagctgctgcagagcgagctgttccagaacagcggaaatgtgaacctgaccctgcagatgaagatcatcgagcaggagaaggagattgctgagctgaagaagcagctgaacctgctgagccaggacaagggcgtgagagatgatggcaaggatggcggcgtgggctag

SEQ ID NO: 151659 - DNA, 1734 bp, synthetic construct
  misc_feature 1..1734: note = Description of Artificial Sequence: Synthetic coding sequence
  source 1..1734: mol_type = other DNA
atgaaccagacccactttgtgcaggaccgctgcctgagtgacccctgtgaggacatcagccgcatccagaagatccgcagccgggaggtggccctggaggcccagaccagccgctacctgaatgaatttgaggagctggccatcctgggcaaaggaggctacggccgggtgtacaaggtgaggaacaagctggatggccagtactatgccatcaagaagatcctgatcaagggggccaccaagacagtgtgcatgaaggtgctgcgggaggtgaaggtgctggccggcctgcagcaccccaacatcgtgggctaccacacagcctggattgagcacgtgcacgtgatccagcccagggctgacagagctgccatcgagctgcccagcctggaggtgctgagtgaccaggaggaggaccgggagcagtgtggggtgaagaatgatgagagcagcagcagcagcatcatctttgctgagcccaccccagagaaggagaagagatttggagagagtgacacagagaaccagaacaacaagtctgtgaagtacaccaccaacctggtgatccgggagagcggggagctggagagcaccctggagctgcaggagaatggcctggccggcctgagcgccagcagcatcgtggagcagcagctgcccctgcggaggaacagccacctggaggagagcttcaccagcacagaggagagcagcgaggagaatgtgaacttcctgggccagacagaggcccagtaccacctgatgctgcacatccagatgcagctgtgtgagctgagcctgtgggactggatcgtggagaggaacaagaggggccgggagtatgtggatgaaagtgcctgcccctacgtgatggccaacgtggccaccaagatcttccaggagctggtggagggcgtcttctacatccacaacatgggcatcgtgcaccgggacctgaagcccaggaacatcttcctgcacggccctgaccagcaggtgaagattggagactttggcctggcctgcacagacatcctgcagaagaacacagactggaccaacagaaatggcaagaggacccccacccacaccagccgggtgggcacctgcctgtatgccagccctgagcagctggagggctctgaatatgatgccaagagtgacatgtacagcctgggcgtggtgctgctggagctgttccagccctttggaacagagatggagcgggcagaggtgctgaccggcctgaggacaggccagctgcctgagagcctgaggaagcgctgccctgtgcaggccaagtacatccagcacctgaccaggaggaacagcagccagaggccttctgccatccagctgctgcagagcgagctgttccagaacagcggaaatgtgaacctgaccctgcagatgaagatcatcgagcaggagaaggagattgctgagctgaagaagcagctgaacctgctgagccaggacaagggcttcagcgtcatccccaagccccacccctgcaaggccctgtacagcgccccccagatgatcagccggcagctgcggagcctgagctgcctgtgcccagccctcttccctggcaccagcagcttcatcgtggccctgagcagccctgccaacctgtacatcccccagaggcagaggagtgatgagctggtgtttgagagccagaagggcagcgccatggagctggccgtcatcaccgtggatggagtgtag

SEQ ID NO: 151660 - DNA, 3351 bp, synthetic construct
  misc_feature 1..3351: note = Description of Artificial Sequence: Synthetic coding sequence
  source 1..3351: mol_type = other DNA
atggagcgggccatcagccctggcctgctggtgcgggccctgctgctgctgctgctgctgctgggcctggccgccaggacagtggccgccggccgggcccggggcctgcctgcccccacagctgaggccgccttcggcctgggcgctgctgctgcccccaccagcgccaccagggtgcctgctgctggagctgtggccgctgctgaggtgacagtggaggatgctgaggccctgcctgctgctgctggggagcaggagccccggggccctgagccagatgatgaaacagagctgcggccccggggccgcagcctggtgatcatcagcaccctggatggaagaattgctgccctggaccctgaaaatcatggcaagaagcagtgggacctggatgtgggcagcggcagcctggtgagcagcagcctgagcaagccagaggtgtttggaaacaagatgatcatccccagcctggatggagccctcttccagtgggaccaggaccgggagagcatggagaccgtgcccttcaccgtggagagcctgctggagagcagctacaagtttggagatgatgtggtgctggtgggcggcaagagcctgaccacctacggcctgagcgcctacagcggcaaggtgcgctacatctgcagcgccctgggctgccggcagtgggacagtgatgagatggagcaggaggaggacatcctgctgctgcagaggacccagaagacagtgcgggctgtgggccccaggtctggaaatgagaagtggaacttctctgtgggccactttgagctgcgctacatcccagacatggagacccgggccggcttcatcgagagcaccttcaagcccaatgaaaatacagaggagagcaagatcatcagtgatgtggaggagcaggaggccgccatcatggacatcgtcatcaaggtgtctgtggccgactggaaggtgatggccttcagcaagaagggcggccacctggagtgggagtaccagttctgcacccccatcgccagcgcctggctgctgaaggatggcaaggtgatccccatcagcctgtttgatgacaccagctacaccagcaatgatgatgtgctggaggatgaggaggacatcgtggaggccgcccggggggccacagaaaattctgtgtacctgggcatgtaccggggccagctgtacctgcagagctctgtgcgcatcagcgagaagttccccagcagccccaaggccctggagagcgtgaccaatgaaaatgccatcatccccctgcccaccatcaagtggaagcccctcatccacagccccagcaggacccctgtgctggtgggcagtgatgaatttgacaagtgcctgagcaatgacaagttcagccatgaggagtacagcaatggagccctgagcatcctgcagtacccctatgacaatggctactacctgccctactacaagcgggagaggaacaagaggagcacccagatcaccgtgcgcttcctggacaacccccactacaacaagaacatcaggaagaaggaccctgtgctgctgctgcactggtggaaggagatcgtggccaccatcctcttctgcatcatcgccaccaccttcatcgtgagaagactcttccacccccacccccaccggcagaggaaggagagcgagacccagtgccagacagagaacaagtatgattctgtgtctggagaggccaatgacagctcctggaatgacatcaagaacagcggctacatcagccgctacctgacagactttgagcccatccagtgcctgggccggggcggcttcggcgtggtgtttgaggccaagaacaaggtggatgactgcaactatgccatcaagaggatccggctgcccaaccgggagctggcccgggagaaggtgatgagggaggtgaaggccctggccaagctggagcaccctggcatcgtgcgctacttcaatgcctggctggaggcccctcctgagaagtggcaggagaagatggatgagatctggctgaaggatgagagcacagactggcccctgagcagccccagccccatggatgcccccagcgtgaagatccggaggatggacccctttgccaccaaggagcacatcgagatcatcgcccccagcccccagaggagccgctccttctctgtgggcatcagctgtgaccagaccagcagcagcgagagccagttcagccccctggagttcagcggcatggaccacgaggacatcagcgagagcgtggatgctgcctacaacctgcaggacagctgcctgacagactgtgatgtggaggatggcaccatggatggaaatgatgagggccacagctttgagctgtgccccagcgaggccagcccctacgtgcgcagccgggagaggaccagcagcagcatcgtgtttgaagattctggctgtgacaatgccagcagcaaggaggagcccaagaccaaccggctgcacatcggcaaccactgtgccaacaagctgacagccttcaagcccaccagcagcaagagcagcagcgaggccaccctgagcatcagccccccccggcccaccaccctgagcctggacctgaccaagaacaccacagagaagctgcagcccagcagccccaaggtgtacctgtacatccagatgcagctgtgcaggaaggagaacctgaaggactggatgaatggccgctgcaccatcgaggagcgggagaggtctgtgtgcctgcacatcttcctgcagattgctgaggccgtggagttcctgcacagcaagggcctgatgcaccgggacctgaagcccagcaacatcttcttcaccatggatgatgtggtgaaggtgggggactttggcctggtgacagccatggaccaggatgaggaggagcagacagtgctgacccccatgcctgcctatgcccggcacacaggccaggtgggcaccaagctgtacatgagccctgagcagatccacggcaacagctacagccacaaggtggacatcttcagcctgggcctcatcctgtttgagctgctgtaccccttcagcacccagatggagcgggtgaggaccctgacagatgtgaggaacctgaagttccccccactcttcacccagaagtacccctgtgaatatgtgatggtgcaggacatgctgagccccagccccatggagaggcctgaggccatcaacatcattgaaaatgctgtgtttgaggacctggacttccctgggaagacagtgctgcggcagaggagccgcagcctgagcagcagcggcaccaagcacagccggcagagcaacaacagccacagccccctgcccagcaactag

SEQ ID NO: 151661 - DNA, 2898 bp, synthetic construct
  misc_feature 1..2898: note = Description of Artificial Sequence: Synthetic coding sequence
  source 1..2898: mol_type = other DNA
atgatcatccccagcctggatggagccctcttccagtgggaccaggaccgggagagcatggagaccgtgcccttcaccgtggagagcctgctggagagcagctacaagtttggagatgatgtggtgctggtgggcggcaagagcctgaccacctacggcctgagcgcctacagcggcaaggtgcgctacatctgcagcgccctgggctgccggcagtgggacagtgatgagatggagcaggaggaggacatcctgctgctgcagaggacccagaagacagtgcgggctgtgggccccaggtctggaaatgagaagtggaacttctctgtgggccactttgagctgcgctacatcccagacatggagaccagggctggcttcatcgagagcaccttcaagcccaatgaaaatacagaggagagcaagatcatcagtgatgtggaggagcaggaggccgccatcatggacatcgtcatcaaggtgtctgtggccgactggaaggtgatggccttcagcaagaagggcggccacctggagtgggagtaccagttctgcacccccatcgccagcgcctggctgctgaaggatggcaaggtgatccccatcagcctgtttgatgacaccagctacaccagcaatgatgatgtgctggaggatgaagaagatattgtggaggccgcccggggggccacagagaacagcgtgtacctgggcatgtaccggggccagctgtacctgcagagctctgtgcgcatcagcgagaagttccccagcagccccaaggccctggagagcgtgaccaatgaaaatgccatcatccccctgcccaccatcaagtggaagcccctcatccacagccccagcaggacccctgtgctggtgggcagtgatgaatttgacaagtgcctgagcaatgacaagttcagccatgaggagtacagcaatggagccctgagcatcctgcagtacccctatgacaatggctactacctgccctactacaagcgggagaggaacaagaggagcacccagatcaccgtgcgcttcctggacaacccccactacaacaagaacatcaggaagaaggaccctgtgctgctgctgcactggtggaaggagatcgtggccaccatcctcttctgcatcatcgccaccaccttcatcgtgcggcggctcttccacccccacccccaccggcagaggaaggagagcgagacccagtgccagacagagaacaagtatgacagcgtgtctggagaggccaatgacagctcctggaatgacatcaagaacagcggctacatcagccgctacctgacagactttgagcccatccagtgcctgggccggggcggctttggagtggtgtttgaggccaagaacaaggtggatgactgcaactatgccatcaagaggatccggctgcccaaccgggagctggcccgggagaaggtgatgagggaggtgaaggccctggccaagctggagcaccctggcatcgtgcgctacttcaatgcctggctggaggcccctcctgagaagtggcaggagaagatggatgagatctggctgaaggatgagagcacagactggcccctgagcagccccagccccatggatgcccccagcgtgaagatccggaggatggacccctttgccaccaaggagcacatcgagatcatcgcccccagcccccagaggagccgctccttctctgtgggcatcagctgtgaccagaccagcagcagcgagagccagttcagccccctggagttcagcggcatggaccacgaggacatcagcgagagcgtggatgctgcctacaacctgcaggacagctgcctgacagactgtgatgtggaggatggcaccatggatggaaatgatgagggccacagctttgagctgtgccccagcgaggccagcccctacgtgcgcagccgggagaggaccagcagcagcatcgtgtttgaggacagcggctgtgacaatgccagcagcaaggaggagcccaagaccaaccggctgcacatcggcaaccactgtgccaacaagctgacagccttcaagcccaccagcagcaagagcagcagcgaggccaccctgagcatcagccccccccggcccaccaccctgagcctggacctgaccaagaacaccacagagaagctgcagcccagcagccccaaggtgtacctgtacatccagatgcagctgtgcaggaaagaaaacctgaaggactggatgaatggccgctgcaccatcgaggagcgggagaggtctgtgtgcctgcacatcttcctgcagattgctgaggccgtggagttcctgcacagcaagggcctgatgcaccgggacctgaagcccagcaacatcttcttcaccatggatgatgtggtgaaggtgggggactttggcctggtgacagccatggaccaggatgaggaggagcagacagtgctgacccccatgcctgcctatgcccggcacacaggccaggtgggcaccaagctgtacatgagccctgagcagatccacggcaacagctacagccacaaggtggacatcttcagcctgggcctcatcctgtttgagctgctgtaccccttcagcacccagatggagcgggtgaggaccctgacagatgtgaggaacctgaagtttcctcctctcttcacccagaagtacccctgtgaatatgtgatggtgcaggacatgctgagccccagccccatggagaggcctgaggccatcaacatcattgaaaatgctgtgtttgaggacctggacttccctgggaagacagtgctgcggcagaggagccgcagcctgagcagcagcggcaccaagcacagccggcagagcaacaacagccacagccccctgcccagcaactag

SEQ ID NO: 151662 - DNA, 1569 bp, synthetic construct
  misc_feature 1..1569: note = Description of Artificial Sequence: Synthetic coding sequence
  source 1..1569: mol_type = other DNA
atggctgctgtggccgtggccgtgcgggaggacagcggcagcggcatgaaggccgagctgcccccaggccctggagctgtgggccgggagatgaccaaggaggagaagctgcagctgaggaaggagaagaagcagcagaagaagaagaggaaggaggagaagggagctgagcctgagaccggcagcgctgtgtctgctgcccagtgccagggccccacccgggagctgcctgagagcggcatccagctgggcaccccccgggagaaggtgcctgctggccgcagcaaggccgagctgcgggcagagcggcgggccaagcaggaggccgagcgggccctgaagcaggccaggaagggggagcagggcggccccccacccaaggccagccccagcacagctggggagacccccagcggcgtgaagaggctgcctgagtacccccaggtggatgacctgctgctgcggcggctggtgaagaagccagagcggcagcaggtgcccaccaggaaggactatggcagcaaggtgtccctcttcagccacctgccccagtacagccggcagaacagcctgacccagttcatgagcatccccagcagcgtcatccacccagccatggtgcggctgggcctgcagtacagccagggcctggtgtctggcagcaatgcccgctgcatcgccctgctgcgggccctgcagcaggtgatccaggactacaccaccccaccaaatgaggagctgagccgggacctggtgaacaagctgaagccctacatgtccttcctgacccagtgccggcccctgagcgcctccatgcacaatgccatcaagttcctgaacaaggagatcacctctgtgggcagcagcaagcgggaggaggaggccaagtctgagctgcgggccgccatcgaccgctacgtgcaggagaagatcgtgctggccgcccaggccatcagcagatttgcctaccagaagatcagcaatggagatgtgatcctggtgtatggctgcagcagcctggtgagccgcatcctgcaggaggcctggacagagggccgccgcttccgggtggtggtggtggacagccggccctggctggagggccgccacaccctgcggagcctggtgcacgccggcgtgcctgccagctacctgctgatcccagctgccagctatgtgctgcctgaggtgtccaaggtgctgctgggcgcccacgccctgctggccaacggctctgtgatgagccgggtgggcacagcccagctggccctggtggcccgggcccacaacgtgcctgtgctggtgtgctgtgagacctacaagttctgtgagcgggtgcagacagatgcctttgtgtccaatgagctggatgatcctgatgacctgcagtgcaagagaggagaacatgtggccctggccaactggcagaaccacgccagcctgcggctgctgaacctggtgtatgatgtgaccccacctgagctggtggacctggtgatcacagagctgggcatgatcccctgcagctctgtgcctgtggtgctgcgggtgaagagcagtgaccagtag

SEQ ID NO: 151663 - DNA, 1632 bp, synthetic construct
  misc_feature 1..1632: note = Description of Artificial Sequence: Synthetic coding sequence
  source 1..1632: mol_type = other DNA
atgcccacccagcagcctgctgcccccagcacccgggcccccaagcccagccgcagcctgagcggcagcctgtgtgccctcttcagtgatgctgacagcggcagcggcatgaaggccgagctgcccccaggccctggagctgtgggccgggagatgaccaaggaggagaagctgcagctgaggaaggagaagaagcagcagaagaagaagaggaaggaggagaagggagctgagcctgagactggatctgctgtgtctgctgcccagtgccagggccccacccgggagctgcctgagagcggcatccagctgggcaccccccgggagaaggtgcctgctggccgcagcaaggccgagctgcgggcagagcggcgggccaagcaggaggccgagcgggccctgaagcaggccaggaaaggagagcagggcggccccccacccaaggccagccccagcacagctggggagaccccatctggagtgaagaggctgcctgagtacccccaggtggatgacctgctgctgcggcggctggtgaagaagccagagcggcagcaggtgcccaccaggaaggactatggcagcaaggtgtccctcttcagccacctgccccagtacagccggcagaacagcctgacccagttcatgagcatccccagcagcgtcatccacccagccatggtgcggctgggcctgcagtacagccagggcctggtgtctggcagcaatgcccgctgcatcgccctgctgcgggccctgcagcaggtgatccaggactacaccaccccaccaaatgaggagctgagccgggacctggtgaacaagctgaagccctacatgtccttcctgacccagtgccggcccctgagcgcctccatgcacaatgccatcaagttcctgaacaaggagatcacctctgtgggcagcagcaagcgggaggaggaggccaagtctgagctgcgggccgccatcgacagatatgtgcaggagaagatcgtgctggccgcccaggccatcagcagatttgcctaccagaagatcagcaatggagatgtgatcctggtgtatggctgcagcagcctggtgagccgcatcctgcaggaggcctggacagagggccgccgcttccgggtggtggtggtggacagccggccctggctggagggccgccacaccctgcggagcctggtgcatgctggggtgcctgccagctacctgctgatcccagctgccagctatgtgctgcctgaggtgtccaaggtgctgctgggcgcccacgccctgctggccaatggatctgtgatgagccgggtgggcacagcccagctggccctggtggcccgggcccacaacgtgcctgtgctggtgtgctgtgagacctacaagttctgtgagcgggtgcagacagatgcctttgtgtccaatgagctggatgatcctgatgacctgcagtgcaagagaggagagcacgtggccctggccaactggcagaaccacgccagcctgcggctgctgaacctggtgtatgatgtgaccccacctgagctggtggacctggtgatcacagagctgggcatgatcccctgcagctctgtgcctgtggtgctgcgggtgaagagcagtgaccagtag

SEQ ID NO: 151664 - DNA, 918 bp, synthetic construct
  misc_feature 1..918: note = Description of Artificial Sequence: Synthetic coding sequence
  source 1..918: mol_type = other DNA
atggatgacaaggagctgattgagtacttcaagagccagatgaaggaggaccctgacatggccagcgctgtggccgccatccgcaccctgctggagttcctgaagagggacaagggggagaccatccagggcctgcgggccaacctgaccagcgccatcgagaccctgtgtggggtggacagctctgtggccgtgtcctctggaggagagctgttcctgcgcttcatcagcctggccagcctggagtacagcgactacagcaagtgcaagaagatcatgattgaaagaggagagctgttcctgcggcgcatcagcctgagcaggaacaagattgctgacctgtgccacaccttcatcaaggatggagccaccatcctgacccacgcctacagccgggtggtgctgcgggtgctggaggccgctgtggccgccaagaagcgcttctctgtgtatgtgacagagagccagcctgacctgagcggcaagaagatggccaaggccctgtgccacctgaatgtgcctgtgacagtggtgctggatgctgctgtgggctacatcatggagaaggctgacctggtgattgtgggcgctgagggcgtggtggagaatggaggcatcatcaacaagattggcaccaaccagatggctgtgtgtgccaaggcccagaacaagcccttctacgtggtggccgagagcttcaagtttgtgcggctcttccccctgaaccagcaggatgtgcctgacaagttcaagtacaaggctgacaccctgaaggtggcccagacaggccaggacctgaaggaggagcacccctgggtggactacacagcccccagcctcatcaccctgctcttcacagacctgggcgtgctgacccccagcgctgtgtctgatgagctgatcaagctgtacctgtag
